United States Patent Application Publication US 2005/0208558 A1 - sequence listing, part 34

SEQ ID NO: 37246 - DNA, 23416 bp, DROSOPHILA
ggatggatatgagagcactttaagaaatgggtatatttcaccagcggttaattggagatgggacgggatttaattaccaattaaatataataaaagttatagaaataatggtgctatagatttaaacccattttatattcatttaaaaagccacagaataattaaattaattagaagttttaatatagttgttttatttggatttcagctgcaacatggcaacattcctaattgtgtgataaaattttaagagtattaaaactgtctgattggtttttagatgactttggcccttccccgtctcttttttatctaacacatttgcgttggagtatttgtactacatacgtggcgtatgcgcaacatttgccggcaaacaaatttatgcggcaacatataaatcctgtaactgtagctgccacagttgctgctaccaattcggttgccactgaggtttgctgttgttgttgttatacacgccacacgcagctggcagttggaggcaaatagtttatgcgaaaagctccgaaaaaagtttgcaatttgctagcacagaacatcttaatttaataaagtgccccgggggcaggaaaaccagggggcgtacggcagatttggaaattgttgggctgcacgcagataaatctcaattagggaatacttgaatgcagcaataaacagttgggccccccattcaaaatgttcgtatatacccaaaaggaaacgaaaatttcgttcactcaaactctgtcgagttttcgcttttttattcaaagttttcttttttcctctagtttaacataaaagtttttcgattttttttttttttagctgcttttcctccattgctaattgacacaatttctaggcgtagaaagagggacattaattgctttggcacttcgtaaccaatattaattaaagacgaaataaaaatggtcgattaatgatgagataatgcaatggattttccttgtatcggtattttcgcggattctgatcagaagacttggacgcggtgattctctcgatcgcagaccaagatattgccgttcgacatgatggccacaccctcgagtcctttgaactccgagtcgccggagccccaggaaccgaaggtcttcaggaaactgccatccggattgaagatctgaatgcggttattgccagaatcggccacgaatatgtagccctgatcgtccacggccacaccgctgtgcgggaaataaaaaacagaagtgtgacctcaatactttgtcaattaaaatgggtgattcgatttgcttaccgtggaaacttgaactggccatcgtcggaaccctcgccgcccaccgtggagaggaccttgccgtttacgtcgaaaatctgcggatacggatacggaaagaggtgacaggcacggaaggtgcaggaagttcaaataaattgggaatgaatctcgatggtgagcatattttaattaaaattgttcacatggccagacaggcatggaaaagcccaagggaccagtggcaaccgggggctattggctcacctgaatcctgtggttattcgaatcggaaacaatcacacgattcgtgttcgatacggctatataatgcggatgctcaagttgtccctcgccacggccgcaggaaccgaatttgccaacgaaggaaccatcggattggaaaacctgacgaatgcgaatattcgttataagtttgcaaattgaaatcggcaggagcactcgaaaggatggaccatgcagtcaaagtacacacaaaaactgaaatatacactcttatatatgtatatgtatatatgctagttaagcccatgaaaattgctgctggatgctgcagctcgagtgtgacaaattgggcaaggctcgagcctctccgccgcccaaaactttccgcatgccccactgcatatataaatatttgcatgcaaatcgagactgaagatggcgaggcgagctgaaaaaggctgcgaaaaggatgggggcccggaccaaatgggtgcatcctccgtttcctcctcacctgcactctgtggttctccttatcgcacacgtaaatgaagccgagtgcatcggttgttacgccccaaggataattgaatttgccatctgcggtgccctgcgaaccgaaggcgcgcaggaatcgtccttgcggatcgagcacttgtatgcgatgattgtatctgcaagcgaaaagtaagaacagaggaaacttacttatcttattgaaatatatagtgcctcattaaagttataacacaggttaacaagttttgaaaccattaagtaaatttaaattttaaatctcatctgacaaatattataacaagcaaaaatcgtatgttttatttgactttattggttcactctccaaattccaccaatgcgtgtaccttctttttctttcatgttcaacctaactggccaatttattaggccatcaaatcggagaattccccccgttaattgtgaaccctgtgccaaaagagagatctcattaccggtccccaaaaaagattcgcgggtcgtcagccaaaatgcgacgccttggaattccaaggtgttggacgtggatttttggttttcagccgtgggttacggtggtggtgtggtgatgctgttcggcgtgggctgatgggtgttgggcttaggtctaagccgcttaacgtgcaaaatcaaagttgactcgcacaatgaggataccccgggtctttgggtgcttaacgagattttgcgtcaaacaatgacagtggccgccggaggctgggagatcggatctgggatgtgggggctggaaacgcgcggataccaggagcactcgtaaaaaggttgcagataacatgtgcaggagcgccaaaatctcgcactacgcccaactgaaccggcacatgtttctcattaacgcggctattatgcgcttagccctgccaattagaggaggagctagggaagccggggaattaatcattcgcctttgtttcggcttaattaaaacacagactgaccaccagcagatgctcacccactcggagattaagtatcaccgccaaagtagacaagccaatatcaattttttacttttacatagccaggacttagctaaagctattttatgaatgagatctatataaaatgttaaactttagaagttttccgcccattaatcttaactacgtaatgtggtaccccttaacttacctatcggctatgatgtactggccgatgcggttgacggccactccggcaaggcagtcgaactcgccctcaccgttgccgtactcgccgaactccttgacgaagatgccattggagtcgaagacctgaacgcggtggttgctggagtcggcgaccacgatgctattatcggggccgacggccaggccgcgtggccatgtgaaggatccgggctcgctcccccggccccccagctggaacagctgctggcgcttgcgcaggtacacctgtttagggatagtacctgccgctccggttataccggctgctgccactgctgctgctaccgtaggggacgtaggggagcctagcccgttttttgacccgtcatcgtcagaggaggccagctcgttggcctgacgcaagggcaatcccaggctcagccgccgcgaaacatcgctagcggtgctccgtccgctggagccgctcgtaccgcttccgtagccgtgcgcatgcgaggacgacgccgccgccgaagatgacgtcgagctgcccgcgtgcgtgtcgcgtgcgctgccgctacttccggccgagtccttgctgctcttgttcccgtacttgttcttcaagtaccgtgcccaggagctcagcgcctcgccgtccttgctgtccgtcgtcgagctgccgcccagtccgcttgaccgcgacgatcccgctccgcgatccgtgatcggggagttatcgcgcgatttcagggcgtgtgaggagcggctgcgagacagatcgctgctgccatagccgctgtacctgcaagagcattttggatattaagcacatggttacggggacgagcccacagggaatggggtgagatggaatggtgctgagtgctctgactgattttgaattggatgaggcgctttcaaccgagaaaaggagctgcagttaaaattgtgaatattcaagtgttaccatatttcttctttcgcaatttgtgaaaataaaaatatttttttttatattttaatatattccaaattgttaatgagcaactcctttctcagttaactgatctgcatgagactggtgcatgattactagtgctgcgtatgtacagagagattcagaaaggggaaaactttttgattgatttccggttaatttcggttaatttaaaaacgcgcagaattttgttttcttcttaaccacaggtaaatgactaatagaaaccaaaaaatacagaaaataaaaagtaaatccaaaaagttgaattagtctagagtgcaacatgaacgagaacaaaacgtggcgaacttcggacgtggcacgcacagaaactcaacttaaaaatataaaaacgataaaatcaaatgtaaaactaaatttcaatttaagtggtagaaaaaatacaattataaaccggggaacagcacacacgcacaatgaaagcgcccagcgcaggacaaaatactatcggcggaaatttaaatatctatttgtacagccgataaataacctatgtacaatttaaggttccttactcaggcaaaacaaactgcagccaaaactacatagatcctgaaaacaagcacttgttttgtgggatcatttttgtttaggtatacggcttgctagcatgagtacagagcccaaatagcttaagggggcattggtcaggagtttagctgaaagatctggtgtctcacgcgcaccttgatgctaggtaagcggacggcgagaccgtggtgggggataccggctcatccagatcctcgtcatcgttgccaaactgatgggacgaacggctgcgcgccaatcgggtgcgtcgctccttcatggccaagtatctggagcggccagttccatagcgactgtccgagtcgtcgccggttccggtggcatcctcatcgaaggaggcggtgggcgtggatagcgagggttgcgttacaatggcgctgctcttgctcttgtttagaaagcggcttgtgtagctgcaaaaatgttgattcggttcggtttttggtttttggttttggtttggtttggtttgatctacgtcttttggtgtttgtatacttaattttcaacagtcttttaacttagtagatgtgtatttttgcttttgccgtagctgttgctgtgtatctcttttctcattttttaattaagactaatcccgctttatcaactaacttttaactaggttaggtccgtgtctatagttgtgtgtgtaggtcgcatttattggccattaaattctattaaatatcgcaaaacccgagcacaaagtttataattaaatacacatttcgcattatcgaaagttgaacaaagtagttgggaaaagttcggttaagtacgtgaaattatggcgccaaaaggcgtccttgcctgtgtgtcagtgtgtgtttttatgttgctgggtggtggttgggcgggttaagaaacacaaaaagcaacaactactacaaaaatatcaacgagtaccgttgcacggataaagaacataaattaaatgcttaaatctaggtgagtacgagtgcagaaaggcaacgcaacgcaaaatgggggcgaatacagcaaaagcaacaggcagtatcgtcaggcagcccaaaaaagtaggcaacactttttgctgcatctcgatttactcaaaaaaaattggctgaaatttgccactgactccctgtttacactgtttaattgccaacgataaaaaatagcttaaacaattggatgttatgtactcgaatgcgacgttcatccgatacctgctgcctaatattaaatattggctttattttactgcgtgtacttatcataaaaaaacctgaacacatgctgggtagttaaagctcataaaaacgttttgatattgttatatgaaatcagtttattactttgcataaaatccgatgagaggctacactttttaaagaatataagcctgtagtaagtgtctgaataaaatcattaaaatactaattcacattgaacattgaggcaaatatgaaacatttaaacaaataagtttatgtcgtattgccgcatattataatatttatatactttcacaataaaatcactagatgcgcatgttcgaaaacctttttaatcggatttgcggtgcaattgatattgattttgattggttctttttgaggaattttagtagaattttcagctctaagttgcccaattaaaacagtatttttatgtggctgaaaacctttgctttctcgtgtatgcataaatccagcttcattctcactgaacaaacacctagagtaaatacggcagactgactgatggactcctggaaaatgtatatatatatatatgctgccactcggacggatgacaaatagcaatttatcgcattgttcccgggtagtaagagcgagtaagagtgattaggtggatgtgggagtggcagtgggatagggtgcgaaattggtggaggaacgaaggactgttgtaattacattacgctagatttgttgcagaagaaaaagggttctggtacggtgtttgttgtcgtgcaaaagtaaaattaaagaagtttttgtcgcccaggcacaaaggtcaattgttcaattttattttcagctaacattcaaatgtataatcaatagggtaagcactcgttcaacatgagttggcttagtgggtatgggttaggcggggggattgatactttagggcatatttcaaaacgcattcatcgttatgggttaacaaacaaattgaactatgaattgcattgaattcgagtcgctttggcctgagtttcacatatattgtatagagtatacatatcgggctagacatcggcaagtcgctttcggtagcgagcccggctgggtctgcttatgtacggtatgctaaagggcagtgcactgcaaagatcattgtatagagaacacaaagagaaagagagtgatagaacggtgtgtactgtgtgtgtttacctatccgggggaattgcatgttgtgtttgggtgtatctgtgtctgtatatgcgtatgtgtcgttttgctatgtgaaggttatgaacttgacaattagacgccacacgaggcgtatgagcaacaaagtggccaatgccatgttaatgccagcacggagcacttgtacaaagctgcagcagtgagatacaattggatacaaaagaaagtcttagaagcactcatttaaacgcattgaactcgtggggtaaccaatccgaaaccaaaccaaaaaccataattatccattaggcatatcgattaaagccgctctgcagtcatgtatgcaactgattacctaggtcaaattgtaaattaatagcgtgccatgttttttgcaggtaattcaattagtgcggcaaacaacgaggcaataaattaccgaactgcaatatttgacacacaatttattttccatgcccatcagatatgtatctctatcttttcgttaaagagcggcagctactaagctattacacagagaagaaaaaattcataagttttaaaaacatactttttgcaatgtatagacaagaaaaacattttatcttctgcccagagcttttcgattgaattcaagaaagtacgtttaaccgaatataattaagtgtctggcatagtttcacaaaaaaagtaagtaccataaaacccgtgaaagtttttatcctctgtgcggataaccatatgtgtttttcatattatttaaacctcattaaacatgcaaattagtcggttatagaaattacgaaatcacgaaaaaacgctagaatatttagaatgggatgttgggtggaaatacctgcttccggtgccgcttccgtagcgatcttcgctctcacttgtgtgatgtggcgctggtaccgctcgtgtgcgtccgccagtggtgccgctgccactcccatatccgctgctcgagggcgtggcatagctactgcggcccgctgccgtcgatgagctgtcatcgcgggatgctcgccgcgcctccaggcgatcccgataggatccactagtggtggaactactggctgccgtggttgaactggccgcgctgttgggcgtggacttggtattggtggtgctgctggtggcactgcttttcgccttggtctccggttccgattcggattcggactccgaactggtctcctcctcgctgctggaactggactctgccttcttcttgtccgccgagccattggtggtactggcggtgctatgctgtggcaggaagcgactcacaaagggctttttttccggcactgccgtggtatccctggctgtggaatacctggatgagctgggcgccttggcattttggcttgtcgaattgctgctggatgttgcaggtgctgccgcagttgcggatgtggatgtggctgccacagccgctgctgccgccgaacttgctgagctctcggtggaggcactgctgtcactgctaccggatctttgggtcttcttgaccgctgccacctgggcggaaacgggcggcttcgactgttggattgtaggagtgggagttgcatcagagtctgtggcgctcgcggtctgagttagttcgatttcggttttggcaagcgacggaacgagtaacgaatgcgatgcagatgcgaaatagaaagatttatagataaagaaatagaaatgacgatgctgagatgtagattgctgatgggcgggagtctagtgaaatttgggatttattagaagcaactgaatcgcagctggcatttctctatgggaaaatgtttgtgtatactagtaaaaatagtaaagaatttttaagctaattcaattgattagtacaagaactaaaatttaacatgaacgttgaaaataccaagtgttagctctaggtcgagttatagatattcatggagtgactttagtagcactaacatattttatatatattggtttaatttgaagttagcccaagcttggttattatttctctatattttccttggcaaaatctgttgaagctctaactcggaagcatcgaaaattttaaaatcgtagaaatacaaagttcccagcatacgagccttttcattacgtttgatatttcatccacttcctttgatgtgctcctaattgatcagacaaccttttcctattcccattcagtaaatgccaaaaacaagacaaatatgcagcaagggtgcatatgccactaaagcacaactccatgtatatatgtacacgtatatagtgtgtggtatattcattcatacagatacacacgcacactctggcagctggaaacattgttaaactgacggaagcagccgcatcgctgacactcgcatgatggtgaaatattcgccattgaacccggctctgtctgccattttcggggggcagctgactggggactggggaagggggcgtggcaacaatgtgtgaatgcatgacaggcgaaaaaacgatgggtggggatatgggaggcgggtaaagaaatgcatacacaacagaaatatttacagcggacatcagaaattgtaaaccaacaaaacggcaacgaaaatataaagaaatggttgaaaaagtttccattataatgagaacgggagcaaataaattgggaaataaccaagagatgtatatcttgttgaccagggtctgcgatttattcaactcgacaccatttgccaaagaaatttagtaacatttaagcaaattaacatcactaccacatcggttctccacttgcaagagagattcgcagagatatgtagatataaacatagttagatagatagatatagagagaaagagggagaaaaaagaaagtttcaaaagaaaataaatgttacatcaaaggaattttgtaatttctggttgctttatttgctttaaaattttgtgcagtctctaactaacgataaggtaaaggatgttaagctacataaataaaaaatatatatatccatatatttgtatacaatattgtacaattctgatgtccgagctttgggtcgaaactttaccttgcattgcattcagattacttagtagaggcaaaaggttcagacccaaaacagcattaggtgaaaggcgctcacaagacaataaacgtaagtaaacggaatggaaataataataaacaatcataataaataaataaagacttgagcttaacgtacacataaaataacaagaacagaaaaccagttgcgtaaatcaaaataaataaaaaccaaacataatgggacaagttcagaggaaatgtttttggttaggtaagattaacagtaaaagtaacgataaacagttaagttaggttgctccttcgacaggatcgacaaaagaaacaaggataacacttacggagcggaagggaagtgtgaacgatggagcacaaataaagaacgaagcacacatggcgtatacgcaattatcgttataagttctttcggcgggagttggcacaacacaagggtaaaatactcagctaggctacagtgacagcgatccctactatacaggctactcagtaatatgtaaattgctattgctatctacacgaaagtgaatttgatttctaaaagtatatatatgtatattttctgataagaagtactcaaaatattcgttcttagaatcttttgaattttacctactattgtgttatctgtaactcaattcaatcctcctcttcctcttcatccgtgacctcaatctcctcttctgtgtactcctcctcttcctcttcttctggactttcgtcggtagatttatctgtttcttccataagctcctgattgcttatgtggtctactgggctttcttccactttgtgcgcaatgtcattctcgggtggaagtacattgatcactggcagatcttgactctctatttcgattacccttccttcaacttcctcctgctcttcttcactttcagtggccgttacttcttcgtattcggaagaggattcttcctcctctgtaacttcagatgaggtcggttgcagagcttcctctggtaggttcagcaattccctgggagcctcttcttcttctacagattcttctacttgttcctcctcctcgtctacctcttcttcttcatcttcatcttcaacttcctcatcttcttcgctgtcactgctttcactggccacgccttcttcttctgtatttgcctcattcacacttacctcagctcgcgtcgtggatgccgcactattacgcactggggacgccgcctggttggagctgccatcgctttcttctccgcctcgattcttcagagccgccactcgctgatcgctggcggtgtcgccaccaccactggacgtcgatgttgctgctccacctgtcgatgatgagccggcattcttgcgtttctggcgcgccagctcctcctcgtcggcggcgttctgctgattcttttgctgctgccgttgcatggccgctttttgggcctgaatggcggcttgaactgccgcctgagctgcggcagcggcatcggacttcttctccttcttctccttgccaatatcggccaagcgctggacaacgcgcgagcagtcgctcaatcggatgatgccgctcaactgtccgcgggacacatcctcgctgtccaggacgcgatccttgcgctccttgagctcctgctgccgttgctgttgctgctgctcgctgtcggagtcgtcgttctggtgggatctcacgaaacgcgagcggaagcgggaggacttgcccgccctgcccgacgaaccctcgttgtcgtagtcgttctcatagtcgtagtcgccaccgctgcgtccatagcgatcgttgttcgcttgggtagcgctgcgctgcggccgttcaccgaacttgcgaccgcccagcacgggctcatcgttgtagccactgcgctcctcctgctggcggaactgggtggccaggcggtggtcgctcttcgatcgcatcaaacccggctgcagagcactgggcggcgccagatgggaactgctaaccgaaccgccacttggtgtcgaatgaggtgctatgttcaggtcaccgaaggtggccaggttcattactagctggttgggatctatggagaccaggaacctcactcgccgactgtagtcgttgttctcgtattcgaagtgacgcaggaactccaccgtcttcaggaagatctccttggtgtccatcagctcgcaatcgtcccactccacggtctcgttcatgtacttgtccaccgtgtcgcagttgctggtgatgttcgtgatttccagatcgagattctccttaagcgtggtcagattgcgcagctccacggccaaatagcgatcgatctcacccttcagctggtcagatcgatccttgatcgccttggtgatcctttggtagatctcatcgatctcctccgtcacactaatggcgttcgtctgcaggctcatggtgttcttctcgatgatggccagcgaatcctgaagtcggtgcaaactgcgacggatctaagaagagatttggattatggatcagtaagtaatatggtaagtaatggcaacatttaaattaaagcgattttaagtaatattgatgctcacctgtgaattgaatcgcgtgatctctcgtcgcagaatgtccatgtgggcgcttttgcagtcctcgcagatctttttctcgcagtgtgcacaatgggacagataggctttttccgagcaaacgccgcaacgctccataatttgacctgcaagaggtgaacggggaaaacacaattacttatcacacctggctgccaaaaaacacagtcccaaaaggggcaacacaaatgactttctgcccacttgggttggacaataaaatgccaagtatgccggcggcaacagcagctcatcaatttgcactcttggcaacaatcttgccacatgccagggatgccaagcggaatggagggtgtgaggaaatgtcgaggcggatgtctgttgcattcactaatgcgatttcaagagcacgaaatcaactgcacctaagcgccagttatgcagctatactcgagtgcatatctctgcactgagacttaaaactgaggcttaaaagatctttgaatgtttcaaaactatcgttttagtcacttagatgtcacatacaaaggatttttgcaaatttaatagcctgagattttatgttttatgtttttcatcagaaatttcaaaaatcgtcggaagctcggatatttgtgagattttttttggtgagccttccgtttggtgggggtcacatcccttggcaaaggatcctgtggctcgtcgactacaggatgccttcagtggggcaatgcaaataacgagcctcagcaatggggagctgcaatgcaaacatggcgatgaagatgtagatgtcctcctgctgcaacagtcccagcttgaaaaagtaaacttttctgcttcaattgctggcattggcaatgcctgatgaacacccctcagtagttttcccagctttctccttctggttgacaataaaccagcgggagatggtgggaaaggggtgcaggggtgccggagtgccttgtgccaatagttggcttcagtattttctcatgtaatcatatggaaaagtgaatttgcaaattccacatgaaagttgtacgagtgctcgttgtccttgctatatccataacatgaaaaggattcctttgtttcacacatttgcatagcttaggaaatttgtgcagcaagagtacaaaaaaaagaagagtttcggatgcacagtaaacattttttagctatgctaacgaactggcttaaaagacattattaatcaattgtatctagtataacctcaaaggtcaagcctatgcctcagtttaacaacatttagccatttttgttattgactgcaatctatagtattacacctaattttctttctgtgcgatagttaagctaagaactttgtctgccttattaactcacacttgatcctgattgcagctcaaaagttgcaagccatttgcatatttacccaccaccatcaagttttgtcagatggaattgcatagtcatgcctaagaggaggttgttccacaaattggttttggctaaatgcaaattgctcaaacgaaatcaatttggttttgcttagttttaattgctatcagatggcaggagcgcctgactttttaattggaaagccaaacataatggcaaatgatagtttttcggccttgatttccatcggcattctttgcaaattttccgctcgttgtatttagtggaatttaattaaagttacaacaatgactacaaggcaatactttttattaataacatttttgtttgccttttgcctttgtgcactcagcttttttcgtttgcgaactaatctgtatgccagtcggaatttccaagccaatatttattatttattatcaaagggagaaatttgatttgtttcaggcatttacaaaataaaaagggcaaacatatttacctgatgtgggatcgggcagctctccggtgatttcgatatgcagctcgaggaaccgttgtagggtgacattcgttgggaaagcctggacgccattgtagggtatccggtgttcggcacgacattcggggcatttcacctaattgattcgcagaaatgctgttattagtcaagaggatataattggcccaaggcgctaatacaatgctaaatcccttttaaggtaattgaaacaatgttgagcacaaggcttttggcagtaagctgctttgaattcaaattgcataaccctaagccaactattaaatgccattgttcgcaactttaaaaacctttcacattttgttagttgcatgtgaaggcatcttgagtgcgctcttcatatcctgtcatctccgttttgccataaagatccatttcagttatggctttttcattcgcatgacaggtattgcaggcagcgatttcccccccttattaatattttttttggtaagcatttttcttgagtttggccagcacaatgaaaatgctttccaattatttgcgtggcgctggccaaaagccaaaacaaaatttataaatacacgcagactgaggcgctctataagtagcgcggcacacagatacacactttcgtacacttgtgggttcattcgagcctacatatatccacgcctttctatataatttttcaacaagatatctacgcaaatgcgccgcaagcagcaagataaatacaacattttcgggggcgtcttgttgggcgcctctttgtttttccacccatcgtattttcccttatttcccatgcgagattttagcttaagcagttacactgaagcaaatttaagagctttaggaatctaatattgataaatgttacaatgtgtcgattgttatttataaaaatttaaaataatttgagaaattattggttataaagcttgagctttgacataatccttacagtgctttggcaatttttctgagtgcacatcagcgatgtgtgacgtcggcggcaataaccaaattgccgctcgcacacaatgcactcgcacagtgggatgattaatgatgatcgccttacctggcgtcgcacgtagtccaccagtccctccatgcacggctccatgcagaaggagtgctggcatggcagcagcttgggaatcctgtaccggtccaggcagacgcagcacgtcaacagctgctcgaattgctccatggctcactgacatgaaaatgagaaaaatacggtggatgggtaaacaaatgcaaaacagtcattagacctgattcgattataccgcaaaaagcgctgtcaatttgatattcatatcattataaattcaggactccctgccctttctaatctcatcataagacgacagaccgtctgtcagccggtaagcctcgtcgcaaaaaaaaaaagaaacgcaaaaatcgaaaaaaagcagaaggaatccgattgccacgaaattcttgcatttgaatgaacaagcaacggcacaggactgactaaaagccagaacccaaatgtcatacaataaattgaccatttcgttgtcgtaagtcgcgagccggcttcatttggcccgggtaaatacactaagccacaaatctgcttatggctgcttcattaaaagcggatctgacaagtttatttagacgaaaccgagatgctcaacagtatcagatgtttgccatccctcccatgttttgccctcatcagcaaatgaaaagcgaggaaagcgacgctcgcagatgaaaattctctatacgttgtgtatccccaatttcgctgcacatgacttttgacttcctttgaatgtcagtcaacattttcaccaattaatgataagtatttacgtttaaatgactttaggaatttgtcgaatgagttgtgtaattaggtaattgcatatattaaacccttttaacatttccgattctcaatgctaaacgcgcagcatgattcactcttcaacaaataccaacaaatatttgcattaaacgtttcacttttatgatgtttaccatatccatgaaaataaaaatgcgaactgtataaatcagctgataaatattcatttctttggcatatttgaattccctgttcgttttatatcgttgaataaatatgactttttttgtaaataaaacccatgtttggttatttgtattcaaaagaggcttgaatatttgaaataattcgaatgaaattgattgattttaagtagggatatgtttaagacaaaccatcatcagcactcgtaagaaacttatgtttaatagtccatctgattgacatataattcatcaagtaatcgaccacaagcaagcagcacatattccgagtaaatttgtgtgtgtggcaataaatcatatatttaaatcagcttccattgcacaatttcataagctacttgcaacattttttcagcactctgcaatagctttctcacatttggaaaagggatcattgctggccgcagttgagattttaataataaaaatgacacacatttcgtattaagagggaagaaaagcaggcagcagccgcgtatatgaagtatagtataaatataaatacgatttcgccgttgctggcaatatgcatcgcgtatacgccgcgtgtgtcgcgcacaaaaacgcgcaccaatgcgcacttcctgctcgtaaataaactgagagtgtgggcggatgaggatatagccatggaatcggtaccgtgatgtccatgatgcccaccgctaattgtcgtgcgcctgtttgccattattgtcgtgtttggctcggtttggtttcggatatttaaagcatccatttaatgcggccaaaagttcacaatgaagctatcgcaaaaagtggatatatgtatgagcttatggacatatgcgaacaaagtgcaattaactggaaaatgcgcttaaaatcaaattgaatagaaattctgtcgttctcgcaaattgtgcgtggtaaataaaggcaaaactggtggtcctattagaaagtgtaggtcctttttctggtttcgagcgaagtgcactgtgtgtgtgtgtgtgtgtgtgtgtggcgaaactaatttagccattgcatttgtgaatcgctgctgaaaggattaaaatgaatagcgaacgctgctcgccagcataatgaaagccaccagaaggcggcataactaccaaaatccaaccaccccgttttacattttcatttaaagggtgggtaggtcattcagctgggtccgttaatacatatatacacttatacgcatacatatttatgtgtatatatagtggtgaatgcattcgcgggctgtgtgagcgattttcagaaataccaaaccaattatccgtgaaaatgttaaatgctcttgaagctgaaatctgtgttttctggtttcctttgaatttccccacggctctttgctttcattcaaacgccaaattgacggcgacagttgttcaatgttttgtttacagaaaaaagagcacgagaaaatcattaaccttggcgggggttaaaattaagtcgagttatgcggcaggaaacagtaaatggcgaacgggaaacggaaacgaatcacttgaccctgggagagttttttgccaaatgtgaaaaactaaaatgggtcaaacttttcgcgctgctgacagttggtgacagaaaatcatcaacgcaaagcactgaaaattgaaatcaacacaactaaattgaaatgaattcgatgaaatttgggtcagccaaaactgagcagaaatcaccaaccaaaaaaaaaaaaaattgaaatacatagaaacctcaccaacttaccaattgaaatgggaaactatttggcaatccttgctgttgctgtcaaagcggcactcgaaggcaatcataaaatgcaattggttttggcaatgcgagaatccttataattcagtccttttcaactcgtttttgggcactttcatttaatgagtacaatcgatttccgttcgccttactttaatttcaatatatctaattcggtacggtgtcgtttagatttttttcttatattttttttcagtttttgctgggcaacacgcctagtagaattcgattggaaatgtaaaaagcgactgatggcaagtgaaaattgccaagcacacgagctgagcaacagtctacaatattttaaatatatatacaatccgcggcattctctcccgatttcgctgtgtatctgcagatatataccgtctatatatcgccagagagcgaaacaaaacaaaatgcgcgatcgtcagacacaaacgcaaaaatatattcttggcatcgtgcgtatgtatctttatctacagtttggctgcagcgccattaataagatacaaagatacaaatgagtacttcgcactgcatgttacttccaaatggagttcccatttctcgcctcgaacctggacatcggctacttattggattaaccgaaaagattttcctccatttagtacgaatacatgcacgcacactcttgacgtcatcaactgagctgattttctcattcggacgcacgccggcattttccatctatatctcattgctgggctatttgtgtgcttttgtgtatctcgctgtaacgggccctaaaaataaatttcattgaaaattggagcgaacatcgctcgaattcgctgttccgtcaaactagtggaacatttctctgtgccaagtgaaaagtttctacttccattagaagttttcccttaacttaagtagcagtaaaccattagtttgctgcaatacgaactaaaatttcatattccattcaaaaagttgtccctaaaagttacaattaagctttttctcaaacatgttcaaaatatctatctgtatctattaactacatataattgcattcggtaagtaagtaggttaagttccctacacaaacatttgttacttttaccaaaataattctatccagtttcgcagtttttttttctgtgcatgcttctcaaggtcagaacttcgctcctctagctctgtatatatcattctatctccctatgggaatatgccgaaaatagaactcactagcccggaattcacagactgcagtctgcactcctaggccaaaaagaaaaacaaataaagaaatgaaaactgcactgtatttttgggctataaataaacggagcagacgggagaagcagatgcaatcgaaactttttgaaattttagctgcactcccaaaggaatactatagaaactacaaagtattgtgacgttccaatttcagcggtgataacttacgtttccaagtgttgttttcttcttattgtctacttgggtatccgaggcgcccttgaaaggggcctgttcctttggctgttaactctgctggctgaaattaaaaagaaaatatattaaatttagagccaaaggcaattgtgagtgaattgtggggagtgagggtcgagtagccatttacctggccattaacacgctgcgcataagccgcatcatgccaacttaattatacggcctcaaaggctgcggcacgcaaaacaatgatgaaggcgggtggtgaaagttggaattcattggatggcatgggattggatgggattggatagtattgaatgggattcgattgggcgcggttgacagtcgaagataatgaagttcggaatgcgcttaaggttcgcttattgtgcactgcgacagataagctcctcggtgggccacacactcttgaccaggttaatgaataatcagctggggtcgagcatatggctgcgaaggtagatctttttaattaacttgccgtggccgagttcctttcgaccaaaggaaacaattaaacaatggaaaaccaatttccgaaactataataacatgattacatcggcggtcttttgagcatcgaacgcgtaaagggaatttaatagaaattaattgttcacacaattgcattgatatcccttataattaattttctttaatgagcacaattcggagcttcattgcgttactaaaatgatacagtaaaatgtggcatgaaaaattatacatcaattcatacattttatgatgatttcgtttttagtattattgcagattggttttatttgcaatcactaagcttttgaatatagcaatatttaaacataatacagatttcagcaaccaacaagttgacttaaaacaagtgacttaaaaacttcaatagctcggaaacatttggaatatttttccatattagattttggtaatataaatgctatttgtctgttgaaacaaaaacttttcaacaaaaaggtgtacaactttatgtagtttttaaaatacctttaaatgaatggataaagaaaatgagacaacactaagaaatcataagcaatacatttactttaaagttgccaacgcgctactttcgagcagtttttaatttaagttgcaaaagtggccagtaaattcgaatcaaaactagtttaggtggatatctattgccagcgtgctgcaatggcacttctttaatgctgccagcgaccttgaacttccgcccagctgaagcacactcgaaaagagcggaggagggatggggttggagggcagatgaagtgaattgaaaagaggcgagtgctcgcaataaagctaaaaggaaaactggaaaaaactgttgcctactttccggcggcacataaatttaaaccgcacacgcctctctcacttaatcttccgtattatttttatttttatatttcgaaacgagaaattaattgttttgtgtgagaggtgtgaatataaaaataaatacgagaaagcccaccacaaacattccaaatggatggcgagaatgggagaaggaacaagcaaaagcaaaacccgaaaccgaaacaaaagcaaacaaagcaatcaatgataagcgagcagcgggcaaaagacaaacacaaacaacagaaatggaaatagaaaatctctgaaaatgtcgctgattgaatcgaactaaaaataaggcagcaacacggcgtatgagcaatgtgcgtctctgtgtgcgtgcctgtgtgtgtgagtgtgggcaaattattgccatgctttctgatgagatatgcacacacacacacacacacacacacacgtaatatagcgtataacagatcctcatcaacatatatttgtatacatgattatgtcaaaatttgttaataaattttgaacgcgaagccgaaggagatgaaaataattttgacagcttttcacgaatgtgggagtgtgcacacggtgggatgttgagaaagcgcaattttcagccaggtgacattttcccaagctccttctctcgccgagattctcacgcctttcgccgttttctctcttcttttttttacataatcagcagccattgaatgcgtcgagctcatctccatttgaatgcgtttccaaaaacgagcttaaaatcaggacgtatccaccccgttcgactcacttgcgttggcttcctctatttcctgatgcttcgcgaaacttttgcaaatttattcgcatgccttggcggcacaaggactttcactgacttcactttcaaactgaggtacgatgtattaccgccttggctcaaaccaacactcgcgtcgcgattactggtgcttttggacgcaccctcacgcactgcgcgacaggtgaaagatctttgggtagatctttgcacccctctatatacacttaatagatatatatatatggatataggtggttgggaatcgaactgggctatagctattatcggcgtatcggtccgcacgtccactcgcgagcgtgccagaaatgaaaatgaatgtttttctctgctcgactctcgaacgcttgatgatcagccgttcttgaggtgaaattttataaatataacctgaggcaacaacaaaagtgccacaaatatttctgcgtcttcttcccactttcacgtagcacttttgttgtttcccagcttcacccgaccccaacgaacctgtgcaagaattatatacatatatacatataatataatatatgtaccataattgtctgtaagaattcctctcgctttttacaatgtcgcgcagaaagtccaagagcgacaatatattgttcaatacgtattcttacctgttattgttctggcttatttcgcagttattagagtgagattttcacttttctttagtccagcggaaagaaaagctgaggaaaagatcgacgcccacgcatttatctggcagaatgattcattttcgaatttttttaaatatttatagaaatattgatacttatatagaataaggaaattgatgtcttagcaaatatcgcgcgagttttatgtagttatagaattcagcataattaaaagtgttaacagaaagacaaatgatttagagataggtaggttttttactctagacatcataataaaatatatacgcttaagatttgtcattgaattattaatatttatttcatcttaatttattaagttctgtttctaagcacttgtttacgtaatatatattaataatatgcctaagaagatcaacatttgttactatgttgtcttaaatcatttagttctttaatattacttatttttcgcttattattctataaataccaaattcctctccgtcatcacatgcagtatgattggtctgcatttagccatcctcgccagacattcggtcttttgttcggtcatttgcttgtcccacatgacatcttgtcaataggctgatgaatcgggttagccgttaatatattttcggaaaaaatagcgagctaaaacaaagccg

SEQ ID NO: 37247 - DNA, 3497 bp, DROSOPHILA
gcacgctcgcgagtggacgtgcggaccgatacgccgataatagctatagcccagttcgattcccaaccacctatatccatatatatatatctattaagtgtatatagaggggtgcaaagatctacccaaagatctttcacctgtcgcgcagtgcgtgagggtgcgtccaaaagcaccagtaatcgcgacgcgagtgttggtttgagccaaggcggtaatacatcgtacctcagtttgaaagtgaagtcagtgaaagtccttgtgccgccaaggcatgcgaataaatttgcaaaagtttcgcgaagcatcaggaaatagaggaagccaacgcaaccagcagagttaacagccaaaggaacaggcccctttcaagggcgcctcggatacccaagtagacaataagaagaaaacaacacttggaaactgagccatggagcaattcgagcagctgttgacgtgctgcgtctgcctggaccggtacaggattcccaagctgctgccatgccagcactccttctgcatggagccgtgcatggagggactggtggactacgtgcgacgccaggtgaaatgccccgaatgtcgtgccgaacaccggataccctacaatggcgtccaggctttcccaacgaatgtcaccctacaacggttcctcgagctgcatatcgaaatcaccggagagctgcccgatcccacatcaggtcaaattatggagcgttgcggcgtttgctcggaaaaagcctatctgtcccattgtgcacactgcgagaaaaagatctgcgaggactgcaaaagcgcccacatggacattctgcgacgagagatcacgcgattcaattcacagatccgtcgcagtttgcaccgacttcaggattcgctggccatcatcgagaagaacaccatgagcctgcagacgaacgccattagtgtgacggaggagatcgatgagatctaccaaaggatcaccaaggcgatcaaggatcgatctgaccagctgaagggtgagatcgatcgctatttggccgtggagctgcgcaatctgaccacgcttaaggagaatctcgatctggaaatcacgaacatcaccagcaactgcgacacggtggacaagtacatgaacgagaccgtggagtgggacgattgcgagctgatggacaccaaggagatcttcctgaagacggtggagttcctgcgtcacttcgaatacgagaacaacgactacagtcggcgagtgaggttcctggtctccatagatcccaaccagctagtaatgaacctggccaccttcggtgacctgaacatagcacctcattcgacaccaagtggcggttcggttagcagttcccatctggcgccgcccagtgctctgcagccgggtttgatgcgatcgaagagcgaccaccgcctggccacccagttccgccagcaggaggagcgcagtggctacaacgatgagcccgtgctgggcggtcgcaagttcggtgaacggccgcagcgcagcgctacccaagcgaacaacgatcgctatggacgcagcggtggcgactacgactatgagaacgactacgacaacgagggttcgtcgggcagggcgggcaagtcctcccgcttccgctcgcgtttcgtgagatcccaccagaacgacgactccgacagcgagcagcagcaacagcaacggcagcaggagctcaaggagcgcaaggatcgcgtcctggacagcgaggatgtgtcccgcggacagttgagcggcatcatccgattgagcgactgctcgcgcgttgtccagcgcttggccgatattggcaaggagaagaaggagaagaagtccgatgccgctgccgcagctcaggcggcagttcaagccgccattcaggcccaaaaagcggccatgcaacggcagcagcaaaagaatcagcagaacgccgccgacgaggaggagctggcgcgccagaaacgcaagaatgccggctcatcatcgacaggtggagcagcaacatcgacgtccagtggtggtggcgacaccgccagcgatcagcgagtggcggctctgaagaatcgaggcggagaagaaagcgatggcagctccaaccaggcggcgtccccagtgcgtaatagtgcggcatccacgacgcgagctgagcagcgatctgtctcgcagccgctcctcacacgccctgaaatcgcgcgataactccccgatcacggatcgcggagcgggatcgtcgcggtcaagcggactgggcggcagctcgacgacggacagcaaggacggcgaggcgctgagctcctgggcacggtacttgaagaacaagtacgggaacaagagcagcaaggactcggccggaagtagcggcagcgcacgcgacacgcacgcgggcagctcgacgtcatcttcggcggcggcgtcgtcctcgcatgcgcacggctacggaagcggtacgagcggctccagcggacggagcaccgctagcgatgtttcgcggcggctgagcctgggattgcccttgcgtcaggccaacgagctggcctcctctgacgatgacgggtcaaaaaacgggctaggctcccctacgtcccctacggtagcagcagcagtggcagcagccggtataaccggagcggcaggtactatccctaaacaggtgtacctgcgcaagcgccagcagctgttccagctggggggccgggggagcgagcccggatccttcacatggccacgcggcctggccgtcggccccgataatagcatcgtggtcgccgactccagcaaccaccgcgttcaggtcttcgactccaatggcatcttcgtcaaggagttcggcgagtacggcaacggtgagggcgagttcgactgccttgccggagtggccgtcaaccgcatcggccagtacatcatagccgatagatacaatcatcgcatacaagtgctcgatccgcaaggacgattcctgcgcgccttcggttcgcagggcaccgcagatggcaaattcaattatccttggggcgtaacaaccgatgcactcggcttcatttacgtgtgcgataaggagaaccacagagtgcaggttttccaatccgatggttccttcgttggcaaattcggttcctgcggccgtggcgagggacaacttgagcatccgcattatatagccgtatcgaacacgaatcgtgtgattgtttccgattcgaataaccacaggattcagattttcgacgtaaacggcaaggtcctctccacggtgggcggcgagggttccgacgatggccagttcaagtttccacgcggtgtggccgtggacgatcagggctacatattcgtggccgattctggcaataaccgcattcagatcttcaatccggatggcagtttcctgaagaccttcggttcctggggctccggcgactcggagttcaaaggactcgagggtgtggccatcatgtcgaacggcaatatcttggtctgcgatcgagagaatcaccgcgtccaagtcttctga

SEQ ID NO: 37248 - protein, 586 aa, DROSOPHILA
MEQFEQLLTCCVCLDRYRIPKLLPCQHSFCMEPCMEGLVDYVRRQVKCPECRAEHRIPYNGVQAFPTNVTLQRFLELHIEITGELPDPTSGQIMERCGVCSEKAYLSHCAHCEKKICEDCKSAHMDILRREITRFNSQIRRSLHRLQDSLAIIEKNTMSLQTNAISVTEEIDEIYQRITKAIKDRSDQLKGEIDRYLAVELRNLTTLKENLDLEITNITSNCDTVDKYMNETVEWDDCELMDTKEIFLKTVEFLRHFEYENNDYSRRVRFLVSIDPNQLVMNLATFGDLNIAPHSTPSGGSVSSSHLAPPSALQPGLMRSKSDHRLATQFRQQEERSGYNDEPVLGGRKFGERPQRSATQANNDRYGRSGGDYDYENDYDNEGSSGRAGKSSRFRSRFVRSHQNDDSDSEQQQQQRQQELKERKDRVLDSEDVSRGQLSGIIRLSDCSRVVQRLADIGKEKKEKKSDAAAAAQAAVQAAIQAQKAAMQRQQQKNQQNAADEEELARQKRKNAGSSSTGGAATSTSSGGGDTASDQRVAALKNRGGEESDGSSNQAASPVRNSAASTTRAEQRSVSQPLLTRPEIAR

SEQ ID NO: 37249 - DNA, 3680 bp, DROSOPHILA
tttctcaccatcgaaggccaggatcagagactcagtagcaactccaaatgcctgggcatatttttgcctaagaagtgcggccaaaggttgatccgttctcacatggcaccgcagtttaggtagatttgaggatagaagccaaatggttttgctttgattggccattctattttacattagaattactaggagtgtatttagatagtgataggtgccacgtggccttctgatcggccgacttcatttcattcattttttggagccacatcatcagtggcagaagggctgagatttatgatcagttgccggcgtagcgcttaccaataaataagttcgataagatagtggtggcgaataagtagctgggactattctcaagtcaccatcgcacttgtctcatatggtacacacgtatgggtcaccctatctcgctcggaaatcaatgggctattcaaggtgcagacgcgggcaagtaacacagtaccaggcagactaaccgcaatgcaccttggggctaagtctattataaaatgctggaaatagaaaataatgaaaaaaaatatatatacttcctaaataccctttggttagggaattggtattcctaaatacccttagataggcaagctatctaactatctaattatatattataagtacaaaagtacaaaaagtataaaagtattataaagtacaaaaatttcattataaagtgcaaagctttaaccacatttaaatatatttatactttatacttaatttcccaagcccattaacctttgagctgcgagcagaccattataaccaagatcaagcaaagatcaatttgacagatcatattgtgaaccactgtgcacgatagccagcgctatctaaacgaatttataaatattatacgaacatatactataacggcgacagcgaatttcgatagagctttgcgagacaattcggggaatgagtatatgcgccggcagtcagttcttaagcggctttctggttgcacggtcgtgtttattccgaattcgggttaggaatcacaaaccattatctcttctgggaggtgtacgaggtggctaatttaaattcataacgagggggagctaattgcgcctgtggccagaatgaagtgcctgatagtgtttggtctgattgtggccctgtttggtgccttcgtgggctatggctacgtggtattcacggaactgaccaagcccctgcccaagccggagttcaaggatgatacgtactggggtcccggcgatgccaaggactttgtgcccgacgaaaagatctacgagtttaagctgcaggtgccgcaatcggagatcgatgatctgcgaaaggaactcaaccgcacgctgagactaaccgaaccgctggacggaatcgcctttgaatacggattcaacacctatgcactggagcagtttgtggactactggcgggacaattacctgaccaagtgggatgagcgccaggagctgttcaactcgttcaagcagtacaagaccgaaattcaggggtgggtacgagtgcttttgtataacatggatgccatgctaaaaacgtaatacctccgcagcttgaatattcactatatccacgaaaaggtatccgaggaggctaaggaaaagaaacacgtatatcctctgctcctgctccacggctggccaggatcggtgcgcgagttcttcgactttatacccatgctaaccaagcactcaaacatcacggattacgcttttgaggtcgtggcaccatccctggtgggctacggatggtccgatgtgagtgttatttgtttttcagttgaatttcttcattttaattattattattattattataacttaaggctgccacgcgtcccggatttaatgccgctgaaatggccactgtgatgcgtaacctgatgctgcgtctgggccacaagaagttcttcatccaaggcggagattggggcagcatcattggcagcaacttggccaccttgtatccagagaacgtaatcggttaccactcgaacatgtgcgttctgcacacgccactggccattctgaagggaatctacggcagcttcttcccggagaagtacttgccgtccagattctttgtggatcatcacttccccgtgtgggaaaaatggctggagctgctggaggaaagcggttactttcacatccaggccaccaagccggatacgattggagcggctctgacctccagtcccgtcggcttggcctcctatatcctcgagaaattccagacctgcacaaatcccggcctgaagcaggactttggcgccatagtcactgtcttcggcctggaggctgtgctggacaacctgatggtctactatctgacgaactcggccacgacagcggctcgtttctacctggagaacgtgtccaagacgtacagggatctccagctggatcgtgtgcagtccccggttcccatgggctgtgcccgcttccggttcgatctggcctcggtgactgactggcagctgagggacaagttccccaacctgacccactcgatgtacttccagcagggcagccactttgccgccctggagatgccggccatgttgttcaatgattttaccgcctttgtgggaaaaattggcctacacggcgagaagagaaaataaattgttttaagtataattaccaaacggattttgtactttcgcttgggaatcgggaggcacatgagatagctattaaattggcaaggcgacaaaaggtcaacgtattttaagtacggttttgcagtaaggtggttgggaccacctcagtaccaccataacgtggttacataatatttaacaaatgtggaagggaaatagaagggggtaagacaaaatcttttttaattacattacaataaaactaataactataaatagtaggtatggttaagaagtaattgcttgtaatccatgtttgtaattgaccgcaaactaaaaaaatattattgattctttatttatatatatgtatatatgtatatttatatatatacagtcatggtcaaaattattttcacaaagtgcatttttgtgcatgggtcacaaacagttgcttgtgcagcaagtggggggaggtgaaatgcaaaaaaacttttgcttttgcaaattcaaacctatgcagagtcagatgaaagaagaattgaaaaaataactgttcctatgcgcaaggaagaggcaaatgaagagatctttatcagttgtcagaagtatttgcacacggtttcgtcgcatcacaattattttcacaacgcaatttcttcttcagtgattggtttagagtgacaagtgccggtttgtttgcttaaatacatttaaattattgaataaaaattagatttaatcattttcctattacagttattaaataaaatgcccaaaacaaaagagttaacagttgaggcccgggctggtattgttgctaggtttaaagccggacacctgcggccaaaatagctgaaatatatcaaatttcgcgtagaactgtctactacttaataaaaaagcttgatacagttggcacattaaaaaataaaaaaagatcaggccgaaaacctgtgctggaccaaaggcaatgcaggcaaatacttggagttgtggcgaagaatcctagtgccagtccggtaaaaattgccttagaatc

SEQ ID NO: 37250 - DNA, 1552 bp, DROSOPHILA
ttgcacggtcgtgtttattccgaattcgggttaggaatcacaaaccattatctcttctgggaggtgtacgaggtggctaatttaaattcataacgagggggagctaattgcgcctgtggccagaatgaagtgcctgatagtgtttggtctgattgtggccctgtttggtgccttcgtgggctatggctacgtggtattcacggaactgaccaagcccctgcccaagccggagttcaaggatgatacgtactggggtcccggcgatgccaaggactttgtgcccgacgaaaagatctacgagtttaagctgcaggtgccgcaatcggagatcgatgatctgcgaaaggaactcaaccgcacgctgagactaaccgaaccgctggacggaatcgcctttgaatacggattcaacacctatgcactggagcagtttgtggactactggcgggacaattacctgaccaagtgggatgagcgccaggagctgttcaactcgttcaagcagtacaagaccgaaattcagggcttgaatattcactatatccacgaaaaggtatccgaggaggctaaggaaaagaaacacgtatatcctctgctcctgctccacggctggccaggatcggtgcgcgagttcttcgactttatacccatgctaaccaagcactcaaacatcacggattacgcttttgaggtcgtggcaccatccctggtgggctacggatggtccgatgctgccacgcgtcccggatttaatgccgctgaaatggccactgtgatgcgtaacctgatgctgcgtctgggccacaagaagttcttcatccaaggcggagattggggcagcatcattggcagcaacttggccaccttgtatccagagaacgtaatcggttaccactcgaacatgtgcgttctgcacacgccactggccattctgaagggaatctacggcagcttcttcccggagaagtacttgccgtccagattctttgtggatcatcacttccccgtgtgggaaaaatggctggagctgctggaggaaagcggttactttcacatccaggccaccaagccggatacgattggagcggctctgacctccagtcccgtcggcttggcctcctatatcctcgagaaattccagacctgcacaaatcccggcctgaagcaggactttggcgccatagtcactgtcttcggcctggaggctgtgctggacaacctgatggtctactatctgacgaactcggccacgacagcggctcgtttctacctggagaacgtgtccaagacgtacagggatctccagctggatcgtgtgcagtccccggttcccatgggctgtgcccgcttccggttcgatctggcctcggtgactgactggcagctgagggacaagttccccaacctgacccactcgatgtacttccagcagggcagccactttgccgccctggagatgccggccatgttgttcaatgattttaccgcctttgtgggaaaaattggcctacacggcgagaagagaaaataaattgttttaagtataattacc

SEQ ID NO: 37251 - protein, 468 aa, DROSOPHILA
MKCLIVFGLIVALFGAFVGYGYVVFTELTKPLPKPEFKDDTYWGPGDAKDFVPDEKIYEFKLQVPQSEIDDLRKELNRTLRLTEPLDGIAFEYGFNTYALEQFVDYWRDNYLTKWDERQELFNSFKQYKTEIQGLNIHYIHEKVSEEAKEKKHVYPLLLLHGWPGSVREFFDFIPMLTKHSNITDYAFEVVAPSLVGYGWSDAATRPGFNAAEMATVMRNLMLRLGHKKFFIQGGDWGSIIGSNLATLYPENVIGYHSNMCVLHTPLAILKGIYGSFFPEKYLPSRFFVDHHFPVWEKWLELLEESGYFHIQATKPDTIGAALTSSPVGLASYILEKFQTCTNPGLKQDFGAIVTVFGLEAVLDNLMVYYLTNSATTAARFYLENVSKTYRDLQLDRVQSPVPMGCARFRFDLASVTDWQLRDKFPNLTHSMYFQQGSHFAALEMPAMLFNDFTAFVGKIGLHGEKRK

SEQ ID NO: 37252 - DNA, 2904 bp, DROSOPHILA
tccggcattggatccttccaaaccaggctccacaatcaccgatgcgcccaactcatccactcccaaatagggcacgttggcggcaagagctccgggattctcctccgccattctggcgactatatagcggctatatgggctgtaaaatcggccgtaagatgggcgagaactcgggcctgaagttttgtgtctactctgtcctcctctctctctcactctgctcctctcgccctctctcgctcgcactcgctggctggcacgctactctatcatctggttcgcaattcggttctcaatcctcgttttccagcggccttttccgggctaggggacgcattatccgtattctcttgcggtctatgtggtggtcagtggcctgttctgtaaaatagcacaattttcgggccagaaatcgcactatatctcagttaattttacacctgaaaatgcaggaaacttgatttttttgaccactacggtgataccgttcgtcgcgtacagttaaatgctgcagaccacggagattgatatacttttgaattacttcagaatacaaattttaaataaaaaaggtttggaaaatatgttgagtcagcggttctactagctgttctaccctctgattgaacttgattgaaaaagcaggactagctttgttacaaaaattacgaaatacacaaaaaatgcttaaagaactagaccaatttattttataaattgaaatgtgatattttgagaaaaataaatatttttagatgtattacacaatcttgtgagattgtggcgcgggtaaattacaaattccaagaaacttcttttcgaacctaggagaaccaaacaattattttgatattttctaaaatagtttggtatttcggttttggtatttaatttcggagccttaattgtttgtgttatcgatagctcgttgctttattgcctttttgtggcgtctgtttcaatttgtttgttttcaattgttggtcataatttggatccccaaaatgaatcgacgcaacaagcggacgtcgtactaccaatacgaagtatacctagacttcatggaggagaatcccccgatgtcggccaacaaactgagtcgcacccaggacggcaagaagtggaaggagctcagcgatctgctaaacaagtgctccacgggtcccactttgtcgcccgaggaatggcgaaaggtatgttgtaaccagttgggtatcgagtgtacaagcccacagtgtgtcatgcttatagcgcctcaacgactggaagaacagcacgcgctccaaataccgacgcagcatcaactcggatgacaagagcaatgcaatgactcctctggagaacagagccctgcagatcttctccttagaaccgaattttcgcgagggaatttcgatgcgcctgcacgaactgatggaggagcaagaggaactggatgaagaagagaatgagaacctggaggagttggtggatgaggaggaggaggaggaggtgcagtaccagcagttcatagcagagcctcacgagcaagccaacccaacgatcatcaatggtcacagtgccgcgaaaaagctaaggctcgatggttccagtgagattatctacgaaggtgggtagacgcaaatctaatgtaaatactaaatatcctataaagggacatagccttgatttcagtcgcggatgtcacatctgatcaatctgccgcgaaagaaccgtctgccttctatggagagaaaatccaggagcagctgaaacgcatttcggacatacacgaggcatcgctgcactttaagatagcccgcttcaagtacaataatcccggattcgagtacgttccggaattatagcccatgctagccatgcacattgatataatgtataatgtaatataatatgtgagctcagagggacctgctgatttcgcctcgaattaaaagccgcggaacgctcaataagtagtacagtaggcattcgttgaaaacaaattcttgagtagtgtgtaccatataccaattagtcgtttttaagactgttgttatgcatatcgttcgacgaaatactttttgcacatatattttgaaatgtattattgatttatatgaaaccgctaataaatattgtgacaaatcatttctgaatccgcatgtttttattgcaacaaaattgaattatttattgcacatctagccataactatcgcatggcatctaattgcttttttggcttcccgccagatgcgcaccactggcgtgccgaatgcaaccctgcgccaacagcaacaaaatgcaactagaaaatcccaaacgctaaatgcgtaaattgtttgtgaacatctcgcatcgcttggtggcgtcgatttgcattttagggcttttgccagctatttaaacacggcatcgagcacgcaggcacagagcaaggatacccggatgaacggcaagatggaccgccgcaagaaacgcacctcatcggagcagtaccaaatgtacatcgacatgatggagagcgaccccattttcgccaccggacgagtgccgcgcgactatgacctgaactacttgaccaaaaagtggaaggagctctccgaccggctaaacaagtgcagctccggacccacactgacgccggaggagtggcgcaaggtacgagtaccactacatcacccaaataatgttacctctaatcgcgaatttcctgctccacatacagcgcctaaacgattggaagaacaccactcgctgcaagtacagacgcagccttctgtccacggaaaaggacatctcgatgacctccgtggagacgcgcgctctcgatctctttggcaaggtgcccaccaccggcggcgaaacgatgctcaatctgaagtccgaaaaggatgagcacgacgacgagatggaggaactg

SEQ ID NO: 37253 - DNA, 781 bp, DROSOPHILA
caaaatgaatcgacgcaacaagcggacgtcgtactaccaatacgaagtatacctagacttcatggaggagaatcccccgatgtcggccaacaaactgagtcgcacccaggacggcaagaagtggaaggagctcagcgatctgctaaacaagtgctccacgggtcccactttgtcgcccgaggaatggcgaaagcgcctcaacgactggaagaacagcacgcgctccaaataccgacgcagcatcaactcggatgacaagagcaatgcaatgactcctctggagaacagagccctgcagatcttctccttagaaccgaattttcgcgagggaatttcgatgcgcctgcacgaactgatggaggagcaagaggaactggatgaagaagagaatgagaacctggaggagttggtggatgaggaggaggaggaggaggtgcagtaccagcagttcatagcagagcctcacgagcaagccaacccaacgatcatcaatggtcacagtgccgcgaaaaagctaaggctcgatggttccagtgagattatctacgaagtcgcggatgtcacatctgatcaatctgccgcgaaagaaccgtctgccttctatggagagaaaatccaggagcagctgaaacgcatttcggacatacacgaggcatcgctgcactttaagatagcccgcttcaagtacaataatcccggattcgagtacgttccggaattatagcccatgctagccatgcacattgatataatgtataatgtaatataatatgtgagctca

SEQ ID NO: 37254 - protein, 239 aa, DROSOPHILA
MNRRNKRTSYYQYEVYLDFMEENPPMSANKLSRTQDGKKWKELSDLLNKCSTGPTLSPEEWRKRLNDWKNSTRSKYRRSINSDDKSNAMTPLENRALQIFSLEPNFREGISMRLHELMEEQEELDEEENENLEELVDEEEEEEVQYQQFIAEPHEQANPTIINGHSAAKKLRLDGSSEIIYEVADVTSDQSAAKEPSAFYGEKIQEQLKRISDIHEASLHFKIARFKYNNPGFEYVPEL

SEQ ID NO: 37255 - DNA, 2222 bp, DROSOPHILA
gtggccggtggtggtggtggtggtgttacaggcaagggtaagagcggggaaaactcgagtgagctcgaagcgccaagcaccgcactctgtgcgcaattagccccacaatggccgagcgcgtcgagtgagtggctcgatgaaaactggctggcagcgtggaaaactacctggcaggacttcgccaacaggtagcagccaatgccaatgccactgccactgccactgccacagctactgccactggaagtggaactgccagcttgcaggtgcgacacgcggccaaaacccaaaagcagagaacatactcggcagcacttaaaatttaaagcgtttcgagtgtaattgcgcggttgccgttaacgagccgcttgttaaagtccagcgatgccaaaaaaaagaacaagaaaggatgccagctttggcaagccgaagcttatatacccttgcactaattatatatttcacaaaacaacggatgtacacagagtaagacaagtttatgaaccaagaaacatttattcattaattctatggtagctgtatgataaagtcattaatattctttcggcaaaggtataagaagaagcgaatgaaaacactgagtaagtagaggaaaattagctggaacacgaagagtgaagttaaccaaagagtgcaaagtgaacttactagaaataaatttatcctaactttataaacttaacctgagatgctgccttgaccgttataatatttttatccataggttagtaaatttgcaattaaataatgatgctttcccttttgggtcagctttgttttaataggcgtatatatataactccaatattaatgtacaattcccgcttaaagggcattaaaaggcagaaaattgttcggctcagccccttgagcagcagaaggcagacaatgttttaaccccgttcaacgttattccttctgatgaagatgtagatactgctggaggattggatttgagcgggagtggcggaaactgttgctacgccgctgcgctgaaaatgaaggacttatgcaactggtgcgtaaagtgcatccgaccggcacttgcatcatcatcccaaagagccacagtgttcgacggctcaatgccgcgctggctaaaggtgaccagcgacatggccattatagaactcgattcctggccaaggtttctccttatgctattgttgatgttgctgccgttgcgttcctgccagggcattaattaacatttcaatggacgaccgcagtgaaagaataatttcactgcatttaactgaacgaccttaaagtgctctggaaaaatggtaaccgccgagtggaaagaggtggaaaccgacaggcgtttttctgcgcataattcaactttttgtgggaccgttggcagtgtggggaagtggagccggacccgtggcatacaattcgtggcattttggccagaaatgtgcaggtccagcggaaattaaggaaggccgtctgtctgtgtcccacctctgagtaatttacggacaattcacatatgaaaaccgcaaaaatccgatttttttcagacgtaagagacaacatctggccaaattaatcacaaattggagcggctaattgacacctggccataaaaccaggcccaaggcaatcggtcagtcagcaaagtggccgcaagaccgcagcctaaacaaacaaaacggcccacaatccaccgagagataaaaaaaaaaaaaaaataaggggaaaaaacaacgttaacaatgtgcagcagcaggctcaaaagggtgcaaatggaaaataaacaaggtttatacagaatcaacatgcgctaagggcgagtttaatcgggtgatgctgtattacggttttttttttttaaaggtttctcctgattgatagccacattgatagatggcccactggaggagtcatttcattttactgcggccagtggagtaattaatatttacctctcccattgttcggccttttttccccggcttccttcggccttccacttagccgggtttttcctcttttcttcaacttacaaattacgcactaattaagcagctttcgccgactgccatttttcaaagtcattcgcgcactcaacaaggcctggacttgggttagttgggatccgcatccttatttcgtccctgaattcgaatcagtcgctctcacctcagtttgttgggttggcagcgcattaggcggcaaaagttaatgtgcat

SEQ ID NO: 37256 - DNA, 222 bp, DROSOPHILA
atgccctggcaggaacgcaacggcagcaacatcaacaatagcataaggagaaaccttggccaggaatcgagttctataatggccatgtcgctggtcacctttagccagcgcggcattgagccgtcgaacactgtggctctttgggatgatgatgcaagtgccggtcggatgcactttacgcaccagttgcataagtccttcattttcagcgcagcggcgtag

SEQ ID NO: 37257 - protein, 73 aa, DROSOPHILA
MPWQERNGSNINNSIRRNLGQESSSIMAMSLVTFSQRGIEPSNTVALWDDDASAGRMHFTHQLHKSFIFSAAA

SEQ ID NO: 37258 - DNA, 3670 bp, DROSOPHILA; identical to SEQ ID NO: 28240

SEQ ID NO: 37259 - DNA, 1470 bp, DROSOPHILA
aaagcctcgccatgaggcaggaagcatttcgaattattttcagtacaaactttgtgccgagcacacctagaacccactccaatcaaataaacgctgcctatcatgcaatacaagatgaactacttgctgatccttgggtgtgtcctcatgttgatgcggccgatgtacggcgattgtctgcgcatgaagcgttctcaaggcgatactgcaagtgattataatgaaaccactacaatggacaatactgcttcactgagcggaaaagccaccgtgttggccaatagtaccattaccaccgctaacatgactgaagccgccacatctccggagcagaagattactgctggaccggtgcgcagtatgggagttcgtggaaaaaccactagctccacaaccaccaccgcattatcatcatcacttgctgctgtggcatccacatcctcgcctccggatgccggaaaatttcagctagtggaggatctgctgggactgcgccgtcccaagaggcgtttgggtagcctgatggacgacagtctgcagccacgacaattgcaccacaagcgtcgcccagcggtggaagctgctgctatggccacctcattgccacccaaccctaatcccaatcttaatcccaatcccaatcccaattccaatccctacgtgtactacaacaagctggtttcgccagatggcaagcacgagataaaggagttcgagctgctggcgcccaacatgatgattgagagtgtgcagcaggagctgaactacggtccggaagttctgccaccggaattggccggagtgctactgctgaatgcagccgagaacactccacgcggacttcataatgcagcaccactgaagcaccatcgcaagcataaatcctcgccggctgtgccaccgatgctctacatgctgcaacagctgttgcagcccaatttcgagggaaatctcttgctggaaccaccaaaggagccacagcgtcacgttagttcacccctctatcaattccttgatggcgccatggatctggctttgcgcaacaatcccgatgtcatcgatcacctgctgggcgatcacctagaattggagctggagatggaaaaaaagaagggcatcaaggataaggcactaacgaagaaggccaagaaggaggcacagaagatggaacccaaggaggagctcatcgtcagctgtcccattcaccatgagcaccatgccaatcgtaatggcgacgtggtcgaagatgatgtcgttttggtgaacgagtgccatctagtgtgaacctgaaacgggcagctgtcacaatgtttcttaaaaattttaggttacttgtttttccgcattcttttttttattttttgttgcttcaactggaagatgtttatatttcttgcatatgtaaggagtggcgagaccatttttactttgtatacaaaaaacagacaataaaaactaaatacacatcat

SEQ ID NO: 37260 - protein, 378 aa, DROSOPHILA; identical to SEQ ID NO: 28242

SEQ ID NO: 37261 - DNA, 31271 bp, DROSOPHILA
agaagcgtctgcaaggatgttacaattgcaaggattcattagtgaagtgtgaattgagggggggcattggggtgctcaaaaactttgtgcattcacagaaaagttcatcgaaatggcggggcgcccaactaagcaggaaattcttcaaattaatgttactcaatttaactttcatgttgccttttgcaaatgaaaacgaatgaatggcaaagatttaactgctgccacatccagatggctcttccttcagcaaactcaaatggtaactattcaaaacttgtgcgcgccattcccgctcactttttgtagataaaaacccatttcccgatttagatttcggtttagcttgcttttcaagcggcaatgtttccaccgagctgtgtggcataattctaatgcattgaccaacatggctggtcggttgcttggatggtttgctgggtgcagatgacaggtccgataaaggtctgataaaactttggctctaggttcagaaagttctcccctttggttcttttttttttttttaaagctaaacaatggtttcggttcctttgcaaactgctgcactttccactcaactcaggcaatatcaatttcgggtctggcttcgagcattgaaaattgaaacttgtcagctagggacaatagcagaaaaagaatgcaattgcgtgtgcgttgaatcgattcaaaatgtttccaatggttgtcggctaaattgtctaactcaataacaataactgcggcacacaaggacaaggtgcatggaaaacaattttcatattttttaaacaatataagtaaacaattgctagaataacgaaagtctgctagataaagccatgtaaataagttaaagtaacctaaaagtatgcaacgttttaagcaataaaattttactgcgtacttttgaacagctttatgattaatttcataacctaacagagaaattcttgttagtatttatggttatgtgagaagtgggtcatatatttttctgtcagtgcaccttcattgccgagtattggcttccccaaggagcactcaccttcgcctcttcgcatgcactatctagagcttcccgctgcggtagtggactggtcggtggccgccgaagaggatgcgcttgaaggcctgtcggaactccggactgaagatggtgtaaataacctgcaagggggaattacttaatcaacaatgcacgggaatgaaaactgcactcataaccatttgatttgacaacaatttaagtaactaaaacgagttaagaaactctaatttttttcataaattgtctgattatttgaaatagattaagattaagaagtctatctgtagtttgagtatattattataaactatgctctcaaatttttaaaagttcattattaaaattcaaagtaactaatagtttaaaaactcttttcaaagaacacagacaagttgcgaagtttaaaagtcttaaaatttctctatatatgcaaagttttgcactattcctgcagttacttagccatttatttattattccatttaccggattgagggtggagttgaagtagcccagccaaaggaagagcgaggcaacggaatcgctgatctggcaggcggcacagagcggcatggtcagtgccatgacgaagaagggcagccagcagacgacgaaggcgccggtaatgatggccagcgtcttggccgccttccgttcccttttggcctccagggtctcctttcgcttgttcaccttctgcatcggattggcgatgctggagagttgctgctgctgctgctgctgctggtgcgcctgctgatgcggctgctgctgcggggtcgtcggttgtcggctacgtggctctggtgtcgatggggattcgttggcggtgccgcatagcggatgcgactggttgcagctcgtcagcgtgctggttttggccgtcatcggtccagcggcggcggcggcgattccaactccctgcgatgttggcgtttgtggcgatagcgctgatatcgacgtaattgtggtggcatttgacgtactggccccacctccaccgccggatttaaccgatttctgcagctgctgcacttgttcgagctgctgttgcaactgcggatcctccaggacctccaccccgttggccttgcattggtcctccgactcgttggtgcctgccgctgtcattgctgatgttgcggttgtgggctgcgggccaacctgctcgtcctggtcctctagctcctcgcgatcctcctgctccccgtgttctggtcgctggccatcgtcctcttgcctgcccgatggggccattccgttgacagcggctgaggatttggcggtggacttgccctgctgcttggccagcgcaaccaggtgcgatacggtggctatctggttgccagaagtgctgggtgcctggaaacaggatcgttcacatttgtagatataaagttcttaattcaaggtccttttatacatgaagctaacatggtatgattaagaaaacttggactacaaattccaattataacttattgcattttgatgttcaataaacagatagaggtagctgtaactcttcgttcccgaaagccaattgaatctgatattataatatatatatatagttcatccaattctgatcggcggatggaaattttatgcggcaaattagcattttaaatcagtgcccgcattgcattcataaatatatttactgctcatcaaatttcatggcgctggggctataaatttaggtaaatgaataaagtcagagtgtaaatatttactttcgttaagctcgttgcccatttttggggcaatgggccccattccatctccacccttcaccatcctccgccctatttttttttttatcagaccccagccactcggaaaggactgctaggcaatttgccggatgtaacgtacatatttgaggagccggtcctgctaacggcttgtctagcactaaaattcccataatcacctgtaatttgaggttggccgtaggtgtgcgtcgagcggaagtggccgcaaggtgctaaaatgaactttacgtgtgataaattgtctacttcgcagctggcaccttttgcctgagatagcggtattaactagagatgtgagtggggcattaaataacgcgatagtttcgatgaaaaacgattatctttcatcggatgccaggatttactaaacagcatttgctttaatatcatttaaacattccgaaaacgatttagatttaagttaatatttccgaacgatttagatttaagtcaacatttaagaaatgctttcgtgtttgtatttatacgtttcacaggatatttgagcatttatttatcgttttaattatgatattcttatctatttgccatcaccatcgctcttgaaactaagccaagtttattaatggcctgaccaaatgaattttatgactacgatgctgccataaatttcgaaacatattgtgttgagtgtgtaatttgtgtgaccgggaagacattcaaattcagaaaataaaaactgacgttctgcgaacaatggagacatgacataaatcgctggacacggagcttagttcacatcgaattcaatggccatttgccaattgtgcctgaacacaaagcaaccacagtgaatcctagaaacatatgtgtgttcattagggtggttttatagtttaattggaatgaaaatctatcattgaaatactggcaaaagggaaaaccttagagctggtgctgtttaattgggtcttttattttacaactaaaacttagaaaatttacagacaaatgacaaggaaatgaaatattttttgatgggtgtacaaaaggatgctgttagcttgtcccttttggtccactctactcaacggcattgtcaggggcattgtaattttgtgccccaatacaggcaaagccattcgatctgttccttgttgcagcatttttaatatgttgcaagggggcacagcaaggaaaatgaaagccacaggaaatcaaagtaaagccaaatcacaaatcgtgaacaaagcatccaattgccaaagcaaagagcgaagtttaatttactgataccgaaaaatggggaacaatcgagaaaatgagaatgcacattgaaatacggagaattttgcaatttcgaaatattgcacctgcactgaaggacattcatttcgccttaattatagactggcttcaataaatatgaagctgtgccgcaatatataaatgttgttttttttttctcccatttttgtgcacacttttctgtacacttttttgtaataaaaaataataaatttatatatttgctttgggccatgcgtgcaaaagtgtgtttgtttatttatttgtccgtccacttatttgccgaagaggaggcagcccgaatgagaggtgtgtgaaagccattcccaagtaaatatttaatctcaggtccagaattgggtgagtggaatggggagcgattggggagctgtgttggccaagcgaatggaaacgaaagctgttagccataagccatcaacatattttgctcaattactcaagcgtattgagtgccttgttaggcggcccagaatcagaatgggaatcgcaatcgaaatccacgggtcaaggagtcaaaggccccaaagtcaacccccatatttctccatctcgaactgtcttttggctcctgttgctattttgttttcataccctttattagacgtcagtagaagaagtttgttttataatacagtttgtttaaacgtattttaagtttctaaagctgttcaaaaatatgcagcactctattgcactgcatgtctaggcagttttgaatcatccttcgatttctgtttccgccttatatcttttgactcattcatcggatagagtatttcccaaatcgattttcgcaattgtttatttcatctgattttcatttgaatccggctctctcgcttctttagccccgtctctgtcacgccttttgcatgccaggcggaaggaggcgtatccttgtcacagcttatatttgactttgctattacttaaccggcacgaacctggcgattccggctctgccctccgacctccgccctctgacccctgaccctaggcctttggccagtcgccttgacttcgccacctcgtttcgaccagtgcaaaggtattggcccggcttgtagcaatgcaaacaaaacgttcaagcaatttattttggctctgctctgcccttttatggcttgctttcgccccttcgctttaatgcgtgttattattgaatgtgtgcggcatcgcttggattattttttaagccataaaatcgctggccgaaaattgaagtacataaaatgcggctaaatacaaatttgggttcgagccatctacccctctatttgctttcgggcggatttccaagtaaaagccttgcgcctgcattttatcgctgacattttcttcgagtggcggataatttgcttggatttttggagcttattcttcggagtctgtttctgattccagcactaaggataaccgcttaaattacaattatcaaattgccatcgcatttctctatgtaaaactgtaaaacatcatattatattttgaggtataaaataacaaagaatctccagttttagtatcatatataatccattggttcatctggaaatttgtcgctgacggaaaaggaaaaggttaatcgccccatggcatccgcttggatcattatcgggaattgtttccccaggaattctcaagtgcatattgctgcgacggcagctgctgggctaatgagacattagccgagtgaaaaaatggctgggaatggcggcccaagatgggatggcccactgaaaaggtagccaagaggaaaaatcatttcaatcccccaaaggtaaaagagcgacagcgggccaaagggcacattctagttggagtcgcataataaagcgagaaatgagctgaactcggctgggtttatttttggtcagcccatctgccggagtatctgtatctgaatctgtagctgtatctgtatctgtgtgcctttcattaaagtgtgcgtgtgcatttcgggcacaggaagcaaaaccccagatcgttgggcacatgtcaggcgttatgaaattggctttaaacacaaaaatgggaattgtttctttggatcacttggagaaaatatggtataaaagcagaattttatagatttttgttgtaagccatttaagttttgagtatgattaaactagcgctatttaaagcttatgaaatgtttacattaaagaagagcaagcacataaaatctagttataattataaaaaaaatagttccaattaagattaacttattttttagtgtttgtattgctcacatacctcgacgcctgcccgacttttgctgtccacattcgagctgctgaactcggtgtcctcgacggtgttgaccgtgttcgttgagttgccatcgacgaggcccagagccctgcctccggatgcgggtcctgagacgcccacggcacttccggttttggatttggccgtggagaatctgccgaggcgtagacgcagtcgatgaagtttcgtatctgttgccgcacctccgtccggctgaaagcgatagagatggatagatggttggtgagacagagagagatagttgctctagttgcgtctgcattgatttttcgccctttgaccccgtgtgcatggcttcaaattaaattcatacttcttcgcacagcattaaaatgaataacaaaagagcggcaggaaatttacattttcggctttttctgccttacgcttcaataaaccgcaatttgtacgcatatccaaaaaaagttttaggctgaaccgaaagatccgatctgatccccacttttttgccgccttttttttttttctcctgttaccatatgcatatgtaagtgggttgcgtccggtaaataaattgtgtgtatttgttacagccaccccaaaatatctcccaaatggaccacttcgcctgaccgcccggcatctcaaaataaatttcacgtttgactgctcccagcgcttgacctctttgattttttccttgccgcctatcctttctttttcttttttttccgatttggtagggtattctgctcgcagggacaatgaacttgaatttcttaaaattatcctttaatctggattttttttttataattattaaacaattatattgcttcctgatgctgatatgggttagcattcttgaataaaacagaaattattatactttagtatgcttagcattatacagtgcataaatacttcggctttcttattttctaaatatatcctctttgtgtgcgtatttttgtcgcctcaatcgcaccaaattaaagtaattgagtagtccaaccctttgccatcgtcctcgtcatctttgtcgccttagcctccgattgttgacccttttggcaagtcgatattgctttaaataaataaaattatgctgattttgccttcgtgtgcgggaatttttagcgttgggggaaaaggcaaagggttccgattcgatggcgatccaaaagtggtgtgaatatttgcgcaaatagtattaaatgggtttacagcatgacccatgtgtgtgtgaccttcattttgtgggccagcaactatggccaaattgaggaagaaaatcttagtcaagtgccttgtgggttgccaaagtagaagtaaaagttctacggtcagatagcttattaaatattgaagagtttaagcttaattaggcacgagcagaaagggcggcaaatgagatggcccagtgggagtttgctgtctgttcgaaattaataaataacaggcttcaagttaaggccagtattaaatttcatttgctgactgaaggaaaagtttcattgaatattccacctagataaatttgaagtgcaagagcaaagccattaatttcatggcaaaacaaaaaaaaagcaaatgcggagcaagtctcctttcgggaaaactaaagtatctatgctcttgtctgttacttaaataccaaaatagcaaagcaaacatggccaacacacacacacacacacatgcacgtgataagagcgataagagctctcttttcagcagtttggcaataacgataaggatgcggatagaaaacctcggctcaatgtgaattttatgcagatgtgctgtcagccaactgtttttctgtgtatttaagcgtttgcataaacgatacactcattctctagtcccgactccttggtccttagccatttctggcactttagctaatttatgtaaattgttttcttatttaattgtttttcttgccgggacacatgttcggcctgcgaaagaaatgcctacgtacgtatgtgcgtgtattcaataatgtgtttccatgcgatttatgttagtcctgagtgtgacaagaatgctctggtattaactacactgggcaacaaaatttatggctccaacgggccaagggtcccgctgcgaaggcatctaggcaaaaattaaaataaatccgcaataaataacagaaaaatcaaatgcaagcctcggcctcaactgacgcacaatggagactgcatttttttctaaaaataatttcaatttttgtccagatttgcctttgaatggaatggatcaaagcgtttgcattgattgttttgttataaattaataattaataattatattattattattttaatcgatgcggtaattgaaagtgaaattgtgtatgtaattttacatacacaaataacaaaagtttcgtctttaagagtgcatttttgtaaagtactgcaaattatttctgaatataatttttctggaaattttgctgttcattttttctattgattttctcaagtattttcctctttcgagcgcagacacaaacacgtcttcgtgtgtcacagatggcgagttagccaaatatgcttttcactcatgcgaactcaaggcctcgactgttctgtcacatgtttggctatgaaaatagtgtcaatatctggagcaatcaattcgagatgttcttgcaaatgtgattgtaatgatggtatattgccctggggcatttggttcacttcgttttgctggattataaatagcatttgccggccgttggaccgaacataatgccaatagctaaattaaggataatacctgtttggcttaattgctgtttggccatcagttaattggaaaatcaatgtgcgtgtgaccggcatgaaaattacattttaattaaaaatacaaacatcgtgttttggcgaaaaattagttttgtccaatgattgttacatatacatatgtgaattcgattaggcagctttgtgccatcgaattatttaacaatttgccaataaacataccgaatgcaaaggcaattagattgaaatttatactggccaataccctttttacccacaaaaatggtcgacaaaatgaacgcagcgatttttggtatacccttgtcaacgtggagaaaagcaatttgcgatttgaaagcatttagttattaaagaacggacaaataagaccaataaacaacaagtcgcaggtctaatgccctttcctgcgcctccaaacttccgagagtgccgggaaatcttttcaattcgatcgcatggtcaacacaacgggtgtaagggatatatcagatgtgtgtgtgtgtgtgtgccgggtaaatatattctaaaatcaacaagctgctctgtgggaaccgaacccgaaccaggaccgactagtgagtggcactaaatggatgtgggtgtgtgtcctgtccacggtgctgtgtgtactgtgggtgtgcgggtaagtgtgttgacatgtaactaaagcacgcatgtgaggccagctagattgggccggacatcatcggaggacatgggagcaggcatatatagctggctgagcagaacatcggggggcaggacgtcgggcaggacatgtgtacggatggcaaatagtggacaacttgccttgtttgcgcattgaatttgtgattccaatgacttttcgctctagtcagtgtgatatgcacacacgtggcttcgcacagatgcggtcaaaataatagtgagaaaggtgcctgcttatttcacctaatcagcgttttacatacatacaattgtaatcaatgtgtaatgcagaatcatatgtttaaaagataccattccattgtgtaagtcaagtcctcagagttataggcatatgaaggctcagttccattgaataggctagatactagctactatttctatgaccgcagctgtatgtaaaagcgcatgtgtttgtaagtggttgcaaacatttttacgtcaaatggtcattttcaatttagtaagcactaagcttaagctaagtagcagcttgccagcaggtcaagattgaagaaaaaaataaataaaatgtcctggcgaaaaagtcagttagagggcaaaaaagtgaagaccaaactctagatacactatcgtgcgttaaaagttaagcaaagtcaagcggaagattctttgcaacgaaaattagtttttaatttcgttgataagcaactcggaacttgttgaaaattctttcttctcgaagcgaaaacaaaattacaatttggccagactggacttgagcacatcctgtgcgtattagtttgaccagctggcgcattagggtagaaagttctggccaaaccactctcacacattcgccagtcaggacaagatgccacttatcgctcaactttcggccaagaaggctttaatgtccacgtggcgtatgcttaacttaagccctgccttcccctgatttcttagcttttcctacccactgagcatagaaaaaaaacctttgcaatgcatatttcataactcgggatgattcctgcctaattacagcccccatttccttggggtttcgccgcagtatgctatgcatatttgaattggacagcataatttcatagggtcatgccccaagacatgtgcacagaaatttcggaatgctgcctgcggtttggcctttgactgacccctttgggtttgtcgaaattgtggcctaaatgggcgcggtttgcttccatcgagaggataattgcaatggccatgctgtggcattgatttaatatagggtgtgcattcaaataggtcaataaaaacactttcaggataataggaaatgcatcgatacatacagcagcttaagtagatttggatttacaagttagtttctcctaatgatgtattacccttaaatttgtaactcaactaaggacatccagtaatcgatcaatttaaaggcgcattatggatgccattagggccggtcaattaaggcagtcaatcgatgacacttattgcatatgaagtctgcactttacctgattattattgaccgccgcatcgacgggtcgcggtcgtcgacgatggatgcgtttgcgggccgtttgatagattttccagtacaacgccaggatgaccagcagtggcacgtaaaatgtgcaacaggtggcaaatacctggaaaaagcaatggccatgtgattaattaataagagcgttcatggtcgagatcgttggtgtgcacacctgataagaaacatcctgcgagaccatgcacttttgctgctcgatacgctgcagatagtctggatccttccaaccgaactgtggtgccaaggacacaatcaccgccgccgtccaaacgcaaaagatcatcataaagacacgattgctggtccgcgagtggatgtaatctatattggtgaccgcccagtaactgcaaaaaaataaaaataaaaatatatacattttattaagtgctatgcctaggttaaaatatgatatataaatcatatagtggcaacccatttccaatttatttacaattgcggccactttaacatggtcgcttagctactccattatccgagaccacagaaatttaaataaaatgctgcataaatctaggcgctgccaacagatacaaacacacacacacacacacacacaagcgcacacttatacatacacatatggatgggcgacaaagtaaagaaacgtgttcgatattcagtttccgtctaacagttttccgtagcgctttgtaacaaccatttttgttggtttttctatttgccgaccgggccaaaacatgttttatgtatgtctgcgtcaaagtattagtgtgtgtgcgcttgtgtgcgtgtctatgtgggaggcattttaaaaatttccatttttcgtagctttggaaaagtgaggttagtctactcattgatgctgtggataaaaaactttttaagccgaatggttagtagcatcttgggggactcacacttaatgaagccaaaaattcagctcacattctcttatgtttggttttacttttggcccagttagtcccgacttcattggcttaaattgagttagtaatggctattttcgttgcccaaagtgagggcattccccattcgttggaatccacctacacatgtttgtctgtaagctattttccccatttggtttgccccgaacaacattcctaaacgagtttttaaaacgttacgtggtcggctacaaactcgaacaaatacaaaacggcatcgtaagtttcactattctggtagcgttgttgtgtataatgcgccactgccaccgatgatgctgccattaaagtgctaatagccatggggaaagcggggatgtaagtgtatttaaacaggaatcgttatggcagagatatcggtttaagttccccacaccttaattatataaatattaacatctaagcatttaagtccaacacccttttgagtaacctgcttattattttaaagtaaaagcttctactaaatctcttttatatctcttcttgtacttaaagccagctcgcttctacgtgatttagtagaatcccttaaagagctaatattccataaaaaaatggtgtttcagaccttgagcccgaggctaaaaatatgcttcctctcatctgcgttgcggcttgaaggaattaacgccaggaaaccgcatttttcagaatttcccaaatgctaacaagtaatggctggagctggcttcattttcagataccgcggctcgaccgccgagctttagatggcagccaaaaacaatcttagcatcggcaggatctccggccaacacatgtttatgtattaattaaatgcaatttgcataaacaaatattatacgagtattgcccggacgagaaggctgagaaagtctcgttgtgtgtgctcgtgtaagttgaaatcaacagttaaatgagttgactaagcactcgaaatgagccatagatggaatctatgtgtatgtatatgtggccagggtaaaccgatgtgaagtgcccttttggccatagagcataatttaatttgtctacaattgagcacttaaatgacagctttataaatatttgtaaatgccgctgcgtgaaagcaattaagtgtcacttaattgtgggaattcagcaaactaaatctccattaaagtgtatttttcattaagttttaataacagtcgatcaccattggccgctgactgctcgcgcatcacgcatacgccatgtgtgctgtgcaaataataaataaaaatgaatgatgatggctgctcttggtcgatgacttatgtctgcactgaaactgactttctcgttgggcttccgaatacatattccgatatatattccggcttgtcgtcctctgtctaggacaacttcgttggccaacagccagccggtctacatcagtctgcccatcccaaattcattagcataatataatcgacttcaagttggcaattttgattgactgcttaaaattaatggaattttgtgatttcgatgtcagtgcggcgcgtgagtatatatgtatttctatgtacttgtattttttgcctcatttttattttgccaaaaagaggctttttgaaaagattgtgctgtgccgtgcatagtcaatgaaaaatctatgcaaattaatagcgaaacctaataaagtgtctgtcatgctctttttgaaagtattgccgttccgcaatttgcgtaactcatacgaggagtggataataatttgttatagaataaaatatgcccgtcgtctatgtctgccgataagattcaattgaattgaagtcaatcaatttgggcgagagtatctggcgatgttcgtcaccaagctaagttgagtgatgaattataacaatttatttgtgagccaaacaatttaaatgcgatttttccattatacccagtctatgcctaagtatgtgtgaatgatttcttttcatttttaggcgaagtatgtgataaatgtgcggcactcgagtgtaacacttttttaatgcatttaaaaattgtgcgcctagcacacaagaaagtcattactcttgtagctgcctaagacgagaaaattgaaaagaaaataatggtgggtgggtaggaggaattcttaggcaaaggatgtacgaattttttaatattttccgattcattttagctccataagttgaatcattaattttgtcaacatgttgcaagcatatttataaaaggttggacttataggcacacattcattacgaaatattaataaacttaagaaaggcatttatgtgttaatgccttaaatctcgaatatcattccattaaatattcccaatggtgtgatttgaaatttattggccatcaggccacaaactcattaatacaaatccatttagaacaaaaggcagcgaatgagactggctttataagccgtccataattaattgaaattttatatatattgtcaagtggtgacagtcaatatttatcttcgcatcggatcgcttcatggttatttttttttttttgcaattcccatttcaatgcatatttgatgcctgtcgccttctgttttacgttttatgctttatgactttattttcccagcacataggtagatgggaatttttccaccccctttatactgctgatatcaccccctcggctaatcgattgcattacattcgaaatcagctcagcgtggagtatggaataaaaaaaaagatgagaaaaaacaaaagcataaacaaaaagtggattttattcacctgcggctgcccctttttggtcgtcgactttttgtgttgtgaacaacaggaaaatatctgggctgatggattcacatgtgccggtaatagttttgttttgttctaagccctgcggcatctgtggcatgattaaatttttgtaaaactacttgttccctcttgcatttaacaatggctgggctaaaacaatgcatttgtatcccattttcagctccgaatatttgttcttcactaggcagctgtatcgcaattaaagtcataagcgatcttatattacttaaataaaaaatatttttaaaaaactacgcctcattattagaagaatgatttatatttacatttttatttacacatgaaaaattatgtaattgataatggctatccactcgtatcatgtggaaactttgattaaacctaaaggtgtgaaaaaagcaaagtaaatttcatttaatcatatttttttttgttcttgttcaataaccaacgacattaataactttttatttactaacaaattaaaattcaatgaaccggaaactgagtgatgttgaggtaaaatatgttatttaatataattttagtagccgtcggttatttttacttgtcacatttctgccacttatattctccattccgtgcagcttctttgtttttcaataagaattacggccactgggcctcgttttgatggaaattttcccggggtaccagttttcaatgcgtccgtggtgctgacaagcggctggcctacagcgaaattcaatttaaaacgtgcttacgtggccaagttgcaaggaaaatggccagccggcttaccgcattccgctactcaagagctcttttttttttgtgttttggtcaacagagtttaatattgcagggcaaaggctgaaattcttattgaaatatatagcatttatacggttttatatctcttttcgtttccggcttttccacgactcggttaatttcccattttgtgcggatagaacaacggcaagttttggtttattcttttaataaacgcaacaggaattatccataaaacattgtgctgggccacgctaaaagttttctagttgccgcacagctggtgcaggatgcgtctttttcttgattacaggaccctttcttcgaacaagtatgtggacaattgtgggcgtaaaagtgtaactaacttttaaaataatgaattaaattaaatgtatttactgtatatactatcccagaatctatgcctaaaaagtgtaatatacgtaatttaaatacgtatcctataaactttggatattgtcaatcaaagaactaagacctgccatatttaatttttttttgtgtaagaactttcagccctatttttctgtcctccactgtgccatcagcgtgtgtgtatgagagttgcgtgcgtaacctatgcgtgccccaaagggagggcagcaattgtaatttacgactggcacacacacgcgctgacaaaaggcgatgggcacatgaaaaacttatgtaaattacaagaagaaaacaaaggacaggcaaagtctgctggctgctccccaaatacgaatccttgtgctccttgcgcttctggggtgcatccaagtgtgctgattactgtctggctgccctgctgcgcttcctgcgagtccttatgcgtgcctgaatatccttgcattcggcttgtttttaattcggtgtgtacgtctgttgctcgtatttgcattcgcattgcattgagtgcatgcatccgcctaagagctcaatatgaaatacccaaggaaccagtgcaccatttcaggaagaacttcctgttgaaaacagcatatttcaattgaaattaatgaaataccaccaggatctacagacggaataacttttaattacaaagttataacgaggtctagttcaaacctatattcggataggtttatataggtttataatgtttatatatattagtcaaacctaaatttttggtgttccgaattgtgaaaatttcgattgaaacgaattcaaatattttcagctgatttaagccaatatgcaaacagcctttaaactgctctttagttgctcgaaagcgtgtttattttaaatatgttaccttattcggcatttattattccgggtcagcggcttagtcgattaagttgaattaaggccattacaggtttttgcatattccaacgatttgcataattttgtggccaattcggttgcgggactcagattcaggttgacgacttcgcggtgcggacacttaattatatttaataagcctaattgtcgacgttactcgacattgcataattgtgcagcaatttgcgtgttgcatgccaaacgctgtgattgcaacaaaagcagccgtgacctccatggtaagggagaaaatgtaatccctaattagaaaacgatttcccggggctcaaaccgaagacaaaagtcttgacaaagtggatttccatgtttcctttggggatcagcgggtggcattcaatgcggaatttcgtgttcaaggggcaacaatgaattaaccagttggttgactgccttgctggcttcttggcccgttcacttggccattcgccttcgagtttcgacgctttgactacggttccggcttagtccttgtggtttcggtaaaacttttccccacgaaaagccgggtaagtttggtgcggcaggagatccaaaaaaccgaccattaatcacatggccagaacggcaaactgggctaaactcaaaaataaatacaaacgctaacgcaaacgcttgcttatggcttaataaaaaccacagacttttcgatgcaaccagcaaagggtaaaatgaaaagactttctgttagttctctaatgcatttacttttcggttggccttttaatttatctggaaaattttaatttatcttcggtcacgccttggcatctcttccaatccttacgtttaccttttgcccttaattttcattttcctttatttgatttgatttatttgaaattcaatttactctgtgcactgattaatcatcccagagcagccattattttgatttatgcgccgaaacaaacaaaaacggagaggcgaaagaacttggccaaattgaaattacgcacttttggggttagccgcacagtgacagttatagaattgtaattcatcttgactgcggttggtcgtattctgctccattccctatatatatatttatatatatatatatgtatgtagcatatccccttccgttttttggtttcgtggtttgccagtttaaatggaaatattcataaaatttctggaagcacacaagctctgtggtcttgtgcagtttgttctctaattgctttgacatttcatttgaaaagttctcacaaacggatgcagaatcaattaaattgaggaaatagtaactcggcatttcgaagtcacttcgttttctatattggcgcttaatctgtaaatatctgagcaggccgaaaaagtatgcattcaatgcgtttcacaagctaaactttagctataattaaggattgctcaagcgtacacacacatatgcaacacatgcatacgcatttatataagctggccatttatggccatgagattgctggggaaatattgattgaggcattctgtgatgttgccactcaaatgcataaatcattagaattatgtcaagcccttctaatcgagattgaatgagcccctaatttacacacagacagcctgactgacacacacacacacacatgcaggcacgcatacacagaaggcagcacttaaagccatttcagtttgtttgttttatgaacttgacttgtttgtgagttcatcagagtgaaagcgagacagagaccgtggcgaagggagaaagacggaaaatcccagctttaaatgtcacaaacacctcattgcgaatgtcgttgtaactattactttctggtaacacatacagatgcctgcacagtaaaaaattacatatgatagaaaataatacaacaattgaataatattttatataaagtatttctttaaaaagtcaacaaccttggttcattatttagcaataaccaaatattagtgttacggtaagcaacaaataaacgatgaattatgttggtatattgttatccttacacttatattccctgtgtatgtgtaggtttgttttattgttgtagggattagaagataacgtaaatgtcttagtaacatatccggttttattgctcggtaacgttgatgtttgtgttgttattgccgctgtcttgcgtcttctgtttgctactttgtctcattaaacatttgaaaagagacgcacacaaagtacacattacacacatccaatgtttaaggcaaatgaagcgtagtcgatgtatgtagatgtatgtgttggcaggctctctgcgacccaggaaaactaattatactgttaaatgcgtttgtttaactgccaatttaattaaggttatgcttttgttctggccaatccctaatctgccagctgagcttgtccagctacctccgttgtcccaaaaattgttccaacatttgtgcaattacaaaagtgccccgcccggcccctcgccacacacacacacacacaccaccaattttacaccgcccatgaaagttgcggctatgcggttgtaagggttaagggtcaggggtgcagggtgtcaggggtcggctgtggtggccaggagccattgcctaaaacgcaacgcgacagtatgaaaattatgtaaaataagtacaatgtggaaatgcacttagccgagcgtgcacagtggcagtgaaaagttttctcatttgcgctaagtaaatcaaaatattagcttgaaaaattccacatgaatacctcagtgagaaaatttaatgatactaaataaaatgtttaaagccgattataaccaatgaagtcgtaagtataccgaataaacttatttaaaaccacttaatttatcgaaaaactgaacatcatatctgatataagtctggtagtatgcttaaatatgaaacaaatgataaaatccttgaattttattccggaaattcgctggcatgcaaatttaaacgtgtccccattgttttatactttttttttccattcagcatttggctttcgaccaagccgaacaaaaaaaagtaatcgtgtgacaacagcaattacaattacacatggcacacagcacatgggacgcagtggtagttgttatccttattgttcaactgcagttgcggttagagttgcagcggcaacaacaaaaaaaaaaaaccactgcgaggatagcagcttggagtccagtgcatcgtcgatggtagtgaatatgaacatgtaattacgttttaagtgctaaattgtaaaatatttgcgtaaaaactatgtaaacttaattgaaatttaattgaatatgtcataaatgtgcgatgggcagcagtaacagcaacaacaacggcaaaagcacatgtgcaacatgagcagcgatgcgcacaagcaacatgagcgctcgacagcaacatggccgacaaactgttggtcaatgcggttagcagtcagcaatcaggatatagtcccatgatctcggcttccgaagggtgagggcagcaagatggagggcatatttcggggggggcctttgcgaaaacttggcatttaaatgctttcgaccaaggcagcgtggaacgcaaagccgcgaggcatttatcattcggttcggccggcctttgcttttgttgttggtttcgtgtgctgccactaataatgacgtcagcagcatgcagaccatgaaatttatgcacatcgagctccagtgtatgagtgtatgtgtaagagagactgttctatatgtgcatatattccgagggccaacggcattcgacagaatcggccaaaacgttgggtcagtgccatgaagattaatgtccaggcgctatttgtcggtgcggaatcccaatttttggtttcttttattacacaaggaaaaatttgagcaactcgcggtctacatttattatattgtgtataccaattccttttaaaatgtactaatttttaactttttatttgtggcacggtcacattcgttctgtaggccagtctgggcacactcaggtttgtatgcgccggttattcttgctcaaaagtataaaatttttaattatttaatcgaaagttccctcgtttttcccgtgtagaggctttattgtgctggcaaatagcaaacgaaaaattctctggcgctgctgctcagttcacttgttccacggcttcgtgtttcttttttatatgccggttgccctctgtgtgaacccctcgaatctacggcttcagcaaatactgttggcactttgtcttaattgcttaaaaattactgacatggaaaatgaactcggaaaatgttaaccactaccttcatttccccctcgtaaatgtcccagcatcgtattgtcaaagatttggctgtcctaatggcaaatacttgcaaatattattgtagtcgaatgtcggcaactatttatcatccagtttgggtgagctgagttcggggaccatttgacaaacttaatttattaatgcaccactcccatctcgtttcgtcatgctgtaaatgccttctgccttgcttaaaagcacattaattttcatttcatttggtgataaaacaaagactttccattttaaatatctagtgacaactaacaaataaaatgtgccccaaagccctctcggggtaattgtttcccccactccttatgccattcgactcaacttgagccccaaaaagtctggacctgagccggcggccttttatcttgacgatgatgtggcactcgggcaaatcatcatcactggctgtcatgcctcgtcatttgcatacttgccagcagaaatggaagtggtattgccccaatgccccactccataaatacgaaatacgctgctatacaatcataatatgaagtgggacttgggctttcttttcggtgtccagctgacaggcgagtggcgtttgcgaggtgccaaagatagggcggttcccctatgtcgtaatgttaaaaccgggtctttggctgattgatatgcatgcgaaatctaagcatcacttggctttgtttattgacaggcaatttgcggcgccatcgcttcaatttgccaattgacagccacatcacagggtatcagcgtgcttttttcggatttatttttgcccacttctgaccaccggtgcaaactcctttcaaaggaatagttttcaaaagcacattgtgtggaagttcaatttaatgcgccgttcggcggttgcgaaacgaatttcacaaatgcggtgcagccatttcgtagcatttgaatgcattaattagtgacaaaaacaaatatcaattcttctctttgctcttttgcacagagagaaatctgagagatattatgcgtattttataaattattctggcttggtaatatttattgttaagaaaatatattttttaagtgtatcatttaataacaaaacattaatcaaattgaaattaatcttcaaactgtgaacgcagtttttctccgcatgtgagcggttcgattttaatgagctgctccccgcgtgttgcgtatacgccacgtttcagcggcaaagaaagcgacttgcattatttatggctaggctggtcgtccggtggctctaattgaaaccgccaaataattggcccgcatcggcctgcagctaagccaattaatgcggccatataatttcagttcatgcgggaattggcgggaaaagcagctggatgcgcgcagctccgagcccagtttcaaataaaatgaaattacccggtcaagtgcagcaaacattttggaaattacacggtccatggggatgggacggggggggtatggccattgcatttgagtgttcattaaatacacaacaacaggcaaaagagtcacgggtcgcagcggcattcaaacggcattacgtatatgccgtgcggaccgattggaaaattgcgccaatcttgcagctaagtggccataaaactgccagtcgggccaactatatttccacacaacaccagctttttctccgattttcctgctgccgctgtggaaaacattttcctattgcccttgccattgtcattggtggcaagtgcacgaaaattagctggcattggatgcttgacaataaaattgacattcggatcgacaacgagttcaaagtgccaccccttccgcactctccattttttccaagtgaataatgcaattcgtttttcactgttccatgccctgccctgccacgccccctcgttcaccctttgttgtttgccattttgcgttctattttttaatcgattgattgaaatgtttgctgcaaattgattgatggcatgcagccagccatgttcccatatatgtatcattgcttgccatatgccatggcaggagatacaaatatatatatatatttttaaaattgatatagccatcagatgacagttaattgagtggtttgttgggaggcgaatgggaaaaacaaactatacacaaaccgcaacagtctttgaagttcgacgggcgggtaaccataaaaggaccactttgtttattgacaaaaaactttgtgcttacagggcattcatcagtcggtatttctaacaacttatttgagtgttttcgttttatttcctcgaacagtactggatttgtaaagagatttaacatgttaaaaacttgattgattgattcgtctcaaactcaaacacacgttgccacgttttcccacatatcctgccataagtacggatatgtctatatttagggaggaaccgcgacggcttgtcttacacgccacttacatgctggcttgtggggcaatttatcatgttaccggaagtggtgtaattacttaccgatcgacggcaatggccaccagatgcaaaatcgaggcagtgcagcagaggacatcgcacgacgtccagatatcgcacaattccggaccaagtatccagccttggctgatctgtgggcacagagagagagagagagaagaaaaaaagtaaagtgggtagatggtcataaagctggttagtcaaatagacaataaaagttgatggcttattaaatttgatgctccccaagcatggagtgtaaaatgtaatggcttctaataacaaagcaaacaagggttgccaggctttataaagggtcaactgtcgaacgatgaagtcaaagtggtaaggcagccatggggagtcgtttcttcatacggaacctaatactttttggccttttggccagcagcaatatgcagattccattcggagaacttgagaaaaaatttgaactggatgtggatttcttgcttggggtgaccgaattagtgggccacattcaaggactatattccattaccgtatatgcggattgcatcgacatacatccttcaatccagcagcgcattatggataaatttatggtacccgttaatacgattggatcgaatctaagtcggcctaattaccacaaactggacaattcaaggattcgaattgttctctttactggcctgaatgacaccatcttggttaatctcaataaaacggacgttccctactcagataatttttatatgcttgcgtatgcttcagcaattaaaaacaagtgcatcgagctggattttattgaagaggtatttacactgctttggaaaatgtcgattcagaatgcaatccttttgatacgcggcgagttcatgatggaaatgtggtcctacttgtatatgggaaaaatacacaaaattaaattgactaagcccaattcgtatttggaaagtcttcgcaaatacaactatagattcagtcttgaagttatcaacgatcctccagccatattttgggtgagttcatttggtatcaccaacaaatatttaatgatttaatttttacaaattgtaaatgcaaatgctattgagcattcaaaatttcacttgcagtacaactcatcggaacaagcggatgtgactggcgggggcaacctcagtgtgtccggccccctcgggctgattatcataaattttttgcgtcacctaaatgtgaccatcgatattgtcccgattccgggaaagcagacctcacagtacgagttatttcagcagccagataacttgagagcggaaaatggagtaaatatggtaggcagtgccctcttgaaatacagcccaatggtgacgcagtcacggatgtgtctgttggtctcgaaccgcagaatgattccttttagcagattcctagacagactggttagtcccggtgtccataagctcacctttgtttcgagtattggcatattcgtgatcaagtacttctcccatcgacctcgatcgtttgtggatgccattttttgtaccatacgatttttttttgctattccgctgccaagtattattttaaatcgcttgcccgtagtggataggttcatagaagtgtttataatcattttcgttcaaatcttactgagttcgaatatatccataacaaccagcgccctgacaaccgggttttgggagccacctatcataaatgtcgaaacgatgagagctagtggcctgcatattcttaccgaagatccgacaattctacaagccttcaaggaaaatattttgcccagctcgttggcggatctggtgattcttgtggatgaagacacttatttccatcacgtcaccaccttaaacaacagctacgtctatgtggtgcaagcgcacaattggcaaatatttcgcctatatcaacagcaaatgaccaacgagccatttgagattgctagtgaggaactctgctccaaatggcgtatcttgggcatcccgctgaatccgaaatcacctctaaggttcatgtttaaggattatttctataggattctggagtcgggattgcgggagcaatgggttcatagtggctttaaaaagttttgtgaatttaataacttgaaaaagctgcccgttgactccgtagatagttggcaaccgctgtccattgaattctattcaaatgtcataagggcttatataataggattagtgatcgccaccttggcgttcgttgctgaactgcttcacaatggatatcgtcgtaaaaatgtgaaaaaaacgtaaaaaaatcatatgtaatgcgcttgcttgtcaatgtaaaactttcaaataaataccgcacctttgctttggcttttctgggcaccttctacttacctcgtatacagctcctaggggcattactaggcaggccacgaagagatcggccactgccaatgaggccaccaggtagttggccacgttttgtagattccgctccaggataatggccgctatgacaaagacattgcctgcaatgatcgaagaaatggtaaactaaattaaatgaagagcgggaaacggaaatagggtcgattttagtggggcagggaacttttagcagcctaattgcgaaaattgacttgaggcgaaaagtttgcaattcaattcgagctgcagctgatgaccgaaaacgaaaccaagaacctgagcggcacagataaactttttgggaattggcaaacttctatggacgccggcgaacgtcgagaatgggaatcttattaagcatgtcccacagcattgcactgttgcaattccagttgcactcgagctggcagggcagacaaagagaaagttcacaaaagccaaaataaacgacatgagctaatcgcgctgtcgtaaacttttccaaaagccccagacgaggatgaagggtgtgaaattgacgtaagggggttttggatgctcgatggtcttagggtcttagggagcgccgcgggtgaggacaccacacctttgatgtctgctggtgcgcttatttttcctgagttttctcgactcgactcactatcttttcccaccaccacctttgccgccactgtcgccgactacttgtggtgcacttgaggctgcagaagaaagacagccactacaggtgcgagacatgcaatttgtggcattgaatccgccggcagtcgacggcaggagggctcgaacacactcacagcacccgcctggatacacacagatacgcaaaacacatacacacacatgcaccctaggtacatgcaattagatacttgagtgtcaaagtgaaggcaagtagactcatgcctcatgcctgccagctgtttgcgtttttcagtttcttagttccatgcagtgccttcgccacgggggtcactcgagccattgcatcccaggaaggatgcttaatcttatcatggggtagtaatgtaatagtgtaaaattcccacacaaaccactacttttgttaagcctctcattaatgtgtataggcattaaacttccaatagagtataggttttaagtatatttttaagtactttaaacaaaataaatagttatccaatttatgacccaatacaaaaatttcaaatcattttagcactgtataaatttaatctctaacaacgcttacaaatcagctccaaaacgaataataattgggtcaaataatacaaccattaaattcatatattttttggcaatccccttagtcgacattttgttccgggtacttttcatgcaactttttttctgctgccgagtgaccgaaagcgtgaagcaatctagctaaaattagcattaagactcattagcattttctttttaaatgctaaatgctgctgccgtcccacttggaaggcgactaaaaaatgcaaaagttcaaaagcggacgagctcggcgggaagaaaagaaaactaaaaaatagcagaatggggcgaaatgaaagaaaggccggcggaagaggaaaaactaaataaacacaaattagtaggaaatcagaatggaaacaaggaggaggaagcgagacatgtgaatggcttccagctcaattcagtcaggattcaggatcctttcggagtggcgttaagaagcgtagcatacttttcagcgctcgttatttttatttgcctcttgacttttgtgtgctggccgttttaaatgaaacgaaacgaaatgaaatgaaatgaaatctacttaaattaatgaaatcaatttcagccggctgctctgctgattttgcttcttcgcctcattttcatctcttactgcctgattttgatacattttgttctggattttacaacgtgaacataaagtttcccgctcgacttgtattgaagtgggcggggcactgtgattgattgattgactgtcaattttaatgcggcatgtctttgcctagatggatgccggtttgtttgccatcggatttatggctaaatgcgtgtaatgaatgtagccaacaacaaaagcggcctcattcttgttctcccaatgcgaatcgtctacgtccaccacccattccacattttgttcctcgtcattgagctgccttattaataactgagactgaactgatgcttctgctgctgttgctgctgctgatgctgcttcagcatctgagccataataacaacaataataaataatataaaatgccctgccagtatcataaatatcagttacgcgtattttattatctacaactgaagccgaggcgcccgacaagtccctccgggtcctccttattgaattgtttgccatattccccaaggattaggaggcaagcagaaggcgcgtgcctgagactggcattcgaggaatttattttgggtggtatggctcgctgagcgactgaaataattatgtctatgtttgggctttggcttacacaaaaaataatataagacaactcagattttaacagtattagaaaaaaaataaatttttaattagagaacggttaagtattggaaatatctttataaatatttttatcatattatttccatgttttaaaaacaacattttccgagtgtaccacttgctttttcttacggttttcagtaagtactcaccaattatggtgaccagtatcattagaccgagcagcaccgatgtgacggccattcgcagcagctgcgtaaagtcgtcctcggccactttgctggtggtcacattgaggccgccagtgccgttgatcagatccagttggccactccggttggcaagcatctcgccgaacaaactggaatcgttgccttcgaggaggagcgtgtcatttagcagcatggcacccagtccgactgcgacattcgtgtagttattgtccatgtcgatcagttggagggctggagaggatgctggcgaggatgtggcatcctgcttggtggtcagtgccctgtgtgccgccttggcggtgatcctggcagccgctgccgccaccgaggcactggcggctgccgctgccaaagcggcggtggccagtggtgagccggcggtggtggtggtggtgttcacatcggtgggcggtggcttcagcgccagggagcctatgaaatccgctcgtcttttaccggagctgtagtagcgcttgctgttgttgttgttattggtatcctccagctgtccatcgtccgtgaccgccatgtcgtccagttcctccagctccgcgtcgtcctggtcctgaccatctacattcggctgttcgggatgcggttcggctatcagaaaggccctgtcattcatgctgttcgctatgtaaatgtagtcaagcgcatctgaagtgatgaagaaaaagagatttacatgattgaagactttcatagttacactgagaaaatgcacataaattgtaaagtattgtacaatatttttgtattttaataattattaatactagtactcttctctagttaaaacctttaattatagtagaatatatatcaatctaatgacctaactgccgtattcttcatgtgtacccaccattaaagctggtctcgtgcgccattttgtggatactcggtgtgtttttttggatgcttcgcttcgcttaattgcagccgcagcggaaatgaggagtagacggaaacggaagcgcgactatgcaacgggaacggtaacggtaacggtaacggcaacagcaatggcaatggcctcctgacgcatgtgtgtgtctgtgtgggtgggtgggcatttgcgatggtgccgttgtttcaactggcggccactcagacacgcgggacgggacatggtgacactttccctactttcccggctttccctgctttccctatttgccgtactttccccactttctcctcggtggtcctttttttgttccagcgtgtgctcggtgccgggcaggatgtattatcctaacgagctttcaagtgtttacatggagcgtttacaatttcggcttttggctttcacttttctttccgacttcctcttatttgtgctctttttttatgttttctttagatttctctgtgtggcagtgttgcttttgttatgttgattgttgccgacttggctttgttgctactgatgttttgtactcattttggtttatttaagctcttccgtttgctgtcgtgtgtttatggcccatttgatggctattttcatatccttgaagtaaatttcacatccgattgccttctggtgtctgcattctgcgaaaagcaaaaaagaattcaattagacaataaattctcgtgcgcagctaactaatactaataaatagcaaattgaatttctgcggttgcccccaatatatttgttcctttcttttattctgcccctcatgcttggtggaaaataatttcctgcaggtctgcggcatttttggctgtgaaatttattgtattcaatttcctttccgcattgtgcgtaaagtgtaaatgaatttgaaatgctgccgctgctgcgcccgcttgttaaataatttaacgcaatttctgcaattacacggaatcacttggcacgataaataaatatgaagactggcataccgagcgttgttttctttattttcctttttctttttccccacaggcttgccacatacacacacacgcatacagacgtaaacgcatttacgcatatgtgtgcgactggcggaagttttgcgtgcgtgcgacaggcgccattgccagcggctcctcttctcttctgcccccgccagtttcgtctttcgatgccccaatgctgcgacacaggcggcaaaataaatttaaaacgcataaaggaaaaagcaaagggggca

SEQ ID NO: 37262 - DNA, 2839 bp, DROSOPHILA
gaaagtagggaaagtgtcaccatgtcccgtcccgcgtgtctgagtggccgccagttgaaacaacggcaccatcgcaaatgcccacccacccacacagacacacacatgcgtcaggaggccattgccattgctgttgccgttaccgttaccgttaccgttcccgttgcatagtcgcgcttccgtttccgtctactcctcatttccgctgcggctgcaattaagcgaagcgaagcatccaaaaaaacacaccgagtatccacaaaatggcgcacgagaccagctttaatgatgcgcttgactacatttacatagcgaacagcatgaatgacagggcctttctgatagccgaaccgcatcccgaacagccgaatgtagatggtcaggaccaggacgacgcggagctggaggaactggacgacatggcggtcacggacgatggacagctggaggataccaataacaacaacaacagcaagcgctactacagctccggtaaaagacgagcggatttcataggctccctggcgctgaagccaccgcccaccgatgtgaacaccaccaccaccaccgccggctcaccactggccaccgccgctttggcagcggcagccgccagtgcctcggtggcggcagcggctgccaggatcaccgccaaggcggcacacagggcactgaccaccaagcaggatgccacatcctcgccagcatcctctccagccctccaactgatcgacatggacaataactacacgaatgtcgcagtcggactgggtgccatgctgctaaatgacacgctcctcctcgaaggcaacgattccagtttgttcggcgagatgcttgccaaccggagtggccaactggatctgatcaacggcactggcggcctcaatgtgaccaccagcaaagtggccgaggacgactttacgcagctgctgcgaatggccgtcacatcggtgctgctcggtctaatgatactggtcaccataattggcaatgtctttgtcatagcggccattatcctggagcggaatctacaaaacgtggccaactacctggtggcctcattggcagtggccgatctcttcgtggcctgcctagtaatgcccctaggagctgtatacgagatcagccaaggctggatacttggtccggaattgtgcgatatctggacgtcgtgcgatgtcctctgctgcactgcctcgattttgcatctggtggccattgccgtcgatcgttactgggcggtcaccaatatagattacatccactcgcggaccagcaatcgtgtctttatgatgatcttttgcgtttggacggcggcggtgattgtgtccttggcaccacagttcggttggaaggatccagactatctgcagcgtatcgagcagcaaaagtgcatggtctcgcaggatgtttcttatcaggtatttgccacctgttgcacattttacgtgccactgctggtcatcctggcgttgtactggaaaatctatcaaacggcccgcaaacgcatccatcgtcgacgaccgcgacccgtcgatgcggcggtcaataataatcagccggacggaggtgcggcaacagatacgaaacttcatcgactgcgtctacgcctcggcagattctccacggccaaatccaaaaccggaagtgccgtgggcgtctcaggacccgcatccggaggcagggctctgggcctcgtcgatggcaactcaacgaacacggtcaacaccgtcgaggacaccgagttcagcagctcgaatgtggacagcaaaagtcgggcaggcgtcgaggcacccagcacttctggcaaccagatagccaccgtatcgcacctggttgcgctggccaagcagcagggcaagtccaccgccaaatcctcagccgctgtcaacggaatggccccatcgggcaggcaagaggacgatggccagcgaccagaacacggggagcaggaggatcgcgaggagctagaggaccaggacgagcaggttggcccgcagcccacaaccgcaacatcagcaatgacagcggcaggcaccaacgagtcggaggaccaatgcaaggccaacggggtggaggtcctggaggatccgcagttgcaacagcagctcgaacaagtgcagcagctgcagaaatcggttaaatccggcggtggaggtggggccagtacgtcaaatgccaccacaattacgtcgatatcagcgctatcgccacaaacgccaacatcgcagggagttggaatcgccgccgccgccgctggaccgatgacggccaaaaccagcacgctgacgagctgcaaccagtcgcatccgctatgcggcaccgccaacgaatccccatcgacaccagagccacgtagccgacaaccgacgaccccgcagcagcagccgcatcagcaggcgcaccagcagcagcagcagcagcagcaactctccagcatcgccaatccgatgcagaaggtgaacaagcgaaaggagaccctggaggccaaaagggaacggaaggcggccaagacgctggccatcattaccggcgccttcgtcgtctgctggctgcccttcttcgtcatggcactgaccatgccgctctgtgccgcctgccagatcagcgattccgttgcctcgctcttcctttggctgggctacttcaactccaccctcaatccggttatttacaccatcttcagtccggagttccgacaggccttcaagcgcatcctcttcggcggccaccgaccagtccactaccgcagcgggaagctctagatagtgcatgcgaagaggcgaaggtgagtgctccttggggaagccaatactcggcaatgaaggtgcactga

SEQ ID NO: 37263 - protein, 834 aa, DROSOPHILA
MAHETSFNDALDYIYIANSMNDRAFLIAEPHPEQPNVDGQDQDDAELEELDDMAVTDDGQLEDTNNNNNSKRYYSSGKRRADFIGSLALKPPPTDVNTTTTTAGSPLATAALAAAAASASVAAAAARITAKAAHRALTTKQDATSSPASSPALQLIDMDNNYTNVAVGLGAMLLNDTLLLEGNDSSLFGEMLANRSGQLDLINGTGGLNVTTSKVAEDDFTQLLRMAVTSVLLGLMILVTIIGNVFVIAAIILERNLQNVANYLVASLAVADLFVACLVMPLGAVYEISQGWILGPELCDIWTSCDVLCCTASILHLVAIAVDRYWAVTNIDYIHSRTSNRVFMMIFCVWTAAVIVSLAPQFGWKDPDYLQRIEQQKCMVSQDVSYQVFATCCTFYVPLLVILALYWKIYQTARKRIHRRRPRPVDAAVNNNQPDGGAATDTKLHRLRLRLGRFSTAKSKTGSAVGVSGPASGGRALGLVDGNSTNTVNTVEDTEFSSSNVDSKSRAGVEAPSTSGNQIATVSHLVALAKQQGKSTAKSSAAVNGMAPSGRQEDDGQRPEHGEQEDREELEDQDEQVGPQPTTATSAMTAAGTNESEDQCKANGVEVLEDPQLQQQLEQVQQLQKSVKSGGGGGASTSNATTITSISALSPQTPTSQGVGIAAAAAGPMTAKTSTLTSCNQSHPLCGTANESPSTPEPRSRQPTTPQQQPHQQAHQQQQQQQQLSSIANPMQKVNKRKETLEAKRERKAAKTLAIITGAFVVCWLPFFVMALTMPLCAACQISDSVASLFLWLGYFNSTLNPVIYTIFSPEFRQAFKRILFGGHRPVHYRSGKL

SEQ ID NO: 37264 - DNA, 6105 bp, DROSOPHILA
ttgtctccccatcgccagcagtacgggcggtattcgccctcgcccaaacaccaaccccagtcctttccccactcgcaactccaactggagccgcagactcgtgggcgctcagcctcggctggtgcgcagttcaaaaacgatttgggctacatgaagaagatcttcaagtagcgcttaaaagacactctacccccaccctcctcctgtcgtattgctagttttgatccaagctttgtgtgttcttgtgcccttttcttgtttcaattgcagagtcctgcaggaatcgctgcttggcgcccatgcaaatctccaaagcggttcgcccgcctccgacgaagacgacgatggtggcttccggtatgtggatcccgatttggccatggccatgcgactgtcacagcaagagcagagaaagttcgaactggagcggcagcaggagcaggagatgatcgagcaggcgttaaagcttagcctgcaagagcactaatatactatcagcaattccaaattgaagttatattgatttcaagtgtaaccttcgggctaagttgtataaatactacgagtactttaagttaccctcgcatccttctgcgccctgtccttgttttgtattgtgatacaagcgggacgcaagcgggaagcagtcgcctggtctcaactcgtccactcgcaaccgaaggatccaccctatatataccatgtatccaaagtagtccttgtagttgtagcttttgcattgaatccggtatctattatctagatactatcttaaatttaagtgcgtgtggcgaccgtgagatatgtcttatatgcgatcgaaccgggttagccacatgcttgcgtgtccttaatctgtaaccactaatcaccattatgcgtaatttataccaataatacccactcacacatcatgcgcatgtaagccgacacctttttgtgtaaatgaagaaaatatatgaaataatcatcaggaaaacaacaggcgtttttttcatttacttagcgatgtagtaatttcgtttattaagcactatatacaattcaaaatcggtacacaacttatgctaattaagcaaacacaataaagtctcaaaatttgatttggtatctctactcaagactatttcctaagaaagtttagttctgaaagcagaatctagacattttaggccgtgcgaaaaaatagttattattcggtgaaatgcaggctgtgctatctcgattggcttatcagtggctaacttgtgtccatttagagtatatacatatgggcttgttttggttttcacagattatacgatttgttcgatttacaatgagtgagtaactaatagtttgtttaaaatttttgttatattccgtattgcacacctttggttagagttcttaaataatatttttaagatattcaaattggttagctttttgatatagattcctaaaaaacaaatatgtgaaaaccgcaacaggcccgataagttttacttacaactagaagtcattcagctggtgatcacctcgttataataagtgaagtggccgcctttgtcggaatagggattctgggatcagttgtacgactagatgtacttgaagcacttttgcttgtcgtgcgggatgcgcgtcttgaagagaatggagtccgctcggtactgggtgttcagcagcggcgtatagccgaacacccggctaaagaaattgatgcacttgtgccgctcctggaagtgagtgtcatcctcgctgagtgaaacaggacagccggggcagcggaatgtccacctggaggtgactttgactggtggttttctagttatatgcgatacgagaaaattcatggcaatgtcctcacagttcatgtactcatccaccttgtcccttatcgcctgcggcagatggtaggtgtacaggtaaagatagtacttgtgtacaaacgcagctcctgtcagcaccatgctcagttcgcagctgtaattggagttgtagtgccactggccattgggatttcccaaatcccaagcgtggtaacgtcctgggaagcctacaactctatcgcgatgctcccgccaaacacggaatccgaagagaatctcatcatgacgcagatgggcatcgtcgtcgacagagagaacagcctcggtttcaatgacatcaaaaggcagaaatcggttgtttaacgaattcctgggagcccgaaggacggcaactggtactccaatatccggccaccttaggtcatccaatggtggcttcggtgagttccaaaccaccacgactttgtgcagatacggcagaccatacagtctgcccaatgaatccatgaggacttgttctctttcgtaggttaacataacaatggtgaactgctcccgggggtaattgccacccagtgactcgccgaattccttcccagctcctcccaatcccttacctatcggacgaaagcctgtatgcgagcccataaacttggcttccgaaggcaacgcaggatcaaagggcagctgggggtaaaggtaaaagggatccagccaatcattccaggcttccttcgcctgcatacgcagtattgtatagtttcgccggaaagcaggactcggatagggtggttcgatgggtcccaacgactcttcgggttccgtatccaagccaacaggtggatcggattttaggggtataaatgtgctgttgaacacactttgcgctataaccgagggcacgggtctgggcgggattccaaggcgatcccttaaactggcaatcactgtatccacggtggcctgcacagagctcaaatagcgttcccagatgagtcgcccctgtcgtcgcagcagcaataagtccgcatcctgcaccgcgcgcagaaggaaatgcagttctgtgatccgagctttcggtagcagtagtgccgttcttctccaatctacagtttcagcatacggcaaacgcaactcatctgctccaaggataacaggtactgctcccgaacggagagcttcataaatcctagcaagcattagtgtcgacgaaactctgccattcaacgggggtaaaatcagagaaaacgtagagtccttaagcaattggcggcgcgatgaatccgaaccacatagcgtccaatctggcagggaatcaccctcctgctgttccgtagctgggacgcactggaactgcagaacgaactgatcttgcgttgcgcccttggccatatccgccaggtgctccagaataaacgcatctaaggggttcaaactactctgtttgggcctcagttcaccttggtaggtaagcaggtatttccttcgggcgggcaccatttccgcgcactcctgccacacatctcctccaggaggacccagaataggaggcacaattaggtcataacctggacggaactgttctctttcaaaagcactttgcaccacaattgctcgcatagtgttctgcctgtagagaggattcgtacgatgtgatgtgagatctcttctcgccaagttgagcagcacatgattgcgaccatcgccgccccaatatggcagactgtaaagcttctccatgtccacggggcagtcattttctagagtgggcgtcgagggctgctgatgctccgcctcctgagccgcatagcgattatttcgcaatagatcctgctcaagcagagcctctcccaccagaactagatatatgcaggcatgcttgggatccttaactatatgagcattgtatcctaaagtctgctttagagtcgtctttaggaaaccatcgatatcgtaaccctttcgctgaacgctatgctcatccggatcgtatagataaacaggaaatccggaggttagactgcagcgtgagtgattgaagcagttgtgcatttcgcagctggccgccatccctccggtgatgggattactctttcttggcagtgtgttgggtaaaagagagcggggcaaggccaagtccggtgtattccgctgaacagcctcccgctgggccacctgagcctgctccacggagatcttgaggcgctccagttctgtttgctccctaagcagttcctgtttgagctcctcgatcttctggttgtactggctaatgtccgattgcagcttctggcgacgggactccaattcgcgcaactccacggacacggtgctctggatgagaagaggtttgagcttctggctacgtatttataggagttctcggctactaaccttgattctaaccatctcctcgatgcgcattttcagatctcctgctctcatggcgctgaaatcttcgtaggcatctagcagcggtgaactacgatgcagatccagtggcggggcatcttgctccacctggaaaatatgaaagttgtcagttgatcaatatttagaatattatctatggtaagtaaatatctttgacacacgctgataacgttagaagataagcaaaaagtttgtagttcttgtgtgagtatctgagatcggacatatttacaatatttcaattatataaaagcaatgatagattaaatttgaatcttataaatgattgtatttgtgttttacagcttgacctacatacacgtatatataaagaaaactcaaatatttagaaacatctgaatgtaagaacaatatataaagattattattgattcaacaagtgttttgttttgttttacttttaagtgttatctttaattataagataaatatatttggtgctccaaatatttgagttcccatctccactgaagttcacttccggtatccgaatgacggagaaaccggtatacctacgcttaggatgcggtatgctaggcaggaaacgagaaacagcagcatcagcagcaccatgggcagtttgtagcggcggaactgccgcatccaggatgtccggaatcccatcgaatggcggatttgcgcggaggatgagttcggggcacaggcttcgtttccgccgccgctgccagtgtccaggggttggtacgcctctccggaatggccaaggtcgtacgccggtggcatggcattagtttcagctcgcgattccaccaaaatatctcatttatttacactttatcgcgagtggagtccgtttcgttggcaacgcgatgcagggctgcacaaccaccacttggagtatgcgtgtaatcggtgcatcgataattatcaaaggcatcggttagcccgccaaaatcgaattattcaaacataacagtttcaatcttgaagccataaaagcaaatgttttgtatttcttgcttagtaatcttagttttcactgctagcgctatcaaataattaaaattgaatcaaaaaaccaatgaagtttttgcttacacttgctaacagaattattcgcaacagcgaatcaacagttttcatttaacagcggattcaaagctcgtaacagtcggatttttaagttgtcgtgacaaaagtgtgtttgtgattttagtcgcatccaaatccgcggtgcgtccgcttcgcctcgcggtttatagtttcaaatagtttgtttttgtaattaccggcaaaacacttgaaccgattattaatagtcgcgaaatgactgccaatttctaaccacttgtgttcgagttttaattggaaacgaaaatagttcctaagtgcacaaaaccgattccggattttaattatactcgcaaagttacatcgatcattcgccggaatcctgcacggaatactcgaatatgggtaaaagcctctatttatatttactgtcggtgacattttcactttcttttgcccgcccattgattcttttctttgctttgggcctgcttttgtgggccgggccttgaaagtgaaagccaaacgaaaggaaaatggcaataggcgtgggtacattccatcgataccctaacacttagcacttgaaggtgcgatttttcgtggacacaattggccatttagagtttagatagcaatctattattagctaactcagactaaaacagcacagtctcatcatctgtgctccttaacattagaaaatgtaactttaaatactgaaaaatgatattgaatttcgtatactgaagctttgaaaaaataattgaactatttcaatctaaaaaatctatacattatttgt

SEQ ID NO: 37265 - DNA, 3595 bp, DROSOPHILA
cctgcatcgcgttgccaacgaaacggactccactcgcgataaagtgtaaataaatgagatattttggtggaatcgcgagctgaaactaatgccatgccaccggcgtacgaccttggccattccggagaggcgtaccaacccctggacactggcagcggcggcggaaacgaagcctgtgccccgaactcatcctccgcgcaaatccgccattcgatgggattccggacatcctggatgcggcagttccgccgctacaaactgcccatggtgctgctgatgctgctgtttctcgtttcctgcctagcataccgcatcctaagcgtggagcaagatgccccgccactggatctgcatcgtagttcaccgctgctagatgcctacgaagatttcagcgccatgagagcaggagatctgaaaatgcgcatcgaggagatggttagaatcaagagcaccgtgtccgtggagttgcgcgaattggagtcccgtcgccagaagctgcaatcggacattagccagtacaaccagaagatcgaggagctcaaacaggaactgcttagggagcaaacagaactggagcgcctcaagatctccgtggagcaggctcaggtggcccagcgggaggctgttcagcggaatacaccggacttggccttgccccgctctcttttacccaacacactgccaagaaagagtaatcccatcaccggagggatggcggccagctgcgaaatgcacaactgcttcaatcactcacgctgcagtctaacctccggatttcctgtttatctatacgatccggatgagcatagcgttcagcgaaagggttacgatatcgatggtttcctaaagacgactctaaagcagactttaggatacaatgctcatatagttaaggatcccaagcatgcctgcatatatctagttctggtgggagaggctctgcttgagcaggatctattgcgaaataatcgctatgcggctcaggaggcggagcatcagcagccctcgacgcccactctagaaaatgactgccccgtggacatggagaagctttacagtctgccatattggggcggcgatggtcgcaatcatgtgctgctcaacttggcgagaagagatctcacatcacatcgtacgaatcctctctacaggcagaacactatgcgagcaattgtggtgcaaagtgcttttgaaagagaacagttccgtccaggttatgacctaattgtgcctcctattctgggtcctcctggaggagatgtgtggcaggagtgcgcggaaatggtgcccgcccgaaggaaatacctgcttacctaccaaggtgaactgaggcccaaacagagtagtttgaaccccttagatgcgtttattctggagcacctggcggatatggccaagggcgcaacgcaagatcagttcgttctgcagttccagtgcgtcccagctacggaacagcaggagggtgattccctgccagattggacgctatgtggttcggattcatcgcgccgccaattgcttaaggactctacgttttctctgattttacccccgttgaatggcagagtttcgtcgacactaatgcttgctaggatttatgaagctctccgttcgggagcagtacctgttatccttggagcagatgagttgcgtttgccgtatgctgaaactgtagattggagaagaacggcactactgctaccgaaagctcggatcacagaactgcatttccttctgcgcgcggtgcaggatgcggacttattgctgctgcgacgacaggggcgactcatctgggaacgctatttgagctctgtgcaggccaccgtggatacagtgattgccagtttaagggatcgccttggaatcccgcccagacccgtgccctcggttatagcgcaaagtgtgttcaacagcacatttatacccctaaaatccgatccacctgttggcttggatacggaacccgaagagtcgttgggacccatcgaaccaccctatccgagtcctgctttccggcgaaactatacaatactgcgtatgcaggcgaaggaagcctggaatgattggctggatcccttttacctttacccccagctgccctttgatcctgcgttgccttcggaagccaagtttatgggctcgcatacaggctttcgtccgataggtaagggattgggaggagctgggaaggaattcggcgagtcactgggtggcaattacccccgggagcagttcaccattgttatgttaacctacgaaagagaacaagtcctcatggattcattgggcagactgtatggtctgccgtatctgcacaaagtcgtggtggtttggaactcaccgaagccaccattggatgacctaaggtggccggatattggagtaccagttgccgtccttcgggctcccaggaattcgttaaacaaccgatttctgccttttgatgtcattgaaaccgaggctgttctctctgtcgacgacgatgcccatctgcgtcatgatgagattctcttcggattccgtgtttggcgggagcatcgcgatagagttgtaggcttcccaggacgttaccacgcttgggatttgggaaatcccaatggccagtggcactacaactccaattacagctgcgaactgagcatggtgctgacaggagctgcgtttgtacacaagtactatctttacctgtacacctaccatctgccgcaggcgataagggacaaggtggatgagtacatgaactgtgaggacattgccatgaattttctcgtatcgcatataactagaaaaccaccagtcaaagtcacctccaggtggacattccgctgccccggctgtcctgtttcactcagcgaggatgacactcacttccaggagcggcacaagtgcatcaatttctttagccgggtgttcggctatacgccgctgctgaacacccagtaccgagcggactccattctcttcaagacgcgcatcccgcacgacaagcaaaagtgcttcaagtacatctagtcgtacaactgatcccagaatccctattccgacaaaggcggccacttcacttattataacgaggtgatcaccagctgaatgacttctagttgtaagtaaaacttatcgggcctgttgcggttttcacatatttgttttttaggaatctatatcaaaaagctaaccaatttgaatatcttaaaaatattatttaagaactctaaccaaaggtgtgcaatacggaatataacaaaaattttaaacaaactattagttactcactcattgtaaatcgaacaaatcgtataatctgtgaaaaccaaaacaagcccatatgtatatactctaaatggacacaagttagccactgataagccaatcgagatagcacagcctgcatttcaccgaataataactattttttcgcacggcctaaaatgtctagattctgctttcagaactaaactttcttaggaaatagtcttgagtagagataccaaatcaaattttgagactttattgtgtttgcttaattagcataagttgtgtaccgattttgaattgtatatagtgcttaataaacgaaattactacatcgctaagt

SEQ ID NO: 37266 - protein, 972 aa, DROSOPHILA
MPPAYDLGHSGEAYQPLDTGSGGGNEACAPNSSSAQIRHSMGFRTSWMRQFRRYKLPMVLLMLLFLVSCLAYRILSVEQDAPPLDLHRSSPLLDAYEDFSAMRAGDLKMRIEEMVRIKSTVSVELRELESRRQKLQSDISQYNQKIEELKQELLREQTELERLKISVEQAQVAQREAVQRNTPDLALPRSLLPNTLPRKSNPITGGMAASCEMHNCFNHSRCSLTSGFPVYLYDPDEHSVQRKGYDIDGFLKTTLKQTLGYNAHIVKDPKHACIYLVLVGEALLEQDLLRNNRYAAQEAEHQQPSTPTLENDCPVDMEKLYSLPYWGGDGRNHVLLNLARRDLTSHRTNPLYRQNTMRAIVVQSAFEREQFRPGYDLIVPPILGPPGGDVWQECAEMVPARRKYLLTYQGELRPKQSSLNPLDAFILEHLADMAKGATQDQFVLQFQCVPATEQQEGDSLPDWTLCGSDSSRRQLLKDSTFSLILPPLNGRVSSTLMLARIYEALRSGAVPVILGADELRLPYAETVDWRRTALLLPKARITELHFLLRAVQDADLLLLRRQGRLIWERYLSSVQATVDTVIASLRDRLGIPPRPVPSVIAQSVFNSTFIPLKSDPPVGLDTEPEESLGPIEPPYPSPAFRRNYTILRMQAKEAWNDWLDPFYLYPQLPFDPALPSEAKFMGSHTGFRPIGKGLGGAGKEFGESLGGNYPREQFTIVMLTYEREQVLMDSLGRLYGLPYLHKVVVVWNSPKPPLDDLRWPDIGVPVAVLRAPRNSLNNRFLPFDVIETEAVLSVDDDAHLRHDEILFGFRVWREHRDRVVGFPGRYHAWDLGNPNGQWHYNSNYSCELSMVLTGAAFVHKYYLYLYTYHLPQAIRDKVDEYMNCEDIAMNFLVSHITRKPPVKVTSRWTFRCPGCPVSLSEDDTHFQERHKCINFFSRVFGYTPLLNTQYRADSILFKTRIPHDKQKCFKYI

SEQ ID NO: 37267 - DNA, 5621 bp, DROSOPHILA
ggggagaggaggaagcgaaaaactccttttcaaggagtagacaccaatttttctcggctctctctgtcgacgcgaaaatagagtttcaacttgggcgattgctcgattttttgttaataacagtacaccagcacacacatacacacacttttcgcgagccgaggatgttctattcgatgagctcctttttacccaaaaactatgcgatctttacttgttttcgtgcttttttgtttgcgattactattaactcaatccaatcactcacaactaatcgctggcgtttggcggtgtcatttccgcgacagcaccaaacaaatcaaaggaaaggcggcgtttttcccggaaaaaacagtccgtgtccgctttgcgttccgtttcgattcgtttttcgcgacagtgtgcccagatggtggtatactatttacgttgaacgctcgtgaccatccgtgaattctctcaaaaatcttgtttccccaaaataccatcgtgagtcatagacaagtctgggcacacttaagaacgttttgaatctttttattttgatttaaatgtatattcagattcataaattgaattctaatggaatatttagtacgcaattttaatttttttaattcgattttacagtccacttatcgatataatttatgttttctcattaataataaatagccgcgacataaaccctttattttgtgaatcttagattctgaaatcaattcaatgattcaaaattttgtatattcaaatacatggttttacaaaatatcctgtttacaagatcaaattgtttattttgaaagtaaacttaagttcttaaatctgcattggatatcatatcgttgggaattttattcaattgttacgacttatatatcttacaaatgacaacatctacttatttaattatagtaatagaggatttatcccagcatgtcacaaatatctattttaagacaaatgtttgacccagaactgaaatgcaaaactcaaaacattgtccgggttcctcgactgctttaatttgcttgtacagggcggaaaatttggaacgtgtcagtttgattgcggtaaaaaactaaattagaatattcgtctaatacataaattaatatccagttgatcgcacctagtatacggcgtcacggtagttctccacaaacttttggatcagtcccggcaattccggtgctcggcagaggtatttgtgtccatactttcggctcgccccaaagcgatggaactccacaggtcccgaggttcgacttctgccatccaatgcgatcctatacagacgatagcccagattaaacggcaccacgacatcgtcctcagcatggatgatcatgatgggttgccggaactccaagacatgaacatccgactcaaatctcagcctattggtgtacattggttgcgagatggtaaaattgaaccagggcagattcttatagagtttggcaaacggatgcatgcgtatctcgtcccgaatgttggtgaacgggctttcgaggatcactcccctgggagccctttcccgtaggctagctagcttggcgcacagatgcgtggccactccggtgccaagggaatggccccagaccacaatcggattggaggtggtgttggctatgtattcaaaaaccatcatggcatcgcgcacaacgccttcctccgtcggaggtacgggatcggagtcggcatagcctctgtagtcgaaggagaacacatgatagttgagctttcgcagtagcttatacacctccgatcggtgaccactgccccggctggctgtgttcccatgaagatagaggaccacagtaccgccgggcatccgcagcaatcgctcatagaagagctgctcgttttccggcagcacgacgggaaattcagatcgtatggctggcgatagctccttcagctcgcgttcgttgccaggtgcaggatccagctgctgatccgggtcctgggccacttcctcctccacgcgcagttcgcgcttaaaacgacgcactgcattgctgggcagcacgtgccacacaccaactcgcactccatcctcgtcctgatcgtgatcctttacggttatgtagaagtttcgtgtggcataaagacccacgctttccggcttggtgagatcaagtcctttgggatacttaactaatacgagaaattcgattaatattgaacaaatgaaacttccacggttatctggatacttactaaatgtcagaaataggatgccacgctggaacgttacggaataccgaaagatcaacggtaggaccacgaagatcaggaagaagatcagcagacaagcttgcagacatcgcagacccaccctgcgagaaatgtcaattggtgagaggtgaacggtaactgggtggctaagaggatgggactaacaacagagttaagtgacaaaagaacataaaggacaagcaagctggtgcggatgtgagcgtcagggatcaggggataatgtgtatatacaattgggtttgcaggcaaagcggattaatatacggaaaagcggaatcggaacagagccggcgaaattagccgcgaaagagaaatgtcgatgtcacgatgttcggattataaatcagaagaatgggtttcgggttatgtctacgaaagtagtaaaaaacaagcgcacaacatcgaatcgagcgtggatacttacagaccagttagccaactaagtaggatcgttccgggaatgagtgtggctaagaaaacggaccttaggcaattatgaatctcgtacattgtgaatgttttacgtccgttctgtatttatcgtcttaatatatagttagcgatataactttctatcggggaaagcgacttaacactgaatgttactgatgttgtgcgtttttgtgtgcgtagctttcccgggcgaaaagagagataaataagtttgttggttaattcagattgttttgatttgttctggttttttttttttttgttttttattttgctggacggattaatcagatgggacgcatgcaagaccgaaccggacccgatagctcctcctccggatagcgacctttgaaacgagtggggttaaacactgacaaagtggcgatgtgggtgattggttgggcgatcgggtgactggacgtatattatgagcaagcaaagggcgagcactagggtggttcatctagaatccatgcaaaagtagtccatgttaggcactcattaaataaactcaatattcaattttgatttttaagttgtaaaaccttttcacttcgctctacttgtaccgactgagttcacgggaccgcaaaaactatttcgtatgtcatatttccgttttttgattcactatctgcaaaaaatttggcaccctatcggagcttgagcattaacataaagataatactattgttaggcgataagcaaaaagttgtaatttgaaatacgtatggcatgtacatatattgtttggggtgtacaacttctatctgctccacagatcactttcactcatccactcataacttaataaaaatcgagccaccttattggacagaaagcacaacaataatgataatggcggtataatgatatcagatatgagcgctactcgagcgtgactaatacctaaacgcccgtaactgttctggggaagtagggaagcaaaaactacggaagcaaattcgtcgggtggtcggttattcgggatcgggagatacgaatatataatatatatatatatgggatcacaacacttagttactcaaataaacacaccttttgaggagtcgccggcgcgtgaagagcataactgtaaatagtaagggaaaaatagagagcattgatgagtcgatcatgatagggaaacaaatcaaaagaaccgccaaactttacaattgcgatcagttatcggcagtcgcctatcgagcaggaggaaattgtttccggtttgcaaattttttagaacaatttttgagctttaacttgaaatgttggatacgcgcgccttgagctgtgagcaaagtttcttcacaaactgatggcatgcaaagttgccgattttttgttccttaatatgtgcaataatgccatgcacttgtggccaattaacgtctaaattggcaattactcttacttgaaaagagagcctctggtcgtcaggtggaatacagcgtacggaatccgatcgaaaatttctctctacgccagaagcatgatgacctaaaaataataattaatggataactcattaaaattcagttaagtgggtgggcgtgccgcaggcaagttgagctaccgtctcgaacggaacttttcgatgtacgtgtgaataaacggaaggagagtaagtcgaatgagaactcgtagccactccacctaatctcattaacccattagggagcacccactatcccccctttttagctggcgcatccattttttatgtaatttgtttacggtttgtatgcggggggacacattattgttgttattaagcttaccactcacgcgccagcaacttttcctattttcgaatcggaagcggtcttggaaaacgtttatttcgctattttctggagcaattaatgcgatttggaatattttcagccgaacagctgtcaatgttgttattgactatcgatgacagccagagatgaacagagatgaacaaagtgatggcacaacttaagcgttgtattgattaatttggttgtgcattaccatgcttagttattcagcttagttatttcagttgagttcagttttagaattagctattatttgtacggctataattactagctcgttttttaataaattccctgacgatatatcgtaccggctttttacgactaccatcactaatcagcaatcggtgtcgtagaaatggtgtgaccagacctccgctcataaagtttgtttttttcacctagcagagaaacaaaagaattgacaatttagccgcagatcagacgacgcaaatcccaatccaggatgaggagcgtcgaggagatcaaagcggagtacccgctgcactggcacatctggcacaacgaactggagcagctgcaggcggccatcgaccaggtgaaaaggggtggtggtgctccatgggggtgggtgtggcctccggggacaggtgctaattgaattagcagggcacggggaagtgacactgcgataaaacttactgattccgtcaccttgcagaacgataaggagaaaatcgatccccgcggccggacgccactgatgctggctgtgagattggccaatttgccatgcgttaaatgccttctggcggccaaatgcaatgcgacctatgagtacgaaggctggtcgagtaagttaaccaagaaacgccccgaaattaaccccattaattgcctcccccccttagttgtccaggaagcggtctgcaccggcgatgtggacatactgacggccatcatcgaagtccgggatctccagcgtcatgtccagcgggttacgcatgtgcctaagctgctgcagcacctattggacgcaccagatttctacatcgagatgaagtgggaattcacctcctgggtgcctctgatgtcgcgtctctgtcccagcgacacctacaaggtctacaa

SEQ ID NO: 37268 - DNA, 1521 bp, DROSOPHILA
gacagctgttcggctgaaaatattccaaatcgcattaattgctccagaaaatagcgaaataaacgttttccaagaccgcttccgattcgaaaataggaaaagttgctggcgcgtgagtggtcatcatgcttctggcgtagagagaaattttcgatcggattccgtacgctgtattccacctgacgaccagaggctctcttttcaattatgctcttcacgcgccggcgactcctcaaaagggtgggtctgcgatgtctgcaagcttgtctgctgatcttcttcctgatcttcgtggtcctaccgttgatctttcggtattccgtaacgttccagcgtggcatcctatttctgacatttattaagtatcccaaaggacttgatctcaccaagccggaaagcgtgggtctttatgccacacgaaacttctacataaccgtaaaggatcacgatcaggacgaggatggagtgcgagttggtgtgtggcacgtgctgcccagcaatgcagtgcgtcgttttaagcgcgaactgcgcgtggaggaggaagtggcccaggacccggatcagcagctggatcctgcacctggcaacgaacgcgagctgaaggagctatcgccagccatacgatctgaatttcccgtcgtgctgccggaaaacgagcagctcttctatgagcgattgctgcggatgcccggcggtactgtggtcctctatcttcatgggaacacagccagccggggcagtggtcaccgatcggaggtgtataagctactgcgaaagctcaactatcatgtgttctccttcgactacagaggctatgccgactccgatcccgtacctccgacggaggaaggcgttgtgcgcgatgccatgatggtttttgaatacatagccaacaccacctccaatccgattgtggtctggggccattcccttggcaccggagtggccacgcatctgtgcgccaagctagctagcctacgggaaagggctcccaggggagtgatcctcgaaagcccgttcaccaacattcgggacgagatacgcatgcatccgtttgccaaactctataagaatctgccctggttcaattttaccatctcgcaaccaatgtacaccaataggctgagatttgagtcggatgttcatgtcttggagttccggcaacccatcatgatcatccatgctgaggacgatgtcgtggtgccgtttaatctgggctatcgtctgtataggatcgcattggatggcagaagtcgaacctcgggacctgtggagttccatcgctttggggcgagccgaaagtatggacacaaatacctctgccgagcaccggaattgccgggactgatccaaaagtttgtggagaactaccgtgacgccgtatactaggtgcgatcaactggatattaatttatgtattagacgaatattctaatttagttttttaccgcaatcaaactgacacgttccaaattttccgccctgtacaagcaaattaaagcagtcgaggaacccggacaa

SEQ ID NO: 37269 - protein, 36 aa, DROSOPHILA
MSASLSADLLPDLRGPTVDLSVFRNVPAWHPISDIY

SEQ ID NO: 37270 - DNA, 22319 bp, DROSOPHILA
tgatccacctttttttccgatttgcttggcctgctatctttcaataatttcgctatttagtcttagtcgtatatggaagttgaattggtacgcatatgttcaggagcggcattttgcgccgagtctggggggagtgtacattatttatgggcgttcctttatatatttataagtattattaatatgtataatacgcagcagtcgattgttaatttagctttctaatttcgctgtatagatcgtatagatcgctggatcgcagtaattattcgtgtgacactaatgctaagttgctcgagctaactctgagtcctgaacaccacgctcaattccgctttgaactgttttttttttttgtttgtttgtttatgtttctgatttgctgaagacttgctggttcttaaattgagtcgtatgagatcgtgtgcttaggaaaatgttgtggttttgttgtaggaaatgcgtggagtttttccattttttcaggagctttgatggatgacgtttgtggaattgttttcatttcgtttttgagtcgtaatactagttccctttaggttagtttaatgagtagtccatatatattaaaccacatatatatatatatatatatatgcatgtttttgtggctgtgtatagagagatacgttctatgtataattacaaacgttgttcattttgattttgttgttttttggtacgaaacaatagataaatcccggcgagcataacaaactaaaaggtagaggtggggtagtatggagaacaaacgaaaaaagggggggatgattacgatataccgaagattgcaagcaattctcttgttctcacactaaaattggcttatagacttatgcaaaataatgtacaacagagttagttacataacttatagatgtcggtaagcagttcttcccattaaaatataattactttgactaaatttctcctcatcgtctgcatctttgtgtgtgtgtgtgtgtgtgtttgttttttttttgttagcctagatgtttgtgttaacctagagcaaatgcatcataaatatgcgtatttatgcctatgcacatgccatcacctcgtcgatcgatcgtcaacattctggcaatgttgcgagcttcgatcatcgaatatgtcgcgaatgccttaaattacacgcccggctccttgtcctctccagtctcatgattctgatcctgatcttcgtcccattagtcccattgagttggatagagcctggtacacattcgcgtttatcgtgacagcattttgatctatctgcgattaaactccgatttgatagctgcaaggatagttggaaaatccgtgtcaattgaaaattttcctatgcctatactataccacgtaccatctattatctcgttcttgactttctgaatctccaatcgcatttcgcgcacaatctcagccttcagtgtgtccaagtcgccattggaaagcgccagcgacaggccatcgccattgacctgctttagggataaaaggttacagaactctaacgtgaccatgatcttggtatcacccaccttgagaatggtctcttcgctggcactaccgaatcgtttgcgcatgggtcgcggggactcgccgccactgttcgttgtgttgctaccagcaccgcccgagttaccattcgctccttcatggccacttccagcagatccgctgccagctccgccgcttagcttatggggcagtgtattggacttttcccaggggcgttttttcacttcggcttcaggatcgggctgcaatatgccaacgaattaagatattgattatggaataagttaaacaaagttgacttacatccttcttttctgcttgggcgcgtcgtcgtgccagcgtcttggccatctcgtccatcatggaggccatgccattagagcttcgtcctatggttccatagttgccgctgccgccactggacgtgctgctgccgctattctccggagcagaggtggtgacctaaaaataaaaaataaacggtaatacaatgcttagtcaagttgtataaattaaataaattgatattttaccttattctttttgagcttgatctgctgcagctgggaggccagcgagcccatgagatctgcctggggatcttccttcttaggcgctcctcccaatcccggcggcggaggcggtggtggtggtgcccctggtccgcccggtgctggcggtggtccgccacccattgctggcggtgccggtggagccggcggtggtccaccgcccatggctggcggcggcggtgcgccgttgaacatctgtggcggggctggtggtggtggtcctcctccagcagctccaccaaaactgggtggtggcgggggcggagcaggagccggtgggccacctggaccaccctggctgctcatccggtttagaggcacctgacctggctgctgttgctgtgacggattcattggcggcggcatgggtacctgaccgtacggattctctgcctgctgctggggcggaggtactggtggaccaccgtagcccggacctggcatcgtcggcgcctgaggtgcctgtggatgcgcctgcgggagcatctgctgctggctggcgtacacaacactgttggcgctcgcggagctcggtagatgaccatgacccaccatgtacattccaccgttctggagcggcggctgtggcgcttgcggtggctgctgctgcgcctgctgtgtcgggtattggtgcacagttagattgggattagaattggagagcacgtagtggggttgctgatactgctgttggggtgtgatggtggtggtgtgtcggggttttcaggagattcagattcaggatcaagccaatttgccaatgaaatgaaacagaaataccgcatgaggaaactgggacggggtgaggttatagcatatcgaactcacctgagagggcgcatagcccgcctggaccatttgctgatattgctgttgctgctgctgctgctgaaactgttgctgttgtggctgctgctgcggtgccggcggaatctgtgagttcacctgctgtggcaggccattcgaagtgggtccatttccagtgggtccatagtgggatcctggctgacccatttgctgcgcctgctgctgctgctgctgctgttggggctgtggtgccggtggggcgctgagggaattcctttttgggtgagcaaaggttcggcgtgggatggggatggatcaatgagtgatatgagagatgagacacgagaactcggataaaagtgttggcccctactgctcatgtgtaagtggatagaaattgttcccaacttgcgtaatgcaatcctacaattgtatcctacattacatatcttgcaagaaaatgtatctgcatctgaagactaatgaaatttttgatcttaggattcatttataacaaccacggattttcagctttataatgttcaaagaaaactgatgttccttccgaccaatatgtgctaatgacttattctcataaaattgaatatttcttgaatggttagatcaatcgagtctaagctaatgggtttttccacagcaatgagcatgccgtatccaacacaattaatggaaatggagcctacctgctggtgcgatgatgaccctggggcgtcggcgggctctgggggatgttattctggttggtctgcgaggtgggcgtctgggccgagggcgtgacgtgcccacctatgctgttgttctgacgcagtatggctgcatcctcgctggtcatcgtgcgatagcccatgtcctcctcatagccattgccatttgtgggcggtccacctgggttgttcgccacgcgaccactgagcacctgagaaagacattcaaatgttagcgaatgatacagatattggttgtgaaagagatatacttacttccagggcatgcatcatggccctagcaaagttctccgcatcattttggctcgagaagttcaagccgtaaacgaatttcgaatcgcgccactgatgaaatgttgccgtggcctgattgtacttcagtcccttcagaatggagcagttgatgaccacctcgtgatcctgcagctttcgtcccaccacacggaacgtgttgttctgctggtggtggtagatctgcaccttgctcaatcccgacgagctgcccgatggcacccacttcttctggttgtcatcgtacaccatcacagaggcccgcgccccgataatactctgctcactgcaagaaataagtgtgaatattatggttagttggctgacttaaatggtatggaatggaaccttgaatgtgtatggaaatgatgaggacttaacacacttcaagaagttcgagctgaaaatttattatagggaatagcccttgccttgagaagaaaagatatgaaaatgtgcgagaaacatatatgtatgtacaaaaattccattttatgatgttaactcttttaaagtcttaaaagatcgtgggaaacgaaacggaagttgtgctaacaaattagtcaaatttggcaactttattatttgcactaaacgagttcaataaaagagatacaaatttattgatggctttcgtgggattggaagtaaaaagtatatattgttctatggaaagcttctacatatattcatagaaatcgattttccgtcataataaaaaaaacttcttagactcgattaagacttcccagaaagaatgtcgcaatgagcagtcgttttcagatcattagatcggctctacaatttgccccttgaagaactcattcaactgcactttactgcaccgtgatcttccagacttttcacacgcctcaagtgagcaagggctttgatctatgtataccctcgactcccctctaatcccatcggtttcaggacaggaagtgcaatgcatttctttgtatgcccgcacacctgtcatccagccagatgatcgtctcgagtcgcacggaccgattaaatgattctaatgaaagttctaatatgaacgtgtatatgctgcattcaacctttagcattttctccccccgggacactcagttgagttgacaattaaagtcagccagtgaagtaaacatggccagcgacaaatgaacgccttcattggaaaaatgcaaaggcgatgacgagttgccttgccttttgctcaacttggctatgtggtgttctttctatcctatagctccgttctttttttttttctttttttctctgcccctttttttgtttttgctagcctgcaccgctccaagttgcctgagcagctccaagttgctccaagttgctccgagttgtgtgttactgggggacacatagagataatgacggagagcagccgccaaacgagtcgagtcggcagtattctcgctacagacttggcccggccaaaagccgcaagtagttttgcacttaaatggagtgcgcagatcggcggtacggacggctggacagacggacgaatctcaatccgaatccgagtcgcactctggcggctggcacagctgtgcgccgtttcagggccttatataaccaccgacagtttggagctaagtcttatgagcctgtccgctttgatttgcatcgaaattcgtggcaacgaaagtgaagttttttttttctgcacactatgagaaactgcgaaacaatagcggtcaatcagtttttttaaatttctgttttttacaatcgaatcgatttatatctcataaattggatactacatattcgaaaataattataggaagtcggagtgagcaaaagaattgcttttgtaaaagtgttgtactcttttaaacaattttaatgcaactaaaattatttcagtagttcgcagcagcaaagtagttgggattagtaatgcattttgtgactaacattcagtgcataaatgctttcattcgattttacacgtaataagtgcctattaaacgtgccaattccgagatttaagctacaatcatagaactgtacgactgttttaattacattagattgtaaagaaatggaaatgagttcatgaatcgtaaaatcgacacatgtgatacatagtattttaatcgttaaagaaagcaattaaatatttcagtaaaaactaacatcttaatcgtttttttgcgctgtgcagctgagtggaaaacccaaatgaaaatcgaaaagtgccccgcaaatggccagttaaatgggatgctaatataattgagccactggaaaatcgctttgggagcattttcaatatgtggcaggtgaaattttctatgccttggggatttattcgtgcgttaagcttaagtttttaaactgcagccgagtgcaagatgcagattcgtgtgcacacgatagcgttttccagcttaattggcgttaaattataattatgattaaaccggagagtacgacggcggctgctctgtgggggttaagagttctttgatttacgaacgatctcaccaagctgtaaaacgcattcaaaagtccagggccaagtactacgtgctgagattgaagaagtatagtagagaaaagtggggaaatatgggaattattacagaacccaaccaaggacagacgcatagggaagtgggttacacatacgcaaaaatcgttgtaatgcccccaatgaatttatctttgaccgaattatggcgacgttgtaatgtgtagtgttgtttctgctgttgttgtcggatcagataatgatgtatgttgctatagagatgttgcttgtgttgctgctgtgcctgctgttgttgctgctgtgtcgatagtgttgctgttgctgcatttgctgctgcggctgtggctgctgttgccgttgtcgttctaattgaaaacgacatggaacagcccagtttggagggttgagtttttgagggttggttcggattcaccgagggattcgagggcgaaacgcatttgcgcaaagtggaaaagatcagagatgaagaggaggatggcgatggggatgaagttagggtagatgagctggctatagatgtggctgcagcacttgatgatgaatctctttgcgctgccgttggtacatacaacatctgatcctgctgctgctgagatctctgtggtgcctcatagatgggtcctgcctttggactagtagccttgggtaactgcagcaccaactgctcgtgctcatggtagcgctgcctcagctcctgctgctgataatgatggtacatgggatgacgatagtccagcaaatccagctcctgcagctcctcaatgctgtagtactccgacttggagcccaggccgccgactggaggcgacatcttgtggtgcatactttggctgcggcgtatcattagctcaccggagtgaccaggtgccaccacctggaactcgcaaatgccattgcccggctgctgatgctgttgctggtggtaggccaatatcggagtggaattggcggcactcgatggcttcttgctggtgaacgaggtcttcgcgtagagcttcttcatggccattaaccgttggccaatatttgcagaggcgtcacagacactaaacagatcccacgatcgatcccacacttaagcacactatgaaaccgaacgatcggatcggatcggatgtatcgtatttatgtttgcctaggctcttggatcttggctattcgctctctgcccactggtcactgatcagagatcaccgatcaccattcgtcgttccaagatctcagctgcacacgtctgaacgcactcaagacccgctggagactaaagccaagatccagaccgagatcgcgactgggtctcagagaccgaaacggtctctcagtcgaggccaagacaaacaaaagccgagaaaaaaaatatatctaaaggcgaatgagcagaaaagacgtgagcgagaaactgagtatcggctcacaatctgtatttttctctcattttagcggctgctgcgctttgaattcgtctaaaaggcaaataattacacttcaaagtcaataaaataatgagaaatgatgagatgtgctatggatgttgagctggattgaccccgagctgggaaccgagcataatggccaggtagatggagagaccacaacctgactcacagtcgcttcagacgattcccaaatggcatgacaattaaaagacgtgagggcaagtagtctgcatagaacctattgagaaaaaacgttctcgttttacacgattttcgttgagggaaggatgtaagattcagattattgaaaggcgattttattttaatactcaaaagtttatattttgagaagttttcaggcactgaaacagagtttcaagcagtttccctaaaatatgcaatatcttcagagagctacaatgatacaatgaattgtagggcatacccttacaacttttcgcctagctatgaaattgcgcaagttccatctcaaatttcttatgcagtttcgaagggtatgcgataagctctcgaatcttacaaagttgcgcccgaggcttttttctgccggcaatcttgaagcctcgccgacgtctcgtgaccgtcgtttaaccagttggtcagtctgtccatccgccagttagtcattcggtcagtgtttgtgattcagtaagttggttccgtccgtcagtgcgataattacttaagaaacgagctcaataatttatatttccccctcgagtgactattacaagtatttttccctcgctcgctgcgtttttgtttccttcatttcaactgttctttggcggcgaaaagcggcgacggcggcgggaaatggggggggggaggtacctggaggcacagcttgtagcatgttatgaaaaattcatatacaacattgtctatctcaacttggagcactcagctctcagagatctgagcctctgtttctgactcgctggcttatgtttcagtctgattcggttttttgccccacaacaattcctaaacgttatttccaattaacattattgtggcccattgtaagtggttgtgtagtggctgttggtggttcaccgatctctgatttgagccaaccgattaccggctagctttaatggctctgtcagaatggttcagttcgttttttttttttaccatttttgttttgtttttttttttttttggaccagagcgtgtgccgcggcttaaatgatttggcaactaaatatttctaaggggcactacgaatgcgagtactggagtaatccatatggctgtccataaagacccgcaggcagacatcggactggaaaaaaaaaaatcataaaaacaaacagggcccacacatgtgagcagcggagtcacaaagtaggttgccaggcagtcaggagactcaaaacagtttgcccatggcaaacatcaagaagtgctgggggacaagtgggggtctcaatcaatatcgaatatcactgcgcgatgaactcgtcacgggaggagcgcttcctgccgtgcctgcactgcgagaaaatccgtgctcagttagtttcaacatttatgttgatcttataaggtgttgcaaaccacaaattcagaaaggaaactgtaaacgaatttgtttatgatggtaaaaatttaatctaaaatacattcattcacattttttgtacaccaacttttttcttaacttataagtaccgaccaaagcctggatttgggtcacattgcagcacctcatcgcagaccttccattccactggcacaggtgacgacgatatgttgggatccattcagcttatggataccgacttcaatcaagctcgtagccaaaaggattaacgttgaacgttccgacgaaccactcatatttacttatttacatatatccacattcgtggtgacttaaactcaaacacaaataagaccgggtaaactcagaactcgtttcattttgtaccggtaaacataagaacttttcttggaggatttttcatttttttttcgaaaacggttctttcaccgaaattcgatttgattaatgcacacgataagccggcaattatggtactgcaattagggagcacttcactgatcgaaatagacgcatttaataaacaggcgccagatgcatctgctcctcacctattcggtagacttccatcgagcggctccgtgggacagatgttacccattgagcggcggaatttcaactgggatattcagcgaactggacaaattcaggggaaaagctgcgcacaaattaagtttaaagcactcgctggctaagctgaccggatttccttggagacaacattttaatgatgacacacccaaaaaaaaaaaataaggcagaaaaactaaataaacgcaaacttgcaacgtttttgcttattcacaattcatttatcgtaagggtatggtggttctaccagcttttcagcaagcaagcaaactccccaaatgggaagccgcaccccgcttttagaccaaacaaattatggggattaataagcgagcagctagctgctccacttttcgaaaattaaccgccccccatccccaaggaactgggtttgggttagccataaattctggcaaatgagcttccaaaaaggtcgacccataaattttgcaggcatcaatttttaaggtgtcaagtaaacaaaattatgccgaaggccagggaattacaactaaattgaataaaagcataaaatcgtcgtttgattattgaaaaaaaaaacaacctataatatatgcatgtacaattctgccaaaaagttaaacccacaaatgtcatagacaatcacttttaaggtggcaatcacactttcagtaaatgcgaagagcatatgtgaattgaactcaatttgaatgaaagtcagaaattgtcgtttgtctaattgaaatgtccttcacaagcgattgacaacataacttgtatctggcagatacgtaagtaagtgagtgagtgttgtatctattcattgtcaaatgttctggtcgtgtaaacttacgtcattgcaatttggtttccgttgttttcctagctgctgccttcagctttcacgtttctcttcggttctctgctgtggaggaaaattcgcttccagtgtttgggcttttcaagggtatgagatctgcaagaccggaaaagaagaagatacagatacagatatagatacgattacggttacagctcgtaaatcaagtgcaggcacacgtgtatcccacagataccacttcttttggtgggaaaatcaatgcgaatattccccccccccctttccttaagagcacaagtttgccaatttcctccatccaacgagtgccgtttgcaaaagtagttgtatccccttttttccacttatcgcgctccattggtaaccaatcgagtcgtccatccttttttctgaccgaacagccatgaattgatattggccacatcgtttatgcggcattcgcgtaatgaggcaattgctttggaagcagccaaaaaaaaaagtgtatgaaaaatgtgaggtcaacgcacttggactcaaaatgtagggaacttagttgttccgcaaaatatctcccgtggataaatcgatatctgggaaccttgaaaacagcaacgtttatagaacccatcaattaaccatcgacggtagtgaaagctggtctgatgaattaataacccgcgcagaacaatcaactcggtattagaaccgaactgaaacgaattgcttgactttttctttccatctatctttccattattttggtcattgacaaaagacactagtcataatgaaagccgcaataaacaaaagtaaaatgaaacgaggcatttgcattttagagagacggataaaaaatcaggtcagcgctttaaagaagatctgggccgcccctcgctgccacgccccccgcggcaacatcttgggccaagaattttgacctagttttccccacaacattcccattccgctctgccaagctctgccccctgaaaaccccaccgcttacgtcatagaattccgcctggaaaaaccttaattcaaaagcacgcacttgtagtttcaatttttttttgtacccggaaatgttgttgcaacatagctgcagtaaaaataaaataaataaataaaagctgtgggagttgggtgacttttttaattggaaaatgttgaagttacccccgtgttgatgggccaacattttaccagttaattttcgcatattccaaaacaaaagaaagccattgaagggcaacttcaaggtgtgggcggcattgtgggtggtaggcgcatatgtgccgcttccccctgccaaaaaaaaagcacacaccaccgaaaattaagcccctgggcaattatccagaataaaaacctgaacaaaataaaacaaacagagagcatgggagagccagaaatgaagaacaagtgaaatatttggcactcggcaggcaaaaagggaggataaggaaatacaacaaaatatttggggtaagggtggttttggactcgtctggtttgggacagcaacccccggccaagagtttgcacactttagaatggctctctgtttcagcagggaggaagttctctaagggatcagagttcatacacggtttaaatttcgatgtttaacccggtttcaagggtgactagcgcctatctcggttgaccagctcaattgcttaccaaaacaaatgcaaagaacaataatatttagtcttagtaatagaacaagaatacgatttaagtcactctttatctaaacacttttttattttaagacaccatttattttaaagcgtttttcctggaattttcaccactcccgatgatgtcagtgggttaggagttgactcatttccctcctcgcgtgatattaacaatttgtcagcccgaacgaaaccactctagtgtcctattcacagaaagaaccattgagtccttccccagaaaccctatatgctcccttgactcctcctttcctgcaatttacttcacctactacacagtaactaaaaaatacagtttaggcattttttagaatttttaaaacgaattttacacaagtgatacacactttactattagttattagaatgatttatataatattttataattattgtgttgcttttttaaggtttcaaattggctttttggctcagtgcctccattcatttttcacttgcagctcataaaagtcgcaacgaatcctcattaagtccggctaacttttcctgcccccaaaactacccctttcatttgtcttcatgccactcgctttatgcggtaatttcagttgtctcctctgctgctgttttttttttattttcagccccaaggggagtgtttcggagttggagctggtaactggttttggggccaggctttgtctgcttttttttccactcatttgtggaactcccgagtagggacttttggccgcggggttttgggacctgtgcgcactcacgtgttggccaaaatggaattactgcacaattttaatgcttatttgggtcgcacttcggtacttgtgatcttgcccgctgaaagatctaattgatcgatttgcgaaaggagctggcgataatcgatggatgctttgggatggattgcttcgcagaagaatgagacctatagtttaggaaacaactgtgtcttcccgttgacctgaattcccaggcatatcaaaaaacatggctagccaaccggcaagtcatcattatcatcatgagcttcttcttcagcgtgtcttggcttcttgattttctgtgtgtggttcgcctttggcagtagctgcaaattaaaaacatatctacaagttattaattttgccaaagatgttgcaagttttttcccttttgttttaggtaatcacttttgtgggtcagtgactttcgattgtgggcgtggctgtcgtctaggaattaaccctgtacagccgacagtctttgctacttaaatcgtagatcgatcttcgctctgattcgtggcgaaaaatcgaggagtggaactggcatatttggaaaaacattcaagttgttttttcggtcggcgttttgcttcaaagcgtaaagttaatggagcgcggcaaatcattttttgtttttcttgtcagcgataattattgaataatgattcaattgtctgttgttgtcggtgttgttgaggaatttatgttctcccagctgataaaaaaaaggccagagaatcattttccactacaaaaggggaagtctattaaattattacactgtcactggcacaatggagagtgtggtgcccacaaattctgtgacaatgcagcaccgcccccaccacccgccttccagcactggcttttccacaatccgctggcggtgcacaaagttcaagtggggagcatcataaaaatatcataatcataatataatctaaagggaaacgagtgagtaagaatagtttagtaaaccgaagatgaaataccctcgcattaaggaaaaatatttggaaaagcattagttaaaagagcaaagtagaattatccgacaatcaatgtccttaatcattcaccaagttaaatttgatatttatatcatagaaatataacaatatttataaactatcttaaaattaagctacagaattcccatcatagttaaacttcctttaaagggtacaataaaatccagaaatgtgggagggcaaagggaggagcaatgtgtaaaaaaaaagcagagaaaaagggtggggaaaagtcactgcaattgagcgagaaataacaatagaagcgggacgggaaggcagccaacaagagttcaagttacaaattgtgcaggaagataggcatgtgtgaaggggcaaaaacgagacggatggatcacgggagtaagcgagatagacgaatgcaacgccacctgtgggccattcccgcaaaccgctcaagaagcatcttaaaaactgcaaccaaggcaaaaaaaaaacagcgtacgaatttgaagtttaggtggaagcttttagttgaaaacaagaaaacgaaagaaatcccggcacctagccctaaaatcccacccacttttcacttcccggcgatggtgtttttgttgttggcattttatatttcccgttttcgttgttttgccgacgctggaaacttcagacttgaagaacgagagaccggaagcacttcaagtgcttgcaattccattgaacaaagtgcgggggctataaaaaggggatcaaaaggggtaaatgtgtggtgggttaaaaaaaaaaaccgggattgactttgcaatcaacttcgcctgcaactttgacgcgatttgaattcggtttccatcatcataccagattggtgaaaaaagcaatgggcatatcagccctgctataattatgttccaccaaaagtattttttaggaatcacttttggcagagatttacacatatatttagtagcctccaactcgggacaaacatacaacttatgtatatatttattgaggatttatcagcggagcacttcccgttttcaagtcgagagggaagcattcgcatttgaagataacgcgtttatctgaaatatttctggggccttcgcttttgtcaatgattgaagatggaggatcttgcaacatgaaaactcccacaacagaattcaattatttttttggtgttccaagaattcttgatatacccaatattttttttgcgcactttgctttgctccgcacattttcatgatcaattttcacatcgttatttaccttgaaacggaaaacaaaaagttttcttgctttgctgctttttttttgtactctttcccagaagcgcgtccaaaaataaacttcttgtttatggttcgaaatgttatggtttttggccaaatacggttaataccgagaaagcctacttcaaaacccactccccatatctaagtttaaagaaatgtaaattgtaaattagccgcagacaacataatttcgttttaattaatctgcaactcatagaaattacatggctcgcatatctgaagcactgcatctgtaaagggggataaataagcagacatattcatatatgaccatatatagtatatacagctagccaagcgttagagcgtgaagtagtgtagtcggaccagaagacgagctcatgaagatggggaacccatgaaactgtgggctaggtccatgtattccacggcttttcatcttctttgccgcttgccgttttctgtttgttgtggcaaaatatctaggccgtaaaaaatggttaaacgccagagcaattaccaggccaaacagcttgaggagaacgtggctaagtacgaagtgcgatgcccatggccaactacagtggaggtcttattaaatgtacaaacatatatatcttcaggacaggagaagagaacttctctggcaactcacatttcatggcttacatttttctggcatatgtatgttgtatacctaaatgcaacagaagaatccgaaagacaatgaaagcttccacttaagcgaaatttcatttctgaattttccgcttatctgtgcagtttgcgctccggttatatctgcaatttatgccatatataggctctcgtatttatcatatatacacatttgtgttttatgcatacgcaaacagggcacatttgtatgagaatgttcaagtttaatccgagttggctgacgcttttcagcgctgcgattgcaacaagctttagagagaattaagtttttgataagatgatagaatattggctaccccttagctgggtgtgtacattattctacaatctgaaggtttattaaatcacattattgtttttttttttgtggtctagttaaaatgtgtgcttaaacaatcttgctaacaaatatgtactcttgctaaataaatagcgatgataatgaatttaagctttataaacattcctatctcaaaaagcgtcatgtgctcttatgtgtttttcacttacagggtatcatcgtttccaaagtaaagatctcaaagtacatagctgcattactttcgagttttctgcgatgacagctgtctcttgttgtctggatcgctaattccctccattaactattacttaattgccgcttgacacgacgcctaagctgcatgcccccatttccccgcgctttcccatgactggagataaaagtacaatcaagataagattgttttatctgcataactcattttttgtgagtcatatgcaaaatattatagtttcagcaatatccaatccaatcaaatcagatcaaatcatttcctgaatttgcgcagaacattgtgaagaggcgaaacagacacacaaatccagagatataaacaaaaacaattgattgaatcaacaagccgccaagtgaaagatattaattagtcagcgtggcatgggggcacataaaggggtatcccctaatgagaaaacccaaacacgttccacacatccgattccgattgccggtctccgtttctgtggatcatgaattatgcagccggcgtttaataaatatatttaatgcatcgggagaaacaaaaacaatgtaacattcatttagaaagaaaggaatctgaagatttaatcagattctcatatcttctatcatgttacatatatcatacaaaatatactaaagtattagcaaagtaaaataatactaatatctcagtataaaattttcattgctgtacattcataaatccaaaaacgtatttattacaacacaaatttttctctgtgtacaattgacttattgagaaatggccatgcacttgctggctagagttgctgaggttccatggagttttagttatagagtcattagacaaaagatctgtgtcacgagccatttccttggccaagtggaaggaagctagcggttaagcagcagaaaaagaatcgggcagatgaaaaaacatgtctcaagattccgattcctaggctcttcatgttggtcccgcatctccataactcacacacagattcagattccgatgcgaactgaattgaaacggattggttgggattggatgactcgagtcgagtgcggagtgtgggaggaaatgtctgtggatggggatgtggaagtggacaacaggccttggcagcaacaacaatgcggaaatgttaattggatttgttgtggcatccatgtgggtggctcaccatagacatctctttcagagttcaggggtcaatgcatcgacaaccatatcagcctctccgcttcgctctttgtcttccgcttgagcccaaagctgaatgatacgacacccgaggttactcacagaaacgaaaagttgacgcggccagttgatgattcagattcaaaggtattttgttcgctttagtttatttccgatgcatccgccttaaatacctggaactttttgcgtaaaacccagcgttccaaacatttagtcatcgtaaaaatgccaaaaaaaaaaataaaatgccaacagcaagggaatgtaaacaagggaagaagtgctatctctctatttcacttaaaatacagtaaagcttcgacaactaaaacaaggcatggtaactttaatcaagaaattcagcatagaagatacaacaaaattaaaaaaaaaaactagttcaaggagttgccacagtaaatggtccatcttagagacgtttgactgtaattcattttaaagctgataaaatggaaatggggcaagcaaaaataaaacaaaaacaactacaaatgggggagcatgttgtctgtttgttattaaccaaaaagcgaatcgtaaagcgaggacatgtgtgttttggttttgttttccgcttcattcgacggggtttacttaagttttttatcttatctagtagcagctggaaaactgggctaacggtgttcaaataactgtgtcgtcacaccctctttctctctcgctctctctttctctttctttctatcgcaacacctttcccgttctaatgcaacaattacgaaatccgcgttgcatgcggccatgtgttttcaaatcggttttgcccaagggaaacccaaagaagcggggagaagcataacaaagagtaggccaagaaagaggtaggaataaatggtaggtagcaagctgaatgcaaatttctggaactgaaatggaacttcccctacttccattatcatatggcgcttcgagatatggtaatcttataacattgcatagaaaagcgtaaaattcaaatgagaaaaactatacaggtttttataataatactatgtaaactctttcgttgaaaatcttctttattagaagcttagagatttgctgttaaatgaaaaatattcaacacttgattatattaaggcagatttgtttcgaagttataaaactaaactaaagtttggattgctaagtagtcaacgacaaatggttttcataataacccaccttgatgttgagtaagttacaagttggggttttaattgaattgcttgccctgaaacgctgattttcggcccatttgcgaacgggtttcttcggtttgagccctatgagtgtgtggcattgtgtttgtttgtgtcgggtctttggcccgcttcatttggcaggcgagcgtaaaagccgaaaaatgagtcatgacaaagttggctgccatttcagggctaaaggagttttgcagtcttggttggttagtagttgctgttgttgttgcagttgctggctgctggtgcattgacatttgaatgtttgctggctaaacggggtggggggaatggggcagagcttgaagtagaagtggaaacggcgactggagagctgtggcataaattaaagttcaaacaaacacgaagaagaggaggaaaatcgaggctgccccacccgcacaatctgcgcatctctctctctctctttttttgggagctcgctctctccgcgcccctcgctctttccttgtgctccttttcatttggcaggtttttgtttgttttgcggcgaaagaagcccgggaagaagaagaagaggcagtgcagttgcagccaaaacaagaggaataacaacaacaaaggaaggggagagcgagagaggggagctaaataagtaattaaagcagagtcgaaaaggaatagctgccccgtttcttcttcttggaacacaaaaaaaattaaattagtactagtaaaagctgtgactttttaataaagaattggcccaccactacaagaacttgttttaaaatacccataatatatgatattctttataaaattttattttcataaaatacaaaaggatcccttaaaactttactccacacccgcccctgtacaaatcgaaaacaggttttgggtgcagacaaaaagcaaagaagaagagaagagcagtagcgacagctgtttttaaagggcccacacttaatttgcgcaaatctaagcgaatttaaatgttggcgaaactatctaaaaactgccctcgcacacacacactcgcacgcacgccgagggaaaagggagaggtgcgcaaaaaagggcgtgtttgtataggaagaagaagcagcagttaaagaagaaggcagcaggaggaaattggcaaacagaaagggggcttttgaagatgaaacagcagcacatatcattataatggaaagcatataagatcgaaaaaaaatcaagtgcatttcctggattaaaaataaattcttgcagaaaagcaacaaaaacttaccacaacattttggttgattccgtttccacagcgaaaatgcgtttgtattggtgtgcggcgtctgcttcgctgctgctgcttcttcttcagcttcccacaaagagagagggagcgagaaagagagcgattgattgcaattttcacgtctctggcggtttagaaaataattgtgatttagatttttaattaaaatgcttgacttcttttcgggtttttgattgcacacacaccacacgcaaaccaaaacaaacacagttatgagcgtgagttagcgggagagagagagagagtgagagtgaaagagagcgggcgggcgggggagaggaggaagcgaaaaactccttttcaaggagtagacaccaatttttctcggctctctctgtcgacgcgaaaatagagtttcaacttgggcgattgctcgattttttgttaataacagtacaccagcacacacatacacacacttttcgcgagccgaggatgttctattcgatgagctcctttttacccaaaaactatgcgatctttacttgttttcgtgcttttttgtttgcgattactattaactcaatccaatcactcacaactaatcgctggcgtttggcggtgtcatttccgcgacagcaccaaacaaatcaaaggaaaggcggcgtttttcccggaaaaaacagtccgtgtccgctttgcgttccgtttcgattcgtttttcgcgacagtgtgcccagatggtggtatactatttacgttgaacgctcgtgaccatccgtgaattctctcaaaaatcttgtttccccaaaataccatcgtgagtcatagacaagtctgggcacacttaagaacgttttgaatctttttattttgatttaaatgtatattcagattcataaattgaattctaatggaatatttagtacgcaattttaatttttttaattcgattttacagtccacttatcgatataatttatgttttctcattaataataaatagccgcgacataaaccctttattttgtgaatcttagattctgaaatcaattcaatgattcaaaattttgtatattcaaatacatggttttacaaaatatcctgtttacaagatcaaattgtttattttgaaagtaaacttaagttcttaaatctgcattggatatcatatcgttgggaattttattcaattgttacgacttatatatcttacaaatgacaacatctacttatttaattatagtaatagaggatttatcccagcatgtcacaaatatctattttaagacaaatgtttgacccagaactgaaatgcaaaactcaaaacattgtccgggttcctcgactgctttaatttgcttgtacagggcggaaaatttggaacgtgtcagtttgattgcggtaaaaaactaaattagaatattcgtctaatacataaattaatatccagttgatcgcacctagtatacggcgtcacggtagttctccacaaacttttggatcagtcccggcaattccggtgctcggcagaggtatttgtgtccatactttcggctcgccccaaagcgatggaactccacaggtcccgaggttcgacttctgccatccaatgcgatcctatacagacgatagcccagattaaacggcaccacgacatcgtcctcagcatggatgatcatgatgggttgccggaactccaagacatgaacatccgactcaaatc

SEQ ID NO: 37271 - DNA, 2722 bp, DROSOPHILA
gcgaaaaacgaatcgaaacggaacgcaaagcggacacggactgttttttccgggaaaaacgccgcctttcctttgatttgtttggtgctgtcgcggaaatgacaccgccaaacgccagcgattagttagacgtgaaaattgcaatcaatcgctctctttctcgctccctctctctttgtgggaagctgaagaagaagcagcagcagcgaagcagacgccgcacaccaatacaaacgcattttcgctgtggaaacggaatcaaccaaaatgttgtgatctcatacccttgaaaagcccaaacactggaagcgaattttcctccacagcagagaaccgaagagaaacgtgaaagctgaaggcagcagctaggaaaacaacggaaaccaaattgcaatgactgagcagagtattatcggggcgcgggcctctgtgatggtgtacgatgacaaccagaagaagtgggtgccatcgggcagctcgtcgggattgagcaaggtgcagatctaccaccaccagcagaacaacacgttccgtgtggtgggacgaaagctgcaggatcacgaggtggtcatcaactgctccattctgaagggactgaagtacaatcaggccacggcaacatttcatcagtggcgcgattcgaaattcgtttacggcttgaacttctcgagccaaaatgatgcggagaactttgctagggccatgatgcatgccctggaagtgctcagtggtcgcgtggcgaacaacccaggtggaccgcccacaaatggcaatggctatgaggaggacatgggctatcgcacgatgaccagcgaggatgcagccatactgcgtcagaacaacagcataggtgggcacgtcacgccctcggcccagacgcccacctcgcagaccaaccagaataacatcccccagagcccgccgacgccccagggtcatcatcgcaccagcagcgccccaccggcaccacagccccaacagcagcagcagcagcagcaggcgcagcaaatgggtcagccaggatcccactatggacccactggaaatggacccacttcgaatggcctgccacagcaggtgaactcacagattccgccggcaccgcagcagcagccacaacagcaacagtttcagcagcagcagcagcaacagcaatatcagcaaatggtccaggcgggctatgcgccctctcagcagtatcagcaaccccactacgtgctctccaattctaatcccaatctaactgtgcaccaatacccgacacagcaggcgcagcagcagccaccgcaagcgccacagccgccgctccagaacggtggaatgtacatggtgggtcatggtcatctaccgagctccgcgagcgccaacagtgttgtgtacgccagccagcagcagatgctcccgcaggcgcatccacaggcacctcaggcgccgacgatgccaggtccgggctacggtggtccaccagtacctccgccccagcagcaggcagagaatccgtacggtcaggtacccatgccgccgccaatgaatccgtcacagcaacagcagccaggtcaggtgcctctaaaccggatgagcagccagggtggtccaggtggcccaccggctcctgctccgcccccgccaccacccagttttggtggagctgctggaggaggaccaccaccaccagccccgccacagatgttcaacggcgcaccgccgccgccagccatgggcggtggaccaccgccggctccaccggcaccgccagcaatgggtggcggaccaccgccagcaccgggcggaccaggggcaccaccaccaccgcctccgccgccgggattgggaggagcgcctaagaaggaagatccccaggcagatctcatgggctcgctggcctcccagctgcagcagatcaagctcaaaaagaataaggtcaccacctctgctccggagaatagcggcagcagcacgtccagtggcggcagcggcaactatggaaccataggacgaagctctaatggcatggcctccatgatggacgagatggccaagacgctggcacgacgacgcgcccaagcagaaaagaaggatcccgatcctgaagccgaagtgaaaaaacgcccctgggaaaagtccaatacactgccccataagctaagcggcggagctggcagcggatctgctggaagtggccatgaaggagcgaatggtaactcgggcggtgctggtagcaacacaacgaacagtggcggcgagtccccgcgacccatgcgcaaacgattcggtagtgccagcgaagagaccattctcaaggtcaatggcgatggcctgtcgctggcgctttccaatggcgacttggacacactgaaggctgagattgtgcgcgaaatgcgattggagattcagaaagtcaagaacgagataatagatgctatcaaatcggagtttaatcgcagatagatcaaaatgctgtcacgataaacgcgaatgtgtaccaggctctatccaactcaatgggactaatgggacgaagatcaggatcagaatcatgagactggagaggacaaggagccgggcgtgtaatttaaggcattcgcgacatattcgatgatcgaagctcgcaacattgccagaatgttgacgatcgatcgacgaggtgatggcatgtgcataggcataaatacgcatatttatgatgcatttgctctaggttaacacaaacatctaggctaac

SEQ ID NO: 37272 - protein, 671 aa, DROSOPHILA
MVYDDNQKKWVPSGSSSGLSKVQIYHHQQNNTFRVVGRKLQDHEVVINCSILKGLKYNQATATFHQWRDSKFVYGLNFSSQNDAENFARAMMHALEVLSGRVANNPGGPPTNGNGYEEDMGYRTMTSEDAAILRQNNSIGGHVTPSAQTPTSQTNQNNIPQSPPTPQGHHRTSSAPPAPQPQQQQQQQQAQQMGQPGSHYGPTGNGPTSNGLPQQVNSQIPPAPQQQPQQQQFQQQQQQQQYQQMVQAGYAPSQQYQQPHYVLSNSNPNLTVHQYPTQQAQQQPPQAPQPPLQNGGMYMVGHGHLPSSASANSVVYASQQQMLPQAHPQAPQAPTMPGPGYGGPPVPPPQQQAENPYGQVPMPPPMNPSQQQQPGQVPLNRMSSQGGPGGPPAPAPPPPPPSFGGAAGGGPPPPAPPQMFNGAPPPPAMGGGPPPAPPAPPAMGGGPPPAPGGPGAPPPPPPPPGLGGAPKKEDPQADLMGSLASQLQQIKLKKNKVTTSAPENSGSSTSSGGSGNYGTIGRSSNGMASMMDEMAKTLARRRAQAEKKDPDPEAEVKKRPWEKSNTLPHKLSGGAGSGSAGSGHEGANGNSGGAGSNTTNSGGESPRPMRKRFGSASEETILKVNGDGLSLALSNGDLDTLKAEIVREMRLEIQKVKNEIIDAIKSEFNRR

SEQ ID NO: 37273 - DNA, 7447 bp, DROSOPHILA
gcgtcaacattttgaatagaactgagcaaaacaagctgatagcacaaacagcgtcagcaaaagggaaatattaatagcacaccgcgaaaaacactatcgatcagtaataagtggatatccaaaataattatgcaaacttgagtgctgagattgaaatatatttttgggagataacaatatttaggttatagattaaagccagacaaaaatcaatacaagttagatgataaaatgtcaaattcggtctggcattttatgtgccataaaatttcagaatgatttaatatttttatacatttaaaaattttaaaatattgaaactaacttaacaattaattttattataaaatactacgtactacttgtttaaattcaatttgataagcaatcattcaagcacgattttaaaagtgtggcggattttcccagctccaatcgagataaggatcctagggtcaaggggccggcttacagtgggttggcagcttgtaaaaaccctgtgaaagagttcgcccgattgaaatgattaattaattgctggaatcgaggtaaactgagcgcgtccagacgagcatcatttatcacggtgtggtcttaatacgaacgccagaccggcttcacttgggcaaatgggaaatatagaggggaattgtgttattttagggcgggcacacattatgatttcgtctacagcttttatttcttgttttccatagacttttccaccattgtttgccattcatctctgactctccattgactctcgcaccgccctatgttttgcagtttacgtgttaagtgcttggcaagcacgattaaggcgctttatcacccgcaacaacggcagcaacacgaacgacaagcacgccagcaacagcagcagcagcagcagaagcagcagcaacagcagcaacaccagcaacagcaacagctgcgacggcagcaacatcaaaagcagcagcagcagcagaatcagcagcaagccatccggctgtagtcacatacattgacacgcccccaacccagattcatatatagtcgtacatacatacagaaatatatagccggatatacatatacatatatacaagcgagatgctgaaaactgtgacaacagcaatggctgccggcgatgacgatgtcccagcgagcattttggaaatagaactgccagccattttgctcaacgagagcctcttcatcgagctgaatggcaatctcacccagctggtggacacgactagcaatctcagccaaatcgtctggaatcgcagcataaacggcaatggaaacagcaacactttcgacctggtcgatgacgaacaagagcgggcggcggtcgagttttggctactagtcaaaatgatcgccatggccgtggtgctgggactcatgatactcgtcaccatcataggcaagtacttaatcaaaaccaaatccaaatttaaattaccaaagcgaaaatgccgtgaggggtggggggtggggtttttggacattaaattatcctcgaatttatgccgtggggatatggctgcgaaaagtttccatatcgccgacaaaaactgaactgtaaatgaagtaaaatttatgatgcagaagatttttattgcgccctcttggaagatttttattgatttttgggcttacagagatgatttgcagccgctcgctctaagaaatgggcctttgaaatacctcgaaagatgggtgtcgggtgctcaggggtggttgattgttttggttggctagatgatgtacgaggagttctttgagttaagcgcgccgcaaagatgcctgcgaaatagggaaggaaaaacgaggaaaagtttccaaaaagtgtttgccgcggcacgtgaaaagctattaaaatggcgccaaggcgtctaatgcaaattacgacaagcacacacactcacacacactttttggcacacgttgtgatggaggtgttaggaggtgatgtttttaacggctagaaatttaaagggtactaaaaacatatcaaaatgatacaagaagtaaaataaaaagcacttagcgtacatattaaaactgttggctatctgtcgtagtcgaccgtagtccgacccgtagtcggtcagtagtcggtgctgtactcagtcccgtagtcggtcccgtacctggtcccgtactccgtcccatactcgaacggggtactggcgtcactgtggctacgctggcaaagaaggggatggatgagatgaggtggtagtgcggcaattacaatttgccaagttgcacgcgcttaatcaaagcaagcaacgacaatgatgatggcgatgatggagcttggagcacccatccagttctcatttgcatcccatagtcggttgggtggcggggagtgaaagcgagtgcaaggtgggggaagtgcggcacatgcacgattgcctgcaattaggccggaaaatgaagactcctttgacacgaagcctttgccactgattgattttgcacgtctccatggaaagttttccatcgttcatcgcaacatctctcccatttgccaaaaacgaacacactaaagttaatgactctggccactcaaggtttccaatgaactgcattcaaatttgcttacccattcattggcactcaaacggaaaacttagtgcggcatttaacggttcacttaatatatcaatttatcaatttatcgctttctgatgggtctcctgtcttatattaaactatccacaggcaacgtattcgtaattgccgccattatactcgagagaaacttgcagaatgttgccaattatttggttgcatctctggcagtggctgatttatttgttgcctgtcttgtcatgccgcttggcgccgtctacgaggtaagtacttcttctctttcattgtgcacagaaagaaataattcgctattaaatttaaaaaaaaaagagagaacgaagataaatactattgtataaatattatttttggagagttagcgctacctgtttttttattacctgttattaatgagtagttatattattgatttaatatgagaatattttagggcacttaaagtgtttatttctgtgtactgccactggtattgcagaaccaactcgattaccctaatggaaacttgagcaggaatgctggcaaatgaaattaggcgccaaagagttgacactggcccagggcaagctcgtttgctgggcgactaattgtttcaattgcatcatcgcaggcaaacaatgtgttgctaaaagtcactcctttctcttccctttttcttttcgcccctgcacgacttctcgttgaaatctgtgcgccggcagataagtaatggatggatattgggaccggaactgtgcgacatttggacgtcttgcgatgtcctttgctgcacagcatccatactgcacctggtggccattgcggcggacaggtgagtgctgccattcagtcagccagtcagctctttcccggtgcgacagatggcaatttggacgtcctttctccttccgttacagatattggaccgtgaccaatatcgactacaacaatctgcggacaccgcgacgcgtattcctcatgattttctgcgtctggtttgcggcgctgattgtttccttggccccccaatttggctggaaggatccggattacatgaagcgcatcgaggagcagcactgcatggtgtcacaggatgtgggctatcaggtgagcaaccctgattgccgtagtgttgcagtgtggggagttcagcatagtctgacttcttagatacctagactaggtattgaatcatttattaggttcattctgttattctctcaattgtgaacgaaaactatctgcatgtaaagtactttagaaacagctgaataaaatctgtcactaagacataatttataataatttataattatattactattataatttataatagttataatttggtattataactatacaatggtacagaatttaattgattgtaatagatagtttgcttttctttcttcattcaatagatatttgccacctgttgcactttctatgtgccgctgctggtgattctgtttctttactggaaaatctacattattgccaggaagcgcatccaacgacgcgcccagaagtcattcaatgtcacactaaccgagactgacgtaagttaatcaatgacaaggcaatctcagttagagctaagtgcctcacaaaatgcgagtgataaatgccaagtgtccacttagccagcctcccatggagaagagtggaaaaattactcatacgcccagtggcacaaataaacatacatgttccacaagctagctgctattctattcctctacatccttttttttttggcaagctggctgagtggatgttgaggctgctgttcgagaagtgtatttgcttgccttccataatgagtgtgtcattaacagaaacaataaagagaaagggggcgtggctttatcgggtggtcggcggttggtggtcgggggaagtcctcagtactcagtcctcagctgctcattagcatgcccaagtgagcactcgaagcgagccgctgccgcgaaagccaaacaaatgccaaccgagatttatgatcaccccaatgtgtggcgatgttttaggggcagataaatacactgttaataattcagcaattggaaaattaaaatataatgcgaaattgctattctcgagggaagattctttaagagattcttcttgttaaataattggtatcaatagattttttttatttttagttcttagcacaatttatttaagccagttttcataaaagaagggaaatatatatttttaagtttttcatttcatcacttttctcagtgtacctagaacagctaagcccaaaggaacgtcgagaatttcgcataatgcatttgatttgttttcatttcgttgacaagacacaagccaaatgtgcttccccgaacagttctcatcaagttcgtaaacaaacatttgccataaattaagtacttacctttcgcacacatttaattttatcgatcatcgagcagtgcgattcggcggtgcgggagctgaagaaggagcgcagcaagcgacgggcggagcgcaagcgtctggaggcgggcgagcggacaccagtggacggcgacgggacgggcggacagttgcagcgacgtacccgcaaacggatgcgtatatgttttggccgcaacacgaacacggccaatgtggtggcgggatcggagggcgcggtggccagatcgatggccgccattgccgtggatttcgccagtttggccattacgcgcgaggagaccgagttcagcaccagcaactacgacaacaaaagccacgcgggcaccgaactaaccaccgtgtccagcgatgcggatgatgtaagtacgcccattgggctggaatataattaagagctgcaagtagggtgccactttaagccacggaatattttcttaaggaaaacgacatttaagttaactgaaattaaagctgacagacagattaaataagtcaaaaccatttaagtgcttaagaaggttctgctatggcagtttgttcgtcttatattcatagtcatttgctcgtggcgcgccctttgttcgtgtgagattaacccatgatacccccgcttaaccccttagtatcgcaccagcaacgcgaatgaaatcatcacgctgtcgcagcaggtggcccatgccacgcagcaccatctgatagcctcgcatctgaatgccattacgccgctggcccagtccatcgccatgggtggtgttggttgcctgaccacgaccacgccatcggagaaggcactgtcaggagcaggaacggtagcgggagccgtagctggcggaagtggaagcggaagtggtgaggagggagccggaacggagggcaagaatgccggagtggggctgggcggagtgctggccagcattgccaatccgcaccagaaactggccaagcggcgacagctcctggaggcgaagagggagagaaaggccgcccagacgctggccatcatcaccggcgccttcgtcatctgctggctgccattcttcgtaatggccctcaccatgagcctgtgcaaggagtgcgagatccacacggcggtggcatcgctcttcctctggctgggctacttcaactcgaccttgaatccggtatgtaaattagcccctggctcgttccctctcctcgcagcttaagctcactttaaacctttaccctttcgagcaaattgcattggcatgaaatagcttcagtatagaccatttttttttattgatatgaataccattttttatttaaattttctataaatatttgccttcataccaggtcatctacaccatcttcaatccagaatttcgacgggccttcaagaggattctcttcggtcgaaaggctgccgctcgagcgcgcagtgcgaaaatttgatttcaactgaaggataacgaggaccagtatttgtaattaaggtcaggcgaaggagtaaaggtggtctatacagacgggcaggcaatatgctacggaattggcattgtataaaggcaaactagcaagtagagaagatgttttagcagtgacaatcctaactagctgtaactaattaactaaaattcctcaccacacacacgtgcccctaaaagacaaaaaaagcgaaatatgaatagaaacaaaacttaaatgtaaccgaaaccaaacgagaaatgaaaacgtggaattatggtagctgatactcactagatgtaagctatgcgtatgtattagtaatttatagatatttctaaagtcttccctgtgtcttaaagaaacccaagagtagtacgcttagataccctagaaaccctaagtaggtggtatgaacagtgatcggagatcgaagatagtgatcggttatatataggctgggtccaaagaacttcttacgctttcatattctgtgttagttaatcgcgtttagttatagcctaagctgcaaaatgctcaattatttcaattggataagcacatttacataaaggtcaatatcaacaaagattaaacgaatttacacagttagctcatgacgacactaaaaaccgaaaccaaaattttgcataaccccataaaggataagccaccaacgcaatggctaattaggcagtacacacaactttattcggctaaattagcataaatccaaaacggaaagttgaactttcgttactaatatttctccaacacatgcatatacgtgccatttgaaatccaggaagccgcaacaaaaagtttgacccatgatacacgcattcatagtggtacagcatcacatatatacatatatacatatatatatatatttagtatagtatatttattgttcgatttttgaaaagttttcttgtaaataaacggacttacagttttagcaaatagtaaaccaaccgaaaaacct

SEQ ID NO: 37274 - DNA, 1948 bp, DROSOPHILA
catacattgacacgcccccaacccagattcatatatagtcgtacatacatacagaaatatatagccggatatacatatacatatatacaagcgagatgctgaaaactgtgacaacagcaatggctgccggcgatgacgatgtcccagcgagcattttggaaatagaactgccagccattttgctcaacgagagcctcttcatcgagctgaatggcaatctcacccagctggtggacacgactagcaatctcagccaaatcgtctggaatcgcagcataaacggcaatggaaacagcaacactttcgacctggtcgatgacgaacaagagcgggcggcggtcgagttttggctactagtcaaaatgatcgccatggccgtggtgctgggactcatgatactcgtcaccatcataggcaagcaacgtattcgtaattgccgccattatactcgagagaaacttgcagaatgttgccaattatttggttgcatctctggcagtggctgatttatttgttgcctgtcttgtcatgccgcttggcgccgtctacgagtaatggatggatattgggaccggaactgtgcgacatttggacgtcttgcgatgtcctttgctgcacagcatccatactgcacctggtggccattgcggcggacagatattggaccgtgaccaatatcgactacaacaatctgcggacaccgcgacgcgtattcctcatgattttctgcgtctggtttgcggcgctgattgtttccttggccccccaatttggctggaaggatccggattacatgaagcgcatcgaggagcagcactgcatggtgtcacaggatgtgggctatcagatatttgccacctgttgcactttctatgtgccgctgctggtgattctgtttctttactggaaaatctacattattgccaggaagcgcatccaacgacgcgcccagaagtcattcaatgtcacactaaccgagactgactgcgattcggcggtgcgggagctgaagaaggagcgcagcaagcgacgggcggagcgcaagcgtctggaggcgggcgagcggacaccagtggacggcgacgggacgggcggacagttgcagcgacgtacccgcaaacggatgcgtatatgttttggccgcaacacgaacacggccaatgtggtggcgggatcggagggcgcggtggccagatcgatggccgccattgccgtggatttcgccagtttggccattacgcgcgaggagaccgagttcagcaccagcaactacgacaacaaaagccacgcgggcaccgaactaaccaccgtgtccagcgatgcggatgattatcgcaccagcaacgcgaatgaaatcatcacgctgtcgcagcaggtggcccatgccacgcagcaccatctgatagcctcgcatctgaatgccattacgccgctggcccagtccatcgccatgggtggtgttggttgcctgaccacgaccacgccatcggagaaggcactgtcaggagcaggaacggtagcgggagccgtagctggcggaagtggaagcggaagtggtgaggagggagccggaacggagggcaagaatgccggagtggggctgggcggagtgctggccagcattgccaatccgcaccagaaactggccaagcggcgacagctcctggaggcgaagagggagagaaaggccgcccagacgctggccatcatcaccggcgccttcgtcatctgctggctgccattcttcgtaatggccctcaccatgagcctgtgcaaggagtgcgagatccacacggcggtggcatcgctcttcctctggctgggctacttcaactcgaccttgaatccggtcatctacaccatcttcaatccagaatttcgacgggccttcaagaggattctcttcggtcgaaaggctgccgctcgagcgcgcagtgcgaaaatttga

SEQ ID NO: 37275 - protein, 493 aa, DROSOPHILA
MLPIIWLHLWQWLIYLLPVLSCRLAPSTSNGWILGPELCDIWTSCDVLCCTASILHLVAIAADRYWTVTNIDYNNLRTPRRVFLMIFCVWFAALIVSLAPQFGWKDPDYMKRIEEQHCMVSQDVGYQIFATCCTFYVPLLVILFLYWKIYIIARKRIQRRAQKSFNVTLTETDCDSAVRELKKERSKRRAERKRLEAGERTPVDGDGTGGQLQRRTRKRMRICFGRNTNTANVVAGSEGAVARSMAAIAVDFASLAITREETEFSTSNYDNKSHAGTELTTVSSDADDYRTSNANEIITLSQQVAHATQHHLIASHLNAITPLAQSIAMGGVGCLTTTTPSEKALSGAGTVAGAVAGGSGSGSGEEGAGTEGKNAGVGLGGVLASIANPHQKLAKRRQLLEAKRERKAAQTLAIITGAFVICWLPFFVMALTMSLCKECEIHTAVASLFLWLGYFNSTLNPVIYTIFNPEFRRAFKRILFGRKAAARARSAKI

SEQ ID NO: 37276 - DNA, 2372 bp, DROSOPHILA
tatggcaactagggtccctttgctacacttaaacgaataaatggcacaaaaaagtgaaagaaaatcccaaagtaatgggtttaggaacaacaaaatattagatactcaataataatagcattaaatgctagaacgtgctagtaaaatttccaattgaaatagttatgtcaccgaattcgaaatgtaatgaaaataaactaaacaaaatgatgtataataaaaataataatttcatatgtgaaaattgtaaaaagttgtttgtctatttcaatttgtactgcttaattaagttattaaaattcacatacattttactctcacacttttttgaatgtacgcagttgccataagccgttgggaatttagactgtattatggatttttcagtgagcgataaccgaattccagaaaacttccatgttatttgtgaagttgttttcacccgactgccagtcaatttgtggcatttgtataaaatggacgcagcttatgtgaaatttatgatgtgccggtgccttatgaatcgtgcggattggggcttagccattggctgcatgaatatcgtgtactcctttttcctctttcaattttgggcggtggaactcttcagatccctcaacagtaagttctttgtgtccaagaatgtacttataaaactcttaaaactgcctagattattataccatcaagtgggttttattgtacggattcaacatgatgttcaatgtgatcgccatgataaggattgtgaaaagggaaagtatctcggtcttctactggatgtgcgaaacaggtgcacttttaatattccgagtgcatcacatatattacaacgtagatgagttttggctagccaaatattcgttgtaccgcgtttgcaacattataatcgatggtgagttcctatccgacttccatgctaaaatatgaaactgaaatacgccgtaaatttatgcatgtagcttatataggaatgtctctgctggcgatgatttatgttatgtgtggcttgaagctagagagccaattccccgaggaagaaatggaaaatgattgcaaattcgatccagagtcagccaaaagagctgctcagaaggatgagaacgagttgctagcaaggaatcaggaggagaagtcgcacttggaacagagaaagctagaaagcgatcgtgaaatggaggaattaaatcgcaaagccactttaaaactggctcagctcgaggaggagggatccctgtccacacaggagatagcacccacagcacccgaagaggaaaatctcgattccagcattttccttatgccagattttcccggaccttcagctccgccagaaagcatactctccatcgagccggatttctgctattagatcaatgatatagttgcctccggcgatcaacagaatgattaatcattcccttgaatagatagcaataagttttacattcgctggcagtgcaacataaacaatctaaatggaagtaaataacattttcacttgacccccaaaagtctgaccgcaacttttggcaacaaaagcccaaaaacgaagaacaacaaacaaacaaatggaagaaaacttgacttaacttttccgacggggctttgccatggaatgggggtttcctctgttggataagggattacgatcaaagcgttcgattgagtgtgtcaataaattcctgccagtcgaccgagtgtagaacatttgtccggcagcggcgataaatagttgccacacgctttcgttgcccaggaaaaatccaaaagagacagatcccttttggccggaaagtttcgtgtgaatttagtgcggctcattaagccggacagtgtcagtcatgtgtgtatgtttgtcctgctgcccggccagcggatgccggaccagtgggccaatggatttcggttcaaacttcattaagctggcaaaaggaaattgccgggccattgtcattcttattcccattcccattcccagtaccactcctgatcctagtgccattctcactgtcactgcagtagacttcctttaataatggcctaccgggcatttgtcaacgggatgctttaggagccgggctttaaatgagcgcgctcattaagaaaattaatgtttgggattcattaaaagtgtcaaagtgcgcacattaaaattatataaaacgccggggtggagtgacgcctgtcgtaacgaagcgaacgtctcgactcttgtcgattttattaacaaaacaaagcattaaagacgcataaaatgttgacatagcaccgcggctttcttcctgcctcctcataaaaccgtctcatattgacagctcaaggacttacgcacacaacgttcccttgaatgtgtgtattgtgtgtactat

SEQ ID NO: 37277 - DNA, 372 bp, DROSOPHILA
atgtgtggcttgaagctagagagccaattccccgaggaagaaatggaaaatgattgcaaattcgatccagagtcagccaaaagagctgctcagaaggatgagaacgagttgctagcaaggaatcaggaggagaagtcgcacttggaacagagaaagctagaaagcgatcgtgaaatggaggaattaaatcgcaaagccactttaaaactggctcagctcgaggaggagggatccctgtccacacaggagatagcacccacagcacccgaagaggaaaatctcgattccagcattttccttatgccagattttcccggaccttcagctccgccagaaagcatactctccatcgagccggatttctgctattag

SEQ ID NO: 37278 - protein, 123 aa, DROSOPHILA
MCGLKLESQFPEEEMENDCKFDPESAKRAAQKDENELLARNQEEKSHLEQRKLESDREMEELNRKATLKLAQLEEEGSLSTQEIAPTAPEEENLDSSIFLMPDFPGPSAPPESILSIEPDFCY

SEQ ID NO: 37279 - DNA, 2536 bp, DROSOPHILA
tcaaagagtttgaaaagtgatttgcagccaaactataaaatgcactggcatttcggactgtttttagtgcagaagcttgactgacgaccgtaagaagttacgcccattccacgcattctaaatcaatttcagtcgaacgcctttcgcctggcattgatttatggcccaaatccaaacgtcgtctaagtggaaaagccgaaccgaaaagaggcgcaactttaccgaattatatttcaattttggcagcgaaaatgaaacagaaacagagccataccgagtccacaaaagtggggcgtggctggggaaaagatgttaagaactttttgacaattgacttaaaaagtttcctcaagctggcagaaattgactgccttttgtatacaaataggccgaaatcaccaagcccacacacacacacacacacacacatatggacagggcaaacggaaaagctggagaaaatggtgccgcgtccatgaagcggaagtaaacacataaaacggaaatgaaaattcaattatttcgttacgattgttcaactttttgttgttgttgttttcagtgtgcatctgtgtgtgtgtgtgtgtatgtgtgttttgtgctctcatttcgtgtggcaggcagaggccaaaaaaagtttaacattaagttaacgtgcaactcgcttcgtgggtcagcatatgcaactttagctctttttgggcaaattcaattttagctgccacttttttggggcatgtgtatgtgtgtgtgtgtgtctgcaccgaaacgaaagggccgcacatttaaatgcgatttttaacagtcgcttcacgcacaattagcctctcgaatcgattttcacttaaagcgttttcccagcttcacttagcgatcccaaatgcagttagcacgctagacgatgttcgataaagaatttcttttcccaggccttttggttgcagtggccttggtggtagtattacaaacacgcagcagattgcaacaggatttgcaggatatgcgatggcgtctgacgatacacgctctcaccgttcgagatacgtttgggaatccagtgcaactcgatacattcgccggccatgtgttgcttatcgtcaacattgcctccaagtaagaatgatccacagaaagttcttaataacttggcccaccctttacttcagatgcggacttactttatctcagtacaacggtttgcgctatttactcgaggaatatgaagaccagggcttgagaattttaaactttccctgtaaccagtttgggggtcaaatgcccgagtccgatggccaggaaatgttggatcacctgcgcagggagggagccaacataggacacctctttgccaagatagatgtaaagggagctcaggcagatccgctgtacaagctcctaacgcgccaccagcatgatatcgaatggaattttgtcaagtttctggtggatcgaaagggaaacatccacaagagatatggcgccgaactggaaccagttgccctgaccgatgacatagagctgctgctcggcagatgagtccgaataaataacgcaacatacgcgtttctgcccactggcttccataactgcgacaactgtgacgccttatcattggggattactgtttctgatgttggcatcacatgccaagcgatttctttctgacggtcttacctggtttcgcctgtcaccttcccgctgacttctgtcagttgcaaatggccagcgtggaaaggagcgtggagaaggtgatagtgtttgctggagtgctgaccttttgctctgctgcacttgtcactctgctttatcaaattgcagttaacgttgcagcttggcgcacgtcacgtcaaccatccgccccgtgtgacacaatcgagtggcggtgcgggggcattgaatgccattcgacctcgggcacaatacttgcttgaaaagtttgaaagagccaaacattgcattgtgtaccaaaattgtgttaactaagcaatgtacatgaatttcaatttcccttgactcgattgaaattgtttcgaatttttaaaactacctaaaaattatcgtgatgcttggagtctcactattcatcaagagaatacacatttgttatactaaggggacttttggataacttttttgagttttacttttaataactttttagagcggctatggaacaaattaaattatgactttgtttctccacaaatattaaaaaaccgccaaaaatgtttgtgtttgtcttgaaatgctcaaaaatgtgctaatgctaaagctctcgcatggaatgcagctggtccaagctctaagcgaaatccctccggtcaggacaactttctggaattccccaacgagttgttgcaaccgcaacagagcctgactccggctggagtggatgtggatgtctctgttgcaacctgcctttcgctcctgtttgctgttcctgattctgatttagattcggattcggcttctcttgcgttagccactcctcgttggcatgcaaacaagcgctctactgggtgctgcaatataaaaa

SEQ ID NO: 37280 - DNA, 483 bp, DROSOPHILA
atgcgatggcgtctgacgatacacgctctcaccgttcgagatacgtttgggaatccagtgcaactcgatacattcgccggccatgtgttgcttatcgtcaacattgcctccaaatgcggacttactttatctcagtacaacggtttgcgctatttactcgaggaatatgaagaccagggcttgagaattttaaactttccctgtaaccagtttgggggtcaaatgcccgagtccgatggccaggaaatgttggatcacctgcgcagggagggagccaacataggacacctctttgccaagatagatgtaaagggagctcaggcagatccgctgtacaagctcctaacgcgccaccagcatgatatcgaatggaattttgtcaagtttctggtggatcgaaagggaaacatccacaagagatatggcgccgaactggaaccagttgccctgaccgatgacatagagctgctgctcggcagatga

SEQ ID NO: 37281 - protein, 160 aa, DROSOPHILA
MRWRLTIHALTVRDTFGNPVQLDTFAGHVLLIVNIASKCGLTLSQYNGLRYLLEEYEDQGLRILNFPCNQFGGQMPESDGQEMLDHLRREGANIGHLFAKIDVKGAQADPLYKLLTRHQHDIEWNFVKFLVDRKGNIHKRYGAELEPVALTDDIELLLGR

SEQ ID NO: 37282 - DNA, 9009 bp, DROSOPHILA
tgagatcggacatatttacaatatttcaattatataaaagcaatgatagattaaatttgaatcttataaatgattgtatttgtgttttacagcttgacctacatacacgtatatataaagaaaactcaaatatttagaaacatctgaatgtaagaacaatatataaagattattattgattcaacaagtgttttgttttgttttacttttaagtgttatctttaattataagataaatatatttggtgctccaaatatttgagttcccatctccactgaagttcacttccggtatccgaatgacggagaaaccggtatacctacgcttaggatgcggtatgctaggcaggaaacgagaaacagcagcatcagcagcaccatgggcagtttgtagcggcggaactgccgcatccaggatgtccggaatcccatcgaatggcggatttgcgcggaggatgagttcggggcacaggcttcgtttccgccgccgctgccagtgtccaggggttggtacgcctctccggaatggccaaggtcgtacgccggtggcatggcattagtttcagctcgcgattccaccaaaatatctcatttatttacactttatcgcgagtggagtccgtttcgttggcaacgcgatgcagggctgcacaaccaccacttggagtatgcgtgtaatcggtgcatcgataattatcaaaggcatcggttagcccgccaaaatcgaattattcaaacataacagtttcaatcttgaagccataaaagcaaatgttttgtatttcttgcttagtaatcttagttttcactgctagcgctatcaaataattaaaattgaatcaaaaaaccaatgaagtttttgcttacacttgctaacagaattattcgcaacagcgaatcaacagttttcatttaacagcggattcaaagctcgtaacagtcggatttttaagttgtcgtgacaaaagtgtgtttgtgattttagtcgcatccaaatccgcggtgcgtccgcttcgcctcgcggtttatagtttcaaatagtttgtttttgtaattaccggcaaaacacttgaaccgattattaatagtcgcgaaatgactgccaatttctaaccacttgtgttcgagttttaattggaaacgaaaatagttcctaagtgcacaaaaccgattccggattttaattatactcgcaaagttacatcgatcattcgccggaatcctgcacggaatactcgaatatgggtaaaagcctctatttatatttactgtcggtgacattttcactttcttttgcccgcccattgattcttttctttgctttgggcctgcttttgtgggccgggccttgaaagtgaaagccaaacgaaaggaaaatggcaataggcgtgggtacattccatcgataccctaacacttagcacttgaaggtgcgatttttcgtggacacaattggccatttagagtttagatagcaatctattattagctaactcagactaaaacagcacagtctcatcatctgtgctccttaacattagaaaatgtaactttaaatactgaaaaatgatattgaatttcgtatactgaagctttgaaaaaataattgaactatttcaatctaaaaaatctatacattatttgtaagctacagaagatgtttaatcaagctcttcaagtctgcaatcttttttcgtccaatgataaagccttgaccaaaatcactgtcaatatgatgagatacaatctccctttgttgaaaggtctatacccttctagtaataaatatatatttcacttatgtgtgtcaacaaaaattccagtgaagttctaatcttcctgataacctttgttagaccccaataggttaagctaatatttatgcatggcattagtactaataataaacatgattttaattaaacccgaaaaagataacacatgctcgtgcaatatttagttgtccaaacgatttgagaactaacccatcaatgtgtgtcaacttatttttataggggagtagaaacttccgcatttcgttcccaatcaagactaattaaactccagttcgagaccagctacacttaattgaaacttaggctcacccttacagtccaccgacccccctgcttaagtcagtacagtctgccttgcctaacgtgactaagcatcgaccatgttattatgtttttattcgtttttattttatgtgcaaattcaccttatcaaatgaagtaatcagagctttggggattttgaactatgactttagaacaaattgaatttgaaatatttttagaagattcttagaagccagactgtatgactggatgaccgaatgacgagtctagtgcttcggatttggaacaagccgcttattcggcggcttatcggggtcgggtggtgttccgcggggggtgtgggcttaattaggggcacattcagtgcagtggcggtgcgtgtcttcctatagctacccctttgcccccgttaaccccgaaagcccaaccctacgacctttggcgctggcaagcggtcgcaattgccttgcccactaatgacacatccgccatgggcttccgcggatccggacttgtattccgattcggaatcggattcagttaccccgcagcgccgaacgtagccgcaagaaaccggcaatctccggctgaaacaattgcggatagttgagatccatccccgcaacgaatccagtgaatgccaacatgcatctgaggatccgtctcacgtgtcgcaaatatgaaatttggggtaagcacttcagttggccctgcaccggttctgtttgtgtgtttctggctcggatcggatcggatcggttgatgtggtccgatgtggtgcgtctggtggccccctttcgagtgatatgtgcgttaacggtgcatcgcccgctgtgacgagcattttaatatctggagtttggctggattgctggcggttttggggccttaaaagccccacgcggcgcaggtgcaaccttagtcgttttcggtgtgtcgaaggagtacagtgattgcccatcgccatgtgtaagccaagtgttcccagttgtgtgtcaaagtataatcagttccaaaacctattaaatttaaaacagctgtctaaacatgcaaaagcgtttgttgaacgtaaaacacttcattagcaagaagtacaaatcaattaaggtttttttttttttttactttgtaacatttaaagtgcaaaacagcttttgctttttaaagcgttacctaaaactaaaagacttaataagcaagaagtaacaattagcaaaggttttttaattttgcctgtgcgacatttcaagtgcaaaaatgttaaagtgtgtaaaaatatatcgaaatgttttatgattttctatataaaaaacagtataactgatgattcaaccctagttgttaaattttacaatttcatatttcgaaacaaaaatatttatattttaggtctaacattgattcaatatttatgtagctacttaaaaaatgcacttgtttttatcaagtaattcctgaagttcatctgatgaaactttattatatagtttaacagtttctaataaataaataggctacattattatgggaggattatccttgcttgcgattggtaagacaacaaatcaatagaaaaagaaacttgatgcatgttgcatactgcatgtaaattttaacagtaatattgttttttgatccaaaagattattcaaaaaagtataaataattgacattcattgctcatattaactaagataaaaatgtacttcaaaattgcaagaactactgcctatctaacggtgaacaaatcgagccatcgatggcctatcgatctttgggggagctttctctggagcttttcttgtttaaccagcatagacagcttttgcgattagacagctgattaacgaggtcaaacatgtgagacgcgataaataaatggggaagtagctgtagtttcccggcggttttctcactgcatgcgtattatgggattgtggcggtttctgaaatgttcgtttcgcttacctttttgcctttttggaaaacgtgtttaactagcaaaacaaagtgccaaacaatgccgacatttgcataaaaaaaagaaatcaaaacaaaagccgaaacaagaacaaaacgaaagcagaacatgaataaagacaaaaacaaattctaagcagagaacgatgacacattgtggtaaatgtatctgcctctgtaatagctttactgggagagatagatacagagagtgaaagttttttccttgaaagctcgtgctctccggtttcgcagttttactttgagccgctcattcgcattgtttggcattttgctttgtccattgtcctgatcgtgttgttgtaatgcaagattccgatttcatttccgtttcccattgttttgattctcttcgttccgattcgtttcgcccgccgactttgaaaatttgaattggctaaaaccattgtgcaagtgagtatgaatatcgcagcgatgtttactgtacaaaagtaccgttaacaagaagctgacattggagaattctaattagactgggtaataaaaaaataaagggggaaaggggaaacggccattaaaaggcagataagatatgagaacattttgagtatttctatggttggcaaaacacagagcatatacaaaatgtaatgtaatttgttgaactataataatttctttcaattagcagtatattaaaagtttacgttgttttagtatattaagcaccaatcttttcttaccatattagaattaattttttttgtttatttttagcaactaaaataaaaaaaaataatgtaatatattaataaaatgtttatttatacaatgatttccttttgcacttatcttttacgtacatgtcatgtacatgcatgtgtaccttagatatctctgataagcagacaatgggatagtattgtaaattgagcgggcttatctttctcataataactgatatatcgaatctttttattgattatgtagaaactcttcaacaagtcagttgtgcaattacttaaagttctttaagttctaaaaaccagaatgtctgcccaagatcaatatattaccattgtgccacataccgtgcacatatctctatataatcgcgtttttcttcatatcaggaaattgaaaaatgtgatacgcacaattatcacacccattatcggtgcggtgtaatcaacccaaattgtgtccagtagcgaaactcatctttacaccctgtatctctatacacatcttttcgcagctctgtccatcttctccctggtcactggtctttatgtcctgcacttctccatagctctgatcctggtcaacaaagaggtgccccaaacgcgcggaatgctgtaccccagggaatcggagacgcgggaggtgcgatctctggacgggatctggaactttgtgcgctccgaccaggcgaatcccacgcagggcgtccgggatgagtggtatgccaaggagttgagcaagagcaggcccacaatacccatgccggtgccggcatcctataatgacataaccacggacaatttgagggatcacgtgggcacagtgtggtacgaccgcaagttctttgtgccccgatcgtggtcaaaggatcagaggatatggctgcgattcggcagtgttcactatgaggcatatgtggtgggtacttcaaatatattctcatgcaatcaagtacaagtatttagttatttagttgtgataatcaatattttctggtagaggatcatataaaattaatgagaattcctttatttcagtggatcaacggccagaaggtggtgaagcatgaaatgggtcacctacccttcgaggcggaggtcaccgatcttctgagctatggagccgagaatcggatcaccgttatgtgcgacaatgctctgattcagacaactgtgccgcagggcaggattacggaagtgcccaacgatggtggcatgaccattgtgcagagctacacctttgacttctttaactatgcgggaatccacaggagcgtgcatctttacaccacgccccgtacttttatcgaggaggttgaggtcaccacaaacctttcaaaggatgccaccggtaggttattacctcaattaagtttctattaacataacttaacttatttaatactgtaatactttcagttggcgaagtgttctatagcgtaagcgtgaatggcagcgctgccaacgaggcagataatgtcttgcaaatccaggccaatttgtacgataaggatggcatattggtggcgaatgccacgtcggaccaaaaacttggcggcaagctgcaagtgaacccggtgaagccctggtggccctacctaatgcattccgaaccgggttatctgtaccagctggagatcaaattgctggcgaccaacgatgagctcctggatgtctaccgactgaaagtgggaatacgcacactaagttggaacagccagcagttcctgatcaacggcaagcccgtttacttccgtggttttggacgacacgaagattcggatatcaggggtaagggtctggacaatgcactgatggtgcgcgatttcaatctgctcaagtggattggagcgaatgcgtatcgcacgtcgcattatccctactccgaggagtccatgcagtttgcggatgagcacggcatcatgatcatcgacgaatgtcccagtgtggatacagagttgagttattccgacacctcgaagggattcttactaatgctcttggcttcgattttcagaaactttagccaggagctgctgggcaagcacaaatcgtcgctggagcagctcatccatcgggatcggaatcatccaagtgtggtgatgtggtccattgccaatgaaccccggactggtagcgtgagtgcggattcgtactttgagtgggtatctctctatctatttccgattgtatccaatttaatcacttactttatccttgcagattagtggccaacttcacacggtctctggataaaacccgacccatcacggctgccattgctgtttcaaacacccaggataaggcggtaaataaagagttctaacccatagattttgtattatatactacaatatatctaactccagggccgctctctggacatcatcagcttcaatcgctacaatgcctggtactcaaatgccggacgtctggacatgataacccagaatgtgatcgacgaggccattgcctggaataaacgctacaacaaacccattatcatgtctgaatatggagcagataccttggagggcttgcatatggtgagtatggatgcaaactaaagatacttctagtaagagaaactcgaatatccttgttttaaagtaaagtaaactaatcccttcatgttgttctattagcaacctgcttatgtgtggtcggaggagttccagacggaggtgttttcccgccattttaaggccttcgatgagctgcgcaagaagggctggttcattggcgagtttgtatggaactttgcggactttaagacagcacaaagtgagtgaaaatacatagttctattatgtataatttaataatataatttcttattcaggctacacccgcgtgggaggcaataaaaagggtgttttcacccgcgcgcgccaacccaaagcggcagctcatctccttcgcaaaagatactttgcattgggcagagatttggaccagtgcagcttcccggaagatctcttcacctacatcgccgatctgatatcctaatggttgggagccagttgatggtgcccaaagtattcggccactgtaaataagtttaccgagaaaaactttatcctcggacttgcattttagcccgactaccattccgctgcattgccctgtacaatataaaatggttagctctagttgattgtatttttgtatgtatttgtatgtttaagagaataaatgaaagtgcattatttatatttaccacacaatatttggaaaattttcaaatagctcataactaaagatttgaaaagcagcaagtttggcggtcaactatcgataactaacgataggaatatgttagcagaatgttaatgattgtatacatttgtgctggcagcacccacgaaaatacgtttttatttaatttgaagttatcgtaattgtctaaaattatttttttttttatagaggttttttaatactgaatcccaattcccaaaaaaattcgcagactccgaaataaaacttcgagccttcttcttttttgcatgaaagttgaatttttatttaaattgcagccaatgaattttatagtaatctcattagtttaacttatgctgtttgtttagcgaaattcccggaaaatcggcacgcatacccagcaataattctttaaaaaatgcgcgccaatttgtttgaaccaaatgtacaaaaaaaattaagtgacaataaataaaagaaaccgcctttggcaattttaagctagaaatatgtgtgggtgtcctttcgaattattgcgaagtatgctgccattggcgatttgccttattttctattggtttttaaagatagacagatctgcaaacacttagtcgctagttaatgatgtcggcttaaagttttcgtaaagttttgattttggttttcgaatagttcgcttggtagttttatttaggtaaaacatcgtgatacccgtctagtctaaactaacatataaatacatatatgttatgtatgtcattatgcagtgtatgttctaacgtttttgtttgttttagctaattacgttttacccatttttcccgaaagtagtttgctcttcaaatattacatgtcattcgaactgtttgcttatatgttacgtaatatgccagcttattcaaagaaatcctcgacacataattaccaatctaacacataatagtaatagtacaacagttttaaatgtaatttacctagttgtggcttttaacaatacgttt

SEQ ID NO: 37283 - DNA, 2486 bp, DROSOPHILA
cggtgcgtccgcttcgcctcgcggtttatagtttcaaatagtttgtttttgtaattaccggcaaaacacttgaaccgattattaatagtcgcgaaatgactgccaatttctaaccacttgtgttcgagttttaattggaaacgaaaatagttcctaagtgcacaaaaccgattccggattttaattatactcgcaaagttacatcgatcattcgccggaatcctgcacggaatactcgaatatggctctgtccatcttctccctggtcactggtctttatgtcctgcacttctccatagctctgatcctggtcaacaaagaggtgccccaaacgcgcggaatgctgtaccccagggaatcggagacgcgggaggtgcgatctctggacgggatctggaactttgtgcgctccgaccaggcgaatcccacgcagggcgtccgggatgagtggtatgccaaggagttgagcaagagcaggcccacaatacccatgccggtgccggcatcctataatgacataaccacggacaatttgagggatcacgtgggcacagtgtggtacgaccgcaagttctttgtgccccgatcgtggtcaaaggatcagaggatatggctgcgattcggcagtgttcactatgaggcatatgtgtggatcaacggccagaaggtggtgaagcatgaaatgggtcacctacccttcgaggcggaggtcaccgatcttctgagctatggagccgagaatcggatcaccgttatgtgcgacaatgctctgattcagacaactgtgccgcagggcaggattacggaagtgcccaacgatggtggcatgaccattgtgcagagctacacctttgacttctttaactatgcgggaatccacaggagcgtgcatctttacaccacgccccgtacttttatcgaggaggttgaggtcaccacaaacctttcaaaggatgccaccgttggcgaagtgttctatagcgtaagcgtgaatggcagcgctgccaacgaggcagataatgtcttgcaaatccaggccaatttgtacgataaggatggcatattggtggcgaatgccacgtcggaccaaaaacttggcggcaagctgcaagtgaacccggtgaagccctggtggccctacctaatgcattccgaaccgggttatctgtaccagctggagatcaaattgctggcgaccaacgatgagctcctggatgtctaccgactgaaagtgggaatacgcacactaagttggaacagccagcagttcctgatcaacggcaagcccgtttacttccgtggttttggacgacacgaagattcggatatcaggggtaagggtctggacaatgcactgatggtgcgcgatttcaatctgctcaagtggattggagcgaatgcgtatcgcacgtcgcattatccctactccgaggagtccatgcagtttgcggatgagcacggcatcatgatcatcgacgaatgtcccagtgtggatacagagttgagttattccgacacctcgaagggattcttactaatgctcttggcttcgattttcagaaactttagccaggagctgctgggcaagcacaaatcgtcgctggagcagctcatccatcgggatcggaatcatccaagtgtggtgatgtggtccattgccaatgaaccccggactggtagcgtgagtgcggattcgtactttgaattagtggccaacttcacacggtctctggataaaacccgacccatcacggctgccattgctgtttcaaacacccaggataaggcgggccgctctctggacatcatcagcttcaatcgctacaatgcctggtactcaaatgccggacgtctggacatgataacccagaatgtgatcgacgaggccattgcctggaataaacgctacaacaaacccattatcatgtctgaatatggagcagataccttggagggcttgcatatgcaacctgcttatgtgtggtcggaggagttccagacggaggtgttttcccgccattttaaggccttcgatgagctgcgcaagaagggctggttcattggcgagtttgtatggaactttgcggactttaagacagcacaaagctacacccgcgtgggaggcaataaaaagggtgttttcacccgcgcgcgccaacccaaagcggcagctcatctccttcgcaaaagatactttgcattgggcagagatttggaccagtgcagcttcccggaagatctcttcacctacatcgccgatctgatatcctaatggttgggagccagttgatggtgcccaaagtattcggccactgtaaataagtttaccgagaaaaactttatcctcggacttgcattttagcccgactaccattccgctgcattgccctgtacaatataaaatggttagctctagttgattgtatttttgtatgtatttgtatgtttaagagaataaatgaaagtgcattatttatatttaccac

SEQ ID NO: 37284 - protein, 643 aa, DROSOPHILA
MLYPRESETREVRSLDGIWNFVRSDQANPTQGVRDEWYAKELSKSRPTIPMPVPASYNDITTDNLRDHVGTVWYDRKFFVPRSWSKDQRIWLRFGSVHYEAYVWINGQKVVKHEMGHLPFEAEVTDLLSYGAENRITVMCDNALIQTTVPQGRITEVPNDGGMTIVQSYTFDFFNYAGIHRSVHLYTTPRTFIEEVEVTTNLSKDATVGEVFYSVSVNGSAANEADNVLQIQANLYDKDGILVANATSDQKLGGKLQVNPVKPWWPYLMHSEPGYLYQLEIKLLATNDELLDVYRLKVGIRTLSWNSQQFLINGKPVYFRGFGRHEDSDIRGKGLDNALMVRDFNLLKWIGANAYRTSHYPYSEESMQFADEHGIMIIDECPSVDTELSYSDTSKGFLLMLLASIFRNFSQELLGKHKSSLEQLIHRDRNHPSVVMWSIANEPRTGSVSADSYFELVANFTRSLDKTRPITAAIAVSNTQDKAGRSLDIISFNRYNAWYSNAGRLDMITQNVIDEAIAWNKRYNKPIIMSEYGADTLEGLHMQPAYVWSEEFQTEVFSRHFKAFDELRKKGWFIGEFVWNFADFKTAQSYTRVGGNKKGVFTRARQPKAAAHLLRKRYFALGRDLDQCSFPEDLFTYIADLIS

SEQ ID NO: 37285 - DNA, 4889 bp, DROSOPHILA
aaattgtttccggtttgcaaattttttagaacaatttttgagctttaacttgaaatgttggatacgcgcgccttgagctgtgagcaaagtttcttcacaaactgatggcatgcaaagttgccgattttttgttccttaatatgtgcaataatgccatgcacttgtggccaattaacgtctaaattggcaattactcttacttgaaaagagagcctctggtcgtcaggtggaatacagcgtacggaatccgatcgaaaatttctctctacgccagaagcatgatgacctaaaaataataattaatggataactcattaaaattcagttaagtgggtgggcgtgccgcaggcaagttgagctaccgtctcgaacggaacttttcgatgtacgtgtgaataaacggaaggagagtaagtcgaatgagaactcgtagccactccacctaatctcattaacccattagggagcacccactatcccccctttttagctggcgcatccattttttatgtaatttgtttacggtttgtatgcggggggacacattattgttgttattaagcttaccactcacgcgccagcaacttttcctattttcgaatcggaagcggtcttggaaaacgtttatttcgctattttctggagcaattaatgcgatttggaatattttcagccgaacagctgtcaatgttgttattgactatcgatgacagccagagatgaacagagatgaacaaagtgatggcacaacttaagcgttgtattgattaatttggttgtgcattaccatgcttagttattcagcttagttatttcagttgagttcagttttagaattagctattatttgtacggctataattactagctcgttttttaataaattccctgacgatatatcgtaccggctttttacgactaccatcactaatcagcaatcggtgtcgtagaaatggtgtgaccagacctccgctcataaagtttgtttttttcacctagcagagaaacaaaagaattgacaatttagccgcagatcagacgacgcaaatcccaatccaggatgaggagcgtcgaggagatcaaagcggagtacccgctgcactggcacatctggcacaacgaactggagcagctgcaggcggccatcgaccaggtgaaaaggggtggtggtgctccatgggggtgggtgtggcctccggggacaggtgctaattgaattagcagggcacggggaagtgacactgcgataaaacttactgattccgtcaccttgcagaacgataaggagaaaatcgatccccgcggccggacgccactgatgctggctgtgagattggccaatttgccatgcgttaaatgccttctggcggccaaatgcaatgcgacctatgagtacgaaggctggtcgagtaagttaaccaagaaacgccccgaaattaaccccattaattgcctcccccccttagttgtccaggaagcggtctgcaccggcgatgtggacatactgacggccatcatcgaagtccgggatctccagcgtcatgtccagcgggttacgcatgtgcctaagctgctgcagcacctattggacgcaccagatttctacatcgagatgaagtgggaattcacctcctgggtgcctctgatgtcgcgtctctgtcccagcgacacctacaaggtctacaagcggggagccaacgtccggatagataccaccctgctgggcttcgacaacaacacctggcaacggggcaatcgctcttacatcttcaagggggccagtaagtagaaataaatcaaacgatttttaagataaccgccaaatttgtctacaccaactatttatagaagaaactgccacgatgatcgagatcgatcacgatacaaacgaagtaatggtggaggagatgagcagcgatatcggtgatattgtggccattccaccagccttgggcaccgtgagggcgcgcctcaatgccccggtgatcacgaacaacatcgagatggacaagattagcttcgagcgcaacaagtgcggcatatggggatggcgtagcgagaaatctgagatgatcaacggctacaactgcaaggtgtatggggccagcaacgtggagtttgttacaaagacgcgaatggatcaccttagcgaggagcaaattaaggtaagaaattcaataatggaatacaaatgatacatttggatggcatcatttgcaacattctgtgatgcatgaatgcattctgcagttccttctatgtttacgtatattttctaattaactgaaatatacatgttttgtacactgcttttctgatttagaacaagacagcgaggactccactgcatagcctgctgggaattgctgatgaggattatgtgtcacccgctgatgctgctgcggcactaaaagatcgtgtaggtttaaaaataatcaataaattttgcctcaaataatttacatttttttgttttagacaccatcgccccggttggaggaagcttccaacgctggagttgaaaatggtggccgaaactcaccagcccctggaaatcaaagcaacggaagctccgcgggtgcgtcgggcaccagtactccaaagtcttctgttactccggaggagtattttactcaggagtttgatcttcacggaagggatgttggcggtcccaagaacctgagcacaaaggtgcagcgctttagagccaacttatggttagccgaggagcatcccattcgactgcaggaacaggtgcttcccattctggatctcatgtccaccatggccagtccacatgtgtccaagctgagagactttatcaccatgcagctgcctgctggttttccagtcaaagtggaaatcccgctcttccatgttttaaatgcctgtattacatttggaaacgtatttgctttaaccacgcccgttgatcacgtggccacgctgcaggagcaagatcgtgtcacttgtttggtcgatgatcgctgcttcgatatcccagctcactacacaaacaggggcagcgatgtccgtcggcaaattcctcttgacgaggatgacatgctacagtatgcaattgagcagagtttggtggaaacaagcggagcctgtggcgtggacgctcgggacgacgacaaggtggatatctgggaagtgttgagaggccaaaacgtcgtgggctccgatctcctgccagaagatgacgagcagctgcaacggtacgttaccagaatacttttgcccttgcagaatacaatgggcttcttaaaatgaatgtgtagttattctgcaagggctattaagctttgttcgctcaagctatgcatgagtttgatttgcaaacacaactaacacctgtcaatggtaaacgctagtggccaccgcttatcctcgcacttattgtctccccatcgccagcagtacgggcggtattcgccctcgcccaaacaccaaccccagtcctttccccactcgcaactccaactggagccgcagactcgtgggcgctcagcctcggctggtgcgcagttcaaaaacgatttgggctacatgaagaagatcttcaagtagcgcttaaaagacactctacccccaccctcctcctgtcgtattgctagttttgatccaagctttgtgtgttcttgtgcccttttcttgtttcaattgcagagtcctgcaggaatcgctgcttggcgcccatgcaaatctccaaagcggttcgcccgcctccgacgaagacgacgatggtggcttccggtatgtggatcccgatttggccatggccatgcgactgtcacagcaagagcagagaaagttcgaactggagcggcagcaggagcaggagatgatcgagcaggcgttaaagcttagcctgcaagagcactaatatactatcagcaattccaaattgaagttatattgatttcaagtgtaaccttcgggctaagttgtataaatactacgagtactttaagttaccctcgcatccttctgcgccctgtccttgttttgtattgtgatacaagcgggacgcaagcgggaagcagtcgcctggtctcaactcgtccactcgcaaccgaaggatccaccctatatataccatgtatccaaagtagtccttgtagttgtagcttttgcattgaatccggtatctattatctagatactatcttaaatttaagtgcgtgtggcgaccgtgagatatgtcttatatgcgatcgaaccgggttagccacatgcttgcgtgtccttaatctgtaaccactaatcaccattatgcgtaatttataccaataatacccactcacacatcatgcgcatgtaagccgacacctttttgtgtaaatgaagaaaatatatgaaataatcatcaggaaaacaacaggcgtttttttcatttacttagcgatgtagtaatttcgtttattaagcactatatacaattcaaaatcggtacacaacttatgctaattaagcaaacacaataaagtctcaaaatttgatttggtatctctactcaagactatttcctaagaaagtttagttctgaaagcagaatctagacattttaggccgtgcgaaaaaatagttattattcggtgaaatgcaggctgtgctatctcgattggcttatcagtggctaacttgtgtccatttagagtatatacatatgggcttgttttggttttcacagattatacgatttgttcgatttacaatgagtgagtaactaatagtttgtttaaaatttttgttatattccgtattgcacacctttggttagagttcttaaataatatttttaagatattcaaattggttagctttttgatatagattcctaaaaaacaaatatgtgaaaaccgcaacaggcccgataagtttta

SEQ ID NO: 37286 - DNA, 2166 bp, DROSOPHILA
agagaaacaaaagaattgacaatttagccgcagatcagacgacgcaaatcccaatccaggatgaggagcgtcgaggagatcaaagcggagtacccgctgcactggcacatctggcacaacgaactggagcagctgcaggcggccatcgaccagaacgataaggagaaaatcgatccccgcggccggacgccactgatgctggctgtgagattggccaatttgccatgcgttaaatgccttctggcggccaaatgcaatgcgacctatgagtacgaaggctggtcgattgtccaggaagcggtctgcaccggcgatgtggacatactgacggccatcatcgaagtccgggatctccagcgtcatgtccagcgggttacgcatgtgcctaagctgctgcagcacctattggacgcaccagatttctacatcgagatgaagtgggaattcacctcctgggtgcctctgatgtcgcgtctctgtcccagcgacacctacaaggtctacaagcggggagccaacgtccggatagataccaccctgctgggcttcgacaacaacacctggcaacggggcaatcgctcttacatcttcaagggggccaaagaaactgccacgatgatcgagatcgatcacgatacaaacgaagtaatggtggaggagatgagcagcgatatcggtgatattgtggccattccaccagccttgggcaccgtgagggcgcgcctcaatgccccggtgatcacgaacaacatcgagatggacaagattagcttcgagcgcaacaagtgcggcatatggggatggcgtagcgagaaatctgagatgatcaacggctacaactgcaaggtgtatggggccagcaacgtggagtttgttacaaagacgcgaatggatcaccttagcgaggagcaaattaagaacaagacagcgaggactccactgcatagcctgctgggaattgctgatgaggattatgtgtcacccgctgatgctgctgcggcactaaaagatcgtacaccatcgccccggttggaggaagcttccaacgctggagttgaaaatggtggccgaaactcaccagcccctggaaatcaaagcaacggaagctccgcgggtgcgtcgggcaccagtactccaaagtcttctgttactccggaggagtattttactcaggagtttgatcttcacggaagggatgttggcggtcccaagaacctgagcacaaaggtgcagcgctttagagccaacttatggttagccgaggagcatcccattcgactgcaggaacaggtgcttcccattctggatctcatgtccaccatggccagtccacatgtgtccaagctgagagactttatcaccatgcagctgcctgctggttttccagtcaaagtggaaatcccgctcttccatgttttaaatgcctgtattacatttggaaacgtatttgctttaaccacgcccgttgatcacgtggccacgctgcaggagcaagatcgtgtcacttgtttggtcgatgatcgctgcttcgatatcccagctcactacacaaacaggggcagcgatgtccgtcggcaaattcctcttgacgaggatgacatgctacagtatgcaattgagcagagtttggtggaaacaagcggagcctgtggcgtggacgctcgggacgacgacaaggtggatatctgggaagtgttgagaggccaaaacgtcgtgggctccgatctcctgccagaagatgacgagcagctgcaacgtggccaccgcttatcctcgcacttattgtctccccatcgccagcagtacgggcggtattcgccctcgcccaaacaccaaccccagtcctttccccactcgcaactccaactggagccgcagactcgtgggcgctcagcctcggctggtgcgcagttcaaaaacgatttgggctacatgaagaagatcttcaaagtcctgcaggaatcgctgcttggcgcccatgcaaatctccaaagcggttcgcccgcctccgacgaagacgacgatggtggcttccggtatgtggatcccgatttggccatggccatgcgactgtcacagcaagagcagagaaagttcgaactggagcggcagcaggagcaggagatgatcgagcaggcgttaaagcttagcctgcaagagcactaa

SEQ ID NO: 37287 - protein, 701 aa, DROSOPHILA; identical to SEQ ID NO: 28593

SEQ ID NO: 37288 - DNA, 4336 bp, DROSOPHILA
cccatcgaaatggccaagcagcacaaggaagccgaggaaatggagccaaatgctttgggtcgcagcaggaaatttatagccaaagtggagcgcgaagccaacattttcgaacgcttcggagtctcctcctacctgagtctgctggtcatctccgttcacccctcaatgaggcaaagaggtatcttggtcatactttccaaatgtctctttaaattgggtcgcctgcggggactccgtctgttcatcggcagtggcaccaatcactactcctcccgatcggcgatgaaagcgggatgtgagtgcatccattcggtggcctatgctgactacaaggacgaacagggccgaccgatatataatccaccagcgccccatacccacattcgggtcttggcctcaaaactttaataaattagtacgaattcgcaaaactaagtaacaaataggggtgttttcttatatcgcaagaacctttggacttgacaattgatagagaccgcccaggtgaaaattcatgtccagatggagctaataaagtaataaaatttaagggctctactttattgtgcacagattgtgttgattatgaatttatcaagtacgaagtaagcacttttcactgctatgtaaaccacttgatgattgcaaacggcataagcctcttgtgggctcacaattgtactttttctttaaagtcgtcaaatttatgtttctcgtttcgaaagtgcgttgtattttatttctgtagtgtattgttttgtggtacatatagaaattttgtttgatttgtgtttcccttaaatgatatgctcactaatgtgatcaattttagaaagtacatatgtattatattcgctaagttatatgtattaaataaagcaattagaaaatgtcgaatccaaaattgaattatcttaatttaaaactaactgaaataaccggttggtgctgccagacctttaaagtgtccggtggtatattttctcaatgacaacaacggtcacactgcattctgctcttcaaaaaatatttactagataaaacacttggaattcggcggatttgagtgtagtttttcgactcacgcatctaatgcggcacagtaatgacataaggatcaagtgcaatatattgagtgtgccatttgttatccagtagcgcccctattacagcaggatgcaggatgccacggctccggatccggaacccagcagcaccaacggcaattgctccgttgaacatgacaatcggcaggatcaggatgagaaccacgtaggcgccgagcgggaagcggaggccaacgatgccaactgcaccgtttgtggtgccgccaaggcatcggcgcttttggatctgcgctccaaccatgtaatgcaacgtcgcctaagtcgcgactggaagattcatgtgggtactcaagacatcatccaattccgacatccatgccaactctttgaattcgaattctttaattatcaggcagatgtaatccgatccacattgaaggccatttgcgtggagtgcgtgtgcaagctgaacatgcactcggaggtcactcgatccctgatgcagcgcatgcaacggctgcagcgttccggtggtgaaaccaccaaggtgacaaccaccacgacatcgcccagccagcacagtccacccattgctgatgcagaggtgtcgaccaccttgattgagagtcaggaggaggtggcccacagcgggcagagcgttcgctcgcgttcttcctgctccgtgctggaagtatacctcgctcaacaaccatattctccatcggccaaggaaacggaagagaagcatgcggagggctggaaatggcgaacacggctggagtgtcacgaatgtggtcgggcctattttcgacgggattactacgcccagcacttgaggcgctgctccaaaacgcgcaggaagcagccacgtccatcgcgcgtcaaatgccgggtactaaatgaggcgagctatgatgaagaggcgccatccagagccatccgatcatcgcgcatatactactgccggcattgcgacgcagagtttgagaccttaatcagtaagcgacagcatgagcgaatgaagcatcagcagcgatatccgtgtgatttgtgcgaagcccagttggacacgaagtacgagtgggaaatgcatcacaccatctgccaggccaagcaggaggttagtatgcatgtatcccccaaaaatgatatacttatatgttccgttttttctgtacaggccttagcaattgtggagcagcaggaagctggccaaaccgttatgacttcccgggtgccaagggcatgctcgatgcgctctcgctcacgggcatgctccgaagcctgggataggtacgacatggatgaggaggaagaggacgaagaagatgaagagatagaaagcggtggggaggaactagaagagggcgaggaggatgccatgtacgcgcgacgtatgaactttactggcgactggattgttaaccacagccgcagcaatagcaacagcgctggtaatctctcccttttgtacggagactacggaatggtggaaacgcacatgaccaccgacaaggagtatggtaaatatcctttgaaatatgttatcgttctgtatcaaaaagtcttgctatccgttttcagatctttacctactggacctgctcaagacgcaggtgcgactgaaatcattcacttgtttcacgcctgactgtggctaccagacggacaccctagtggctctaatgaagcacgactacatggagcactggaagatgagctggttttactgtcataagtgcggcgatgtgttcaccagcaagtaagtggggcagcgatctttttaaagaaagtagtttattggtttatttgtgttccttgcagggtctttttagactaccatatgcatctccagaaccgcggcctctacatctgccataagtgccgcgaagagtttgagttgcagcaccagttagatcggcatttccagctgcacaggaaagggatcaattaccactgcaatttctgccgattggagtttcttagcgaggctaagctgctggcccattgcaaaaagctggggcacagtcccaacgacgagcccctcatcagcattgatcgttcgctctcgattgtcaactgccatgtgccacggtcatcggactattctcgaatagtcaagtcgtacgaagaacgtgagttctatattccgcgaataccgatgccctccacgcagcccatgcacttgcctcaacataaaccctttcgtttcgctatcggaatatgtgatttcgaggagcgaaatccgaactgcgttggatgtcactgattacgaacttgttgtgagctccattcttcgtctgcaatatattcgaataggtcatgctacacgttactagtagagtgtaaagtgctaatatgcacactctttggtcgagcaacgaggaactcgactattgcgttctctttgtataatcaactctagtaaatttagatatgcatattttttataataaatattgtgccgttgtcagataaaagagcattagttatttgattcttcagtcagtttatttcgcgttccttcgctgatctttacatgatgaaagtcgggtgtctagggataatttaaattgcagtacaattcggaatacttaaaactagatttataattcgcatgtgtatgtgtggactatgatgctatgtacagagttactcgtataacaatttaacattatcgaccgtacgactatataagttgcataagtgtaggtgtttataattaaagagcctattgcattgcccccagcgcatgttttcatgtgtgttgttttttgttttgttttgttttgtcttataaatagtttagttttagtgcttacgtttagttgatggccttagaactaatcaatttgcgggaaacttacagattttcaactaaggatctcgattcgtatttaagtttagtttataattttattttattttattttaatgcgtgtgctcttgctcgtggtacgtttgagtcggtgtcagtcttataaattcaacccaggacgatttaaatatctcgctaacaggataacatgaggctaacaaagatacgctatttgaggtagttctgttcaagtgggatcttctggtttctcttcgattcgaaaatcataaaagtaaggccacgtacatgcatggtcgttataaataatctagtgctaataatttttaaaacaaatcactggcatttaacaaagttgtacaaggtgtagctaacccgctaacccattctgatgggagcctctactgctctgtccttagatagctcctccacc

SEQ ID NO: 37289 - DNA, 1949 bp, DROSOPHILA
tcacactgcattctgctcttcaaaaaatatttactagataaaacacttggaattcggcggatttgagtgtagtttttcgactcacgcatctaatgcggcacagtaatgacataaggatcaagtgcaatatattgagtgtgccatttgttatccagtagcgcccctattacagcaggatgcaggatgccacggctccggatccggaacccagcagcaccaacggcaattgctccgttgaacatgacaatcggcaggatcaggatgagaaccacgtaggcgccgagcgggaagcggaggccaacgatgccaactgcaccgtttgtggtgccgccaaggcatcggcgcttttggatctgcgctccaaccatgtaatgcaacgtcgcctaagtcgcgactggaagattcatgcagatgtaatccgatccacattgaaggccatttgcgtggagtgcgtgtgcaagctgaacatgcactcggaggtcactcgatccctgatgcagcgcatgcaacggctgcagcgttccggtggtgaaaccaccaaggtgacaaccaccacgacatcgcccagccagcacagtccacccattgctgatgcagaggtgtcgaccaccttgattgagagtcaggaggaggtggcccacagcgggcagagcgttcgctcgcgttcttcctgctccgtgctggaagtatacctcgctcaacaaccatattctccatcggccaaggaaacggaagagaagcatgcggagggctggaaatggcgaacacggctggagtgtcacgaatgtggtcgggcctattttcgacgggattactacgcccagcacttgaggcgctgctccaaaacgcgcaggaagcagccacgtccatcgcgcgtcaaatgccgggtactaaatgaggcgagctatgatgaagaggcgccatccagagccatccgatcatcgcgcatatactactgccggcattgcgacgcagagtttgagaccttaatcagtaagcgacagcatgagcgaatgaagcatcagcagcgatatccgtgtgatttgtgcgaagcccagttggacacgaagtacgagtgggaaatgcatcacaccatctgccaggccaagcaggaggccttagcaattgtggagcagcaggaagctggccaaaccgttatgacttcccgggtgccaagggcatgctcgatgcgctctcgctcacgggcatgctccgaagcctgggataggtacgacatggatgaggaggaagaggacgaagaagatgaagagatagaaagcgactacggaatggtggaaacgcacatgaccaccgacaaggagtatgatctttacctactggacctgctcaagacgcaggtgcgactgaaatcattcacttgtttcacgcctgactgtggctaccagacggacaccctagtggctctaatgaagcacgactacatggagcactggaagatgagctggttttactgtcataagtgcggcgatgtgttcaccagcaaggtctttttagactaccatatgcatctccagaaccgcggcctctacatctgccataagtgccgcgaagagtttgagttgcagcaccagttagatcggcatttccagctgcacaggaaagggatcaattaccactgcaatttctgccgattggagtttcttagcgaggctaagctgctggcccattgcaaaaagctggggcacagtcccaacgacgagcccctcatcagcattgatcgttcgctctcgattgtcaactgccatgtgccacggtcatcggactattctcgaatagtcaagtcgtacgaagaacgtgagttctatattccgcgaataccgatgccctccacgcagcccatgcacttgcctcaacataaaccctttcgtttcgctatcggaatatgtgatttcgaggagcgaaatccgaactgcgttggatgtcactga

SEQ ID NO: 37290 - protein, 590 aa, DROSOPHILA
MQDATAPDPEPSSTNGNCSVEHDNRQDQDENHVGAEREAEANDANCTVCGAAKASALLDLRSNHVMQRRLSRDWKIHADVIRSTLKAICVECVCKLNMHSEVTRSLMQRMQRLQRSGGETTKVTTTTTSPSQHSPPIADAEVSTTLIESQEEVAHSGQSVRSRSSCSVLEVYLAQQPYSPSAKETEEKHAEGWKWRTRLECHECGRAYFRRDYYAQHLRRCSKTRRKQPRPSRVKCRVLNEASYDEEAPSRAIRSSRIYYCRHCDAEFETLISKRQHERMKHQQRYPCDLCEAQLDTKYEWEMHHTICQAKQEALAIVEQQEAGQTVMTSRVPRACSMRSRSRACSEAWDRYDMDEEEEDEEDEEIESDYGMVETHMTTDKEYDLYLLDLLKTQVRLKSFTCFTPDCGYQTDTLVALMKHDYMEHWKMSWFYCHKCGDVFTSKVFLDYHMHLQNRGLYICHKCREEFELQHQLDRHFQLHRKGINYHCNFCRLEFLSEAKLLAHCKKLGHSPNDEPLISIDRSLSIVNCHVPRSSDYSRIVKSYEEREFYIPRIPMPSTQPMHLPQHKPFRFAIGICDFEERNPNCVGCH

SEQ ID NO: 37291 - DNA, 3076 bp, DROSOPHILA
ctacgcaatagtagataaaaaatatccatacatatataaaaacaaccgagatcgattgaaaatgtgaaacgttgggaaacttggtatggcccctcccccttaaaaaacgcattcacaacttgttgcccgtttggaaatgtgtttatttattgcttttatttggtgcactaggtgatctgcatgtgtgcgagttgtttttcacaatttgttatttgcacacagagcagatccacccacacctgtgcacttcccaattgtatgtggatgtgtgcgtgagcagaagaagcaaaatccacagatttacaatttgcatccttaccgaataagttaaattcttgacttttccaatgttcctttgttgctccgctctttttgtcgtttgttctttgacattcaaattgtgatttcgatattttggtgcttttcaatctgaatcttttccacttttgccccttcgatttcctcgttggctttgttttcgtttttcttttctcacacactcacaactacacacacagttcacgcaaaagctccgctttgttttaatttagttatttattttatttttcgcagtaaacttaattaaatgtatttttcacgtcgctcttttcgcgatcacaaaacagcagtgtgaccataaaaggtgggttgaaaagcccgaaaggttttgggttaaaattaccaaatcgagaaataccaaatttttaagactttcatttccttgtttttttttttttaatctacaaaagtattaatttaacaatcaaagtctattaaatatttttgaatagtcaaatattaatgtgtattaagtttttgtttaaaaatatatatgttattcttttttcttttcatttaagctacaaataattcaaagaattatttctcaagctagcgttaggcgccaagaccgtttgttttctttaatttatggtattttttgaaataccactgacttatgtagtgttgcgtggcgaagtggtgtttcagtgttgtgaagcgccgtaagtccgtttgatttccgattcggcattcgaaattgttttcccttaattttcgtgtcgaatacaagatttctggaaatgaagactgtgccgaaaaagaaggaaacggccctgcgcttgcgggagtcgcgccgtgaggagcagaaaccagagacgacaaacctgccgccggacgacgacgcagagtcggatttgcccattcggggccgtccctcgaagaagctgctcatccagcagcaacagcagcgtcagtaccaggtaaagctagatccgaaagtcaagacggtcacgtcgggctctagcgagaagccttcgacatcctcgagtgcagccgcagccggcgccggaggacgcatcaaggccaggagagtgctctacaagaagagcgttggagcagcggcagtcgcccagaaggcgcccggcgagacctacgtaatgcgcctgtttgagcgaagtttggacctgtccaaataccaggataagactcctttgtaccccatatgccgcgcatggatggcaaatcaacccaagaatccagctgtgggtgcatttcaaacagatgcttcactcacggccaccaaacgtgaggacaacggcgaagaaatcctgtcccaaattaaaagcggcgagataaaggtgatcaaccagctcccgcaggccaagtccacggatctgcccataattccgcctcgtctggagttcagccaggaggacaagaagcgggaaaaggctctccaaggtgccagtacctccgatcttctgtcctccaatatgaaccgctggaagaaagtgcgcggacactggataaagcatatcaagaagtatgaaaaggagcgatatgaagttattgacaagattatgagcttggtctgcaaaaactgaagcgtatctaggtgattttggaagtggtatagaaaatgaaaaataatttggattaattgtgcacaaagaattaaaaaaaatcctgtttccaaatcgaatatatatgcaaataagatgcttgtacactttatatacttatataaaataaaatcaaatttgtcaagtagaccacttcaagtctatcaagagaatgataaagcgtttttatatttgcatattttcctgattaaaaaataatatgaaatgcatttgtattgcagcacggaaaggcaaccgcagctgatttgattggattatcccaagatttttgataagaaagacatttgtcattgacttgaataaatgtttatttgtattggtagaagatgcgttccctttgcggttaaattagttctagtttagagctgtgtatgaagttatcattattattttgggttggcaaatgctgctggattgttctggttccgattatgatgttcttcggctcgtcgccggtgcgccggtccgcaaccccctgcgatttggtttggggtatacacattgggcatcctgtgcgcctattcgaccttgagcagctcgacgtcgaaggtgagggtggagttgggcggaatgacgccggggtggccacggctaccgtaggcatagtccggcgagcaaatcagcttggcgcgctggccgacgctcaactgggcaactccctcatcccagccacggatgacctcgcccttgccgatggtgaacttgaatggcttgttgcggtcgcgcgacgaatcgaactgcgtggaattcaaggcggatcattagctggggatggcgaggatcgggattcgtactcaccttggtgccatcgtccagggtgccggtgtagtggaccgtgaccttttggccattcttgggataggtgctgcctgcgggcggggaatgcaaaaatggatgtgtgtgagcgggacgaccatattgtcgcaggtatttccgaattgtgcattgcgaaaatgcactaaataggttagaaaggccggtagtttacggcatttcttgcggattctaacccaatcattggatactcaccatcaccaggagcaattggaactacttgtacgcccatttcgattagtttttttctggcaaattaccgagcggaaaataagcacgttgatttcagttcgtcgcgtcgccgaatgacagctagc

SEQ ID NO: 37292 - DNA, 1076 bp, DROSOPHILA
cgccgtaagtccgtttgatttccgattcggcattcgaaattgttttcccttaattttcgtgtcgaatacaagatttctggaaatgaagactgtgccgaaaaagaaggaaacggccctgcgcttgcgggagtcgcgccgtgaggagcagaaaccagagacgacaaacctgccgccggacgacgacgcagagtcggatttgcccattcggggccgtccctcgaagaagctgctcatccagcagcaacagcagcgtcagtaccaggtaaagctagatccgaaagtcaagacggtcacgtcgggctctagcgagaagccttcgacatcctcgagtgcagccgcagccggcgccggaggacgcatcaaggccaggagagtgctctacaagaagagcgttggagcagcggcagtcgcccagaaggcgcccggcgagacctacgtaatgcgcctgtttgagcgaagtttggacctgtccaaataccaggataagactcctttgtaccccatatgccgcgcatggatggcaaatcaacccaagaatccagctgtgggtgcatttcaaacagatgcttcactcacggccaccaaacgtgaggacaacggcgaagaaatcctgtcccaaattaaaagcggcgagataaaggtgatcaaccagctcccgcaggccaagtccacggatctgcccataattccgcctcgtctggagttcagccaggaggacaagaagcgggaaaaggctctccaaggtgccagtacctccgatcttctgtcctccaatatgaaccgctggaagaaagtgcgcggacactggataaagcatatcaagaagtatgaaaaggagcgatatgaagttattgacaagattatgagcttggtctgcaaaaactgaagcgtatctaggtgattttggaagtggtatagaaaatgaaaaataatttggattaattgtgcacaaagaattaaaaaaaatcctgtttccaaatcgaatatatatgcaaataagatgcttgtacactttatatacttatataaaataaaatcaaatttgtcaagtagaccacttcaagtctatcaagaga

SEQ ID NO: 37293 - protein, 267 aa, DROSOPHILA
MKTVPKKKETALRLRESRREEQKPETTNLPPDDDAESDLPIRGRPSKKLLIQQQQQRQYQVKLDPKVKTVTSGSSEKPSTSSSAAAAGAGGRIKARRVLYKKSVGAAAVAQKAPGETYVMRLFERSLDLSKYQDKTPLYPICRAWMANQPKNPAVGAFQTDASLTATKREDNGEEILSQIKSGEIKVINQLPQAKSTDLPIIPPRLEFSQEDKKREKALQGASTSDLLSSNMNRWKKVRGHWIKHIKKYEKERYEVIDKIMSLVCKN

SEQ ID NO: 37294 - DNA, 4478 bp, DROSOPHILA
agtagcagacatagacaatcgcagacaatcgagcaaatcccagaaaaaacgacaggcatcaaatgccaaatccatcgtgcaaagctaaccattccaattggcctaatctgattcatagttgaaattgtgataaaaaacaaaaaccaaagaaactgggacacatttcgatctaagcgaaatatcccctatcccacaaactttttccggactttcagtttggcctttgaatgctgctgcagcagtgcggaaaaatcatcaatctcgatcagcatttcaccgagtgctggaatacaagcccattgcgaaactttgacttcatcatctcccttctgagcgttatttccctaagtggtgggtggtgattttagccatgtatttacaatgtataactaacttttgatgctcctcctccgcctccagttgttaagatggccgccattccacaaggtgcattcgcagcctgcaagattcgcgagcaattcaacgaacgtgagctgatcatcgcccgtctgaggtccgctgccgcagataagggttccgttgacaacgggaacgccctaacccgtaagtgcacatgacgatccacgatctcgatccgctgggtcaatggagctcatacgcatcaattttgcatttccagaacgcgagtactcgcccaacaagtacaacgacaagctgatgaactccatctggggattgtacaatcgctattccccccacaatgtgaagaagaacgagtacgcccccaccaagtgatgacctaaagtggggccacgttcgcttccagctgacgtgccccaaacgcgactagcatccccaccaggatgttggtcaaaatcaattatatattatatatacacaactataatctcaagcatatatcgatttaaacgcacataacactttggtaacaaatatctatttaatgctgtaatgttttgtaaaattcaataaatacttatgatattgtatgtaaagggacaagaccatgaggcgtagtttaatttaaatagcaggactcgtaggtcggcaccatgtacttgatgttgatgaaggcatcctcgccgccatgcagttccagcacctgcagcgtctcatcgatcagatcccccagattcagattgttcttctgggcatagtcgatctcatcgccgcagtttactatacagcacagaatatccacttcaatggaagttactggaagtaatcgagtttagtggaatacctacagtttttcaccttaaatgcattgaacatgggcagcaactggcggtagaagggcaccagggcgggtcccaccaaatccgaggacatgaccagctgttggattatcttcaatgtcgtgcacattacctccaggtttcgtgtgctcaatgcgtctgcaaatgggggcgtatttggttttggttttgtgctcgcattggcaaggtgcaaattagaccgaaaaacttcgaggcatttgcgtgccagccaatgccctggtactcactcttcagcggcaatattaattgcggtatcaccgggtgtatcttctcgcccccggccaagaggagatccgtgaccccctggcgggcataggtcttgtagggatgtttcgtctccgccagtccgtcgaagaagagcggcagatagaggctgtagtccagcttttcaatgtccacctaggcgagatacgggaagaggtgacaccgttggcgggtcaaaggtgaatagagccgctccaagttcgaaattggttcgtgtaccggcggtggcgcaagtcttgcaagtgtacatttgcacgccatgccggttaggcgccctagctgatttccattaagatgctctttgtttgcttacgttgtcagtggaaaatttttagaacacatcgagaaatgggcctgtacctgcctatagactttgcagtgctaagtctagactaatctttgttcgagagtctgctttgagtatagttaccagcttagcttagttgatttgagctaacaaagggttataatataacccactatcttaaccagattgtattgcatatatgactgaatgactcagaataggaattttactttgattttaagaagacagcaactttatatttaagtcaaaggcgacatcgctggcatcgcagctgcgtgagcctcacatatgggtttccccaacatcgaccttcgaccccgtgacgtaaatcaggcagtgtcactcacatatcactctcctgtcacgacggcatttcggcctagataaacaaacgcaccacccaaatgacatacgccgcatatgtggactccacatcgaatatggagtgccatccaaggtctgtgacattgaaccagccaaaggggtcacacacacactcatgcgaggtgggtgggaattggttacacataactttccgattgcagcggagttccatgggaaattgactgacagttggacggtgcgacgttttgaatgtcagtagtcgcattccggacggaatcgcttgcccgtcagccgtggagctctactaactccggaaatagacaatggcatattatttactcggtttttgctttcacctgcaacacttgaaataattggacacgcaggtgtacgaaactcgagctaaattcaaatatgggctttgtctatgggtcaccgagtggtaaggttacccctttctagtgacagtcgtgcaatttcatttgatttttatttgcattgactcacatttgtatagttgaagtttaagtttgccaacagacatatggaaaattctagctatggttacaaaaataaatcattacccgaatgtaagggcttaaaaagaattaagtttaaatgtatgacctatccaaatttcgaacaatataacttaataccatatatatagtataattaataagtcaactaacaacgaacctaatggaatttagcgccctaccaaataattcccaccactcaccgtccatccgattttgtcgcccccgcagaggtactccatctttatgggcaggtcgccgcggtcaaagtacattcggaagagggttcctcgtcccggatcattagccccaccggtggagcagccattaagacccatgcccaagttgaaggtggacatggacttttgttggcgcctcagaactgaaaatcagtacaaatgcaaatgtgggcagggatgtcattagggaaacaaataccgatgggcgaaacacccaaataaacaaactaacgcacttttcggattgggcacccgactcctggcactggctgtcttgggggcggtttcgtggatgggtccgtcgatgacgaccgtgttcttttgctgcgactgaatggagaagggtggaacgtagcgcggacgcgacgagaccgccgctccatggatgccgctaagtggacgcagttgcgccggattggcggacttggagcgcgtcggcctgtggtagtcgtgcgtgggacgccttgccgtcgcggtgcgtgccgtttgggccatggccatttccggttgatgcgacgatgtgcagccacgtagtgtaaacagcgaactgccgagcgaaggaatttctgtagccaggctggcactcctggtgttggcgttgcttttgctgttgctgttgggtgtcgtgtcgtttctatggagcacgttgctaaggcctggggcggcttagtgaccgataagccagcagttggagctaaagccgcttgctcgcattcgctgcggtgctctcttccagtcgcatttgttacaataacaagccggttagccttataggcgccagttatgttgttattatcattcgactatgcactaaccaaagtccccggactgcatgtagatttcccaagcacttttattgggcatttcaggtcagcgaactcatcggaatgaaggggatctgggttttctgggggcgcaaccgcagattaacaacgacaaattggcacagctcatgtcaatcatgccaacattttattctatttgatgaacaacaacaatcgatccataaaagcaatttaattttatatacagaagtaataaatattaaaacgtattcaaagtgaaacaaattacctaaacaacttaatattataaatattatatgttaatcagaatttactaaatctttttaatcaaagtacaaagtaaatcgtcataaatctaatcaatagccatgagaaaaacatagaaatgccatcatcaagcaaagatttcaaaaaagaggtaagcatgcgtgagttgtaaatttaattttaaccttataattctgagccaataaattaagttttaaaaagcgcgccaagagaacttatcgataaatggctaattctgctatgcagcactggtgctttgtttacattctgcggtgttcggcgtttgtctggcaacgccgcacctgttctgtgcgggtggcgtgttgcaaagtgccgagggcactgagaactactagtgttggctagcgatcgagtgcgaataaagaacaaaagtgtgatatgtcgct

SEQ ID NO: 37295 - DNA, 927 bp, DROSOPHILA
atggccatggcccaaacggcacgcaccgcgacggcaaggcgtcccacgcacgactaccacaggccgacgcgctccaagtccgccaatccggcgcaactgcgtccacttagcggcatccatggagcggcggtctcgtcgcgtccgcgctacgttccacccttctccattcagtcgcagcaaaagaacacggtcgtcatcgacggacccatccacgaaaccgcccccaagacagccagtgccaggagtcgggtgcccaatccgaaaattctgaggcgccaacaaaagtccatgtccaccttcaacttgggcatgggtcttaatggctgctccaccggtggggctaatgatccgggacgaggaaccctcttccgaatgtactttgaccgcggcgacctgcccataaagatggagtacctctgcgggggcgacaaaatcggatggacggtggacattgaaaagctggactacagcctctatctgccgctcttcttcgacggactggcggagacgaaacatccctacaagacctatgcccgccagggggtcacggatctcctcttggccgggggcgagaagatacacccggtgataccgcaattaatattgccgctgaagaacgcattgagcacacgaaacctggaggtaatgtgcacgacattgaagataatccaacagctggtcatgtcctcggatttggtgggacccgccctggtgcccttctaccgccagttgctgcccatgttcaatgcatttaaggtgaaaaacttaaactgcggcgatgagatcgactatgcccagaagaacaatctgaatctgggggatctgatcgatgagacgctgcaggtgctggaactgcatggcggcgaggatgccttcatcaacatcaagtacatggtgccgacctacgagtcctgctatttaaattaa

SEQ ID NO: 37296 - protein, 308 aa, DROSOPHILA
MAMAQTARTATARRPTHDYHRPTRSKSANPAQLRPLSGIHGAAVSSRPRYVPPFSIQSQQKNTVVIDGPIHETAPKTASARSRVPNPKILRRQQKSMSTFNLGMGLNGCSTGGANDPGRGTLFRMYFDRGDLPIKMEYLCGGDKIGWTVDIEKLDYSLYLPLFFDGLAETKHPYKTYARQGVTDLLLAGGEKIHPVIPQLILPLKNALSTRNLEVMCTTLKIIQQLVMSSDLVGPALVPFYRQLLPMFNAFKVKNLNCGDEIDYAQKNNLNLGDLIDETLQVLELHGGEDAFINIKYMVPTYESCYLN

SEQ ID NO: 37297 - DNA, 3278 bp, DROSOPHILA
tctggcggcattataagctctttaaaactcccgtttataaatctgacaaaggtttctattattcggtatgtacttccatcatagtgtccttgcgattgaaataagtgtggcaggtcctgtcgcaatggtgtagtaaatccaaagcctcctacatccgagcgagcattctgcacctgcttccaaatcttccccatgtacttcaaaaaatctgtgcgattctcgaaactcatgacgggaaacttggagaccccaaagagttggttgacaccctccatcgattcgaagtgcaccatagagttgaagaactgctggttgtaggcaaaggtcagaaggtcgtagattggatgcatgtcacccactttgtccacatatattaccatcgagacgtagaagtgtcgtccaagtagaactttgctaaacaccttcattatgggatcttccgctccagtggtaaacacaaagctcatgtggtttcttctcgccgacgagtaaatcattcgcatctctgtattattattcaccaccgtctgagttgccgactttccgaaagcctcgtcaatgcgcatgatgaactcatctagttggtccaatcgctgatgcggactaacgaaccatacgatctcctggaacacattcattcgaccgaatggagccaaaagattgagcaagtgttgcatgttccaaccatggcttggatgatatgtggtcaacaagaaaaggcaaatccgaaacgatgaccgcatgactttcccttagaagcaccaagaattaattgaaacgctccacgatttgtaagccaggttaatttttatgccccaatatatttcttgttaactgctcccatgggaaaactaatacaataccttcctagctcctatttgaataacctctactaaagctcagtgcattctgagtccttttcaaagttattaaaatcacatttaagcattatgataagtagtaagcccttgataatagagaacaatgatatttccacttgttagtaatcgtagcactcaaatcgttcatactgtggacgtctttgctttcgtcgatggataaagagctccaaacagaaagccagcgaactaatgggtattcccgcggataagacaatccacgccgtggtgaagaactccaagtttagtggttccaccggatatgtgtccaggaatactttcgcgtagccagcctgctcggcataccgaaaggctagctcttcccagtagttccacaagcccgcctgccaaacgttcagaatgaacttgttcagtgagtcggcaaagctggcattggatgccatgggcaaggcgttgaagaggccgccgaagcacaccttggacagatgaaagtacggctggatgagcaccttctgctgtcggttgaagaacaaccaggcatcctgggtgaccacataggcgtaggaacgcgatggactcgccagcagggcctggtactcctgtcagctgcgcgcatcaaattgcggatccaacgaggaggtgttcaccaccggcagccaacgcagctcttccagcagcgagtcgtggataacgatgcgcagtctcgagtggatcagatccgaccaggtgtcgatgggccgcagaaacaccggcttcatgtcgaaggccgtcatgtggctgaggtggtaattggtcagaatgaaaccaaagatgtagagtagtgtgtagaagattatgacgcgaattgaggcgtgcttcagctttactgacatgttcatgttggcactgaacatcaagagggccatagcgtgaagcacattcctggtgtatgatcgggtggcattccccggctcccgccagtgcacatatctcagcaggagcgcgacatagaaggtgccgaggaagaggcatgtccagatgtacttgcccagcggccacaccatgtacatccacttgggcagctcgggagccaggggtaccataacgcagttcgtcatcagctccagcggataactatgctgcgtggcgttgaagaagtcactggtttcctctggccgaatgataaccccatggagcgagaggttgtacttgccgctaataatgtcctgttccaccaccgatttcttgggcaaactctcgagagaatcaagaaacagctggtagtggtacacctcagcgaagtgcttgactatctccatgtagggaccacagaacttgggcaccacaaactgcgtttcgttgaagataaacgcgtgggggatgtcaaaactatatggcgagcggatcactccactggccaggtccgtgtcaagcagcattttatggccgactacggattggcgtgctcctggccacattttatatggctgtcatattattgatgccacacgcaaaaaactggcattggcagaccaactggcacccacgtgaatggttatagtatacgaaatccggtttattttagtgcaaagttcaaagatctcagatgtttaatgacacgtttttgtgtcctgccgattatcgttcagattccaaagcccgctaactaaccaacacatcgataaaaaggacaccctagaaagtaatatgccacttataaaaaaatattttcgcgaatgcgaactggactttgttacggattcccaacggaccaacccacatcacaacctttgtgtagttattggagcgcaagtactttcaccgctcacaaaaagcgtccagttttttctataatcaaaaaacaggccacgaaattcacaaaaaaatatttgtataaggacttggcgagtgtgggaatgtgtatttgaattggcagctttcgtgtaaatacttttcaattttttagggtttcgacggcacaaaacgacgacgatttccaccacacccacacacacacacactcacctgtgttttacaagtgggccagaataaaaacaaaactgccattgaaataattctgcacttgagggtaattacattatcgttaaattcaaaatataatgaaactggattgtacaagttcaaattggcgagctttggttgccggcaatccaaacctgttcatggttttatgaaagcaaaagttcgcgtatattcatatttgtacttgtttccagcgaaatgtctgacttttatattaattaattgaagcgcaagggtgcaacaaagtattaatcccctgttatagatgaatacagacatcaattttgcaaacatttttatttatggcgaaattaatgaatgccagtagctatgatattctatggacttttcgtgtttgcacacaaaaaagtgtcgacatgaaatggtgtttctggc

SEQ ID NO: 37298 - DNA, 1227 bp, DROSOPHILA
atgctgcttgacacggacctggccagtggagtgatccgctcgccatatagttttgacatcccccacgcgtttatcttcaacgaaacgcagtttgtggtgcccaagttctgtggtccctacatggagatagtcaagcacttcgctgaggtgtaccactaccagctgtttcttgattctctcgagagtttgcccaagaaatcggtggtggaacaggacattattagcggcaagtacaacctctcgctccatggggttatcattcggccagaggaaaccagtgacttcttcaacgccacgcagcatagttatccgctggagctgatgacgaactgcgttatggtacccctggctcccgagctgcccaagtggatgtacatggtgtggccgctgggcaagtacatctggacatgcctcttcctcggcaccttctatgtcgcgctcctgctgagatatgtgcactggcgggagccggggaatgccacccgatcatacaccaggaatgtgcttcacgctatggccctcttgatgttcagtgccaacatgaacatgtcagtaaagctgaagcacgcctcaattcgcgtcataatcttctacacactactctacatctttggtttcattctgaccaattaccacctcagccacatgacggccttcgacatgaagccggtgtttctgcggcccatcgacacctggtcggatctgatccactcgagactgcgcatcgttatccacgactcgctgctggaagagctgcgttggctgccggtgtaccaggccctgctggcgagtccatcgcgttcctacgcctatgtggtcacccaggatgcctggttgttcttcaaccgacagcagaaggtgctcatccagccgtactttcatctgtccaaggtgtgcttcggcggcctcttcaacgccttgcccatggcatccaatgccagctttgccgactcactgaacaagttcattctgaacgtttggcaggcgggcttgtggaactactgggaagagctagcctttcggtatgccgagcaggctggctacgcgaaagtattcctggacacatatccggtggaaccactaaacttggagttcttcaccacggcgtggattgtcttatccgcgggaatacccattagttcgctggctttctgtttggagctctttatccatcgacgaaagcaaagacgtccacagtatgaacgatttgagtgctacgattactaa

SEQ ID NO: 37299 - protein, 408 aa, DROSOPHILA
MLLDTDLASGVIRSPYSFDIPHAFIFNETQFVVPKFCGPYMEIVKHFAEVYHYQLFLDSLESLPKKSVVEQDIISGKYNLSLHGVIIRPEETSDFFNATQHSYPLELMTNCVMVPLAPELPKWMYMVWPLGKYIWTCLFLGTFYVALLLRYVHWREPGNATRSYTRNVLHAMALLMFSANMNMSVKLKHASIRVIIFYTLLYIFGFILTNYHLSHMTAFDMKPVFLRPIDTWSDLIHSRLRIVIHDSLLEELRWLPVYQALLASPSRSYAYVVTQDAWLFFNRQQKVLIQPYFHLSKVCFGGLFNALPMASNASFADSLNKFILNVWQAGLWNYWEELAFRYAEQAGYAKVFLDTYPVEPLNLEFFTTAWIVLSAGIPISSLAFCLELFIHRRKQRRPQYERFECYDY

SEQ ID NO: 37300 - DNA, 3704 bp, DROSOPHILA
atttctacagtccatatgcacattgacgtacagtgtgcccactttcatcattcgcacgccaacattgcgtatgcgctatctctacattctgctggctatctggggaatagtcacatcgaatttatacatttcccggatgaccagctacttcaccacagccccgccagtgcgtcaaataaacactgtgcaggatgtggtggaagccaatctgaggattaaaatgctggccattgagtatgagaggatggccaagtcaccgctgcaatatccagaaagctatttgaaccaggtggatttggtggacaagcacatgctggacctgcatcgtgatccattcaacacctcctttggctacacggtaagcagcgatcgctggcggtttcttaacttgcagcaactccatcttcggaagcccatcttccggttaacggaaatatgcgaaggaccgttctaccacgtgttccccctgcacaaagactcccacatgcgctccgtgatgaccgaatacatcatgatcgcccagcaggcgggcctaatgaaccattgggagcgcgagacgttctgggaggcagtgcatctccaccgcatccatgtgcacttatttgacgatgagccgatggcactcagcctggatttcttctccagccttctgcgcacctggactttgggtctgatcctagccggtctggcttttgctgccgaaatgaagtggcacgagcatgtgaccttcaaacgtcgtcctgttatacggataacccgcaagcccagatcgtttctcaggcgcttcatgaaattatgatccaagaaaaagatcctctctgaaaacatggaaacataactttcagtggtatcacaaaaagcttgcaggattttgtagatttctcactttgaaaacagtcttagaatttacatcaacaaattaggtttaattgaaaaatgcactgtatttcccaataaagaagtccatttagtaataattcgaaattgtataattaaaccttcacctagaaagagtttccaggacaaacacgatcccggccaaaaaactcatcacaagcagcaggataaaggcaatggccagatgctgcagtccagcagatgtatactcctgcgtgtccggcattcgttggaccaagcctgcatggagggcagatccaaagctgctgcgagcatagaagttgagaagtcccgaagaatggatgcggaacgtgaagtactcgatgtcccgccacaaggacgaatccatctggaggggaaaagccaggtggtaggagccaaagcaaattgagcttagcttgaagagtcgctgcttcagatgtttctgctgttcgtcgaggaactcccagtgatcctctgtgacgaaataggcaaaggagctattgaaacttgtttggtgctccgagaatactgccgaatccacggggcgtagaagctccaaaaactcctggggcaactccttgttcagatttagcaaaaattccatttcgtagtcaataatcatgacgggcaactgggcactcactatgtcattcatggtgttaatctgggcgtggaagagattcaccgtgaggatgctacccaaattggatgtgtagtaggcggaaaggaagaatccgtgaaaaaaaaccgtggcaagaagtagaaatcgaaggaggcagggctgttgtagctggccctcgatgggcacattgatgatataacaaaaagagttcagtacagcgccccgataacctgaccacccaccgaacatcctgagccacatcaactccagaagtaccagcgccagcaaagctcccaatgcaaaaaaccacacattccaatcaaagggctgaagtgggtagaaataggtggagacactgttgtacagcggaaccattagacaccactgaaccaccagtaatgggtatgacttctccagctcctcgtcggacatgaacaaggcgtaggcatgggcacagaactccatcttgcgttcacgtatcaattgcaaggcatctttcatattaatcacctgcccaccgagactatctggcggcattataagctctttaaaactcccgtttataaatctgacaaaggtttctattattcggtatgtacttccatcatagtgtccttgcgattgaaataagtgtggcaggtcctgtcgcaatggtgtagtaaatccaaagcctcctacatccgagcgagcattctgcacctgcttccaaatcttccccatgtacttcaaaaaatctgtgcgattctcgaaactcatgacgggaaacttggagaccccaaagagttggttgacaccctccatcgattcgaagtgcaccatagagttgaagaactgctggttgtaggcaaaggtcagaaggtcgtagattggatgcatgtcacccactttgtccacatatattaccatcgagacgtagaagtgtcgtccaagtagaactttgctaaacaccttcattatgggatcttccgctccagtggtaaacacaaagctcatgtggtttcttctcgccgacgagtaaatcattcgcatctctgtattattattcaccaccgtctgagttgccgactttccgaaagcctcgtcaatgcgcatgatgaactcatctagttggtccaatcgctgatgcggactaacgaaccatacgatctcctggaacacattcattcgaccgaatggagccaaaagattgagcaagtgttgcatgttccaaccatggcttggatgatatgtggtcaacaagaaaaggcaaatccgaaacgatgaccgcatgactttcccttagaagcaccaagaattaattgaaacgctccacgatttgtaagccaggttaatttttatgccccaatatatttcttgttaactgctcccatgggaaaactaatacaataccttcctagctcctatttgaataacctctactaaagctcagtgcattctgagtccttttcaaagttattaaaatcacatttaagcattatgataagtagtaagcccttgataatagagaacaatgatatttccacttgttagtaatcgtagcactcaaatcgttcatactgtggacgtctttgctttcgtcgatggataaagagctccaaacagaaagccagcgaactaatgggtattcccgcggataagacaatccacgccgtggtgaagaactccaagtttagtggttccaccggatatgtgtccaggaatactttcgcgtagccagcctgctcggcataccgaaaggctagctcttcccagtagttccacaagcccgcctgccaaacgttcagaatgaacttgttcagtgagtcggcaaagctggcattggatgccatgggcaaggcgttgaagaggccgccgaagcacaccttggacagatgaaagtacggctggatgagcaccttctgctgtcggttgaagaacaaccaggcatcctgggtgaccacataggcgtaggaacgcgatggactcgccagcagggcctggtactcctgtcagctgcgcgcatcaaattgcggatccaacgaggaggtgttcaccaccggcagccaacgcagctcttccagcagcgagtcgtggataacgatgcgcagtctcgagtggatcagatccgaccaggtgtcgatgggccgcagaaacaccggcttcatgtcgaaggccgtcatgtggctgaggtggtaattggtcagaatgaaaccaaagatgtaga

SEQ ID NO: 37301 - DNA, 1704 bp, DROSOPHILA
atgcaacacttgctcaatcttttggctccattcggtcgaatgaatgtgttccaggagatcgtatggttcgttagtccgcatcagcgattggaccaactagatgagttcatcatgcgcattgacgaggctttcggaaagtcggcaactcagacggtggtgaataataatacagagatgcgaatgatttactcgtcggcgagaagaaaccacatgagctttgtgtttaccactggagcggaagatcccataatgaaggtgtttagcaaagttctacttggacgacacttctacgtctcgatggtaatatatgtggacaaagtgggtgacatgcatccaatctacgaccttctgacctttgcctacaaccagcagttcttcaactctatggtgcacttcgaatcgatggagggtgtcaaccaactctttggggtctccaagtttcccgtcatgagtttcgagaatcgcacagattttttgaagtacatggggaagatttggaagcaggtgcagaatgctcgctcggatgtaggaggctttggatttactacaccattgcgacaggacctgccacacttatttcaatcgcaaggacactatgatggaagtacataccgaataatagaaacctttgtcagatttataaacgggagttttaaagagcttataatgccgccagatagtctcggtgggcaggtgattaatatgaaagatgccttgcaattgatacgtgaacgcaagatggagttctgtgcccatgcctacgccttgttcatgtccgacgaggagctggagaagtcatacccattactggtggttcagtggtgtctaatggttccgctgtacaacagtgtctccacctatttctacccacttcagccctttgattggaatgtgtggttttttgcattgggagctttgctggcgctggtacttctggagttgatgtggctcaggatgttcggtgggtggtcaggttatcggggcgctgtactgaactctttttgttatatcatcaatgtgcccatcgagggccagctacaacagccctgcctccttcgatttctacttcttgccacggttttttttcacggattcttcctttccgcctactacacatccaatttgggtagcatcctcacggtgaatctcttccacgcccagattaacaccatgaatgacatagtgagtgcccagttgcccgtcatgattattgactacgaaatggaatttttgctaaatctgaacaaggagttgccccaggagtttttggagcttctacgccccgtggattcggcagtattctcggagcaccaaacaagtttcaatagctcctttgcctatttcgtcacagaggatcactgggagttcctcgacgaacagcagaaacatctgaagcagcgactcttcaagctaagctcaatttgctttggctcctaccacctggcttttcccctccagatggattcgtccttgtggcgggacatcgagtacttcacgttccgcatccattcttcgggacttctcaacttctatgctcgcagcagctttggatctgccctccatgcaggcttggtccaacgaatgccggacacgcaggagtatacatctgctggactgcagcatctggccattgcctttatcctgctgcttgtgatgagttttttggccgggatcgtgtttgtcctggaaactctttctaggtga

SEQ ID NO: 37302 - protein, 567 aa, DROSOPHILA
MQHLLNLLAPFGRMNVFQEIVWFVSPHQRLDQLDEFIMRIDEAFGKSATQTVVNNNTEMRMIYSSARRNHMSFVFTTGAEDPIMKVFSKVLLGRHFYVSMVIYVDKVGDMHPIYDLLTFAYNQQFFNSMVHFESMEGVNQLFGVSKFPVMSFENRTDFLKYMGKIWKQVQNARSDVGGFGFTTPLRQDLPHLFQSQGHYDGSTYRIIETFVRFINGSFKELIMPPDSLGGQVINMKDALQLIRERKMEFCAHAYALFMSDEELEKSYPLLVVQWCLMVPLYNSVSTYFYPLQPFDWNVWFFALGALLALVLLELMWLRMFGGWSGYRGAVLNSFCYIINVPIEGQLQQPCLLRFLLLATVFFHGFFLSAYYTSNLGSILTVNLFHAQINTMNDIVSAQLPVMIIDYEMEFLLNLNKELPQEFLELLRPVDSAVFSEHQTSFNSSFAYFVTEDHWEFLDEQQKHLKQRLFKLSSICFGSYHLAFPLQMDSSLWRDIEYFTFRIHSSGLLNFYARSSFGSALHAGLVQRMPDTQEYTSAGLQHLAIAFILLLVMSFLAGIVFVLETLSR

SEQ ID NO: 37303 - DNA, 5240 bp, DROSOPHILA
cgggtgttccattgcaccgaaggacatgcggtgacggcaaaagccgaagctgtagcccaacttaaagccaaagccatagacctaaaccaaaccaaacccaacacaacctaaccaaaccagagccaatccgagccctggaaagccaagccctgcgcgtccttacgaggctcaccaggaggagggcacggcgagatggataaggatgaaaaaaggggaaaagtcgaggaaaagtcagggaaagcgggaaacggaagggggactcatggcaactgaggttttcaataatgcacgttatacggctcccatgccgcgtattgtattgcattttgtttatgcatgcgcccatcaaagatggcaaagatgcttgcttccaaatggaactacagtgaaaaagagaagaaagtgcactgagggaaaaacacgtcatgtcatacctacattcctacccgtcatgtcatttctgaatacgagaacatttcagaacatcatatatattcaggagatttttagtaatcacacattttttaaataatgaaaacgttcatgattttagtacacccttgtaaaagtgttttacaattaatttttcttagtgtcttaaggaatatagatagggctctgcggtattttttctgcgctgccgtagaagtttgacaaatcgatgaggtggtcccttgtacttcccaaccatttccatattcagcacccactgccattttttatgtgcttcttttatgttcgccgctgctcgcgacagaaaatctctcataaagttgtttttatgaaaatatgcaaaacaatagattatgatgtgtgaggcctattgaactttgattgcttccccccgctctctaaaaatcgaaaaatcagtttctttgagtgagatgtcatttttaatttcaacaactacaaagtggcaatataaaacatagcttccgaagacaattcactgagcgaaaacacacacagtatgcccaaaaatccagagtataacattgatctatcgagaactcgcttccttgcaatcattattaagtatttgataaagtagatccgggaagcatttgatatcgttcttcgttaggtgaccgttttcgtacatttttgagaatatctttaggtgatcggttcaaaattattattcacttcaaactttttcatttttttttacttaccaattccctgagccttgtttcatttaactgattggctctttcctttcgccagctaagaagttggtcagtttccgcttcgttgatggttctggctgtccaatttgcaaatgctcgagccttgctgccaggtgttagctccaccttagactttgtcatctggcagtggttgccttcctggagggtttcctttttcagctcgggttttccctttggtttcatcttttttttcaagctggtcttgcttttcgcggtgatcttgctcagtaagtttggcgattcactttgacccgttttcctgccaccttcgaggcgttgtttttgggcgtgttgctccaggaatttggcatcacgctgggcttccatttcgatcatccgctgttgacgagcccgcaggctaagatttcgttgctgtttgcgacgataagctttggtgatgctgctgccgcgtttgggtgaaaattggctgcgcttttccctgcgcacactctgccaaatgcccaaacgctccttggcgcaagtgggcgccaggagttgctctttttggcgctgaatttcgcgcgctatcaaggctcgatgctttttcgcataagcctcggcctcctctcggcgtcgtcgtgactgcaggatgacaggatttacctgttcaccttgcaccagatcacctggccaacgcacgtgcttgcccatgcgattctgtgcctgcgtatggatctgctgttgctgaatcagatcctgctggcgctcccgttggtgcttttgtattgcctaaacattgataaacattgatagttggatatatatttatgaagaatcgttttacctggagattcagctgctcacgtcttctacttgcaactgtatctgcgaacatgggttgcttattctgctcgtagaacttgcaatagtagttgacctttgaggaatctcgtggcggcattatacgcctatagttgccaaggtggctctcctcccaggcaatctgttgggttaacgctccaatggagcaggcttgccgcacatcgtggccaccaacttctcggattggtgacgaatagcccggcatttgggcagcagccttcttattgtatatattccttagtaatctagccctgtgctctgttcgatcatcacgtataatctgttctttatctaccaaggcggtgctgagcatgttgagagtatctcgaattaatggccgcttcacttccatgtccaccgactcatctgcactcaaactaggcgtgtgattgacttccagtatatagggcttcagtttccagtccaccaggatatcgaatccgagcaactgaaagctggcctgtatcttatcgtgctttggaaagcatacattgtaattatgctttagtgtgggccaagcactaatcagcgtctttataatcgcatcatccacactcgcccagaactcgcccacatcgtagttgtgatccactagccacttattgaaggcacttagcttgcgtttggaacccgcttccggtccattgcccaccatgtattgtgagttccggcgattcaggcaatagttggtcaggtgcatgaacacattgtggctattacccgttgttggtggcacatatttctgggtggcaaagcgtgccagaccctcattgtacacaaaaatgcgtagtggatccaccgaggtgacaagtgtgtagacgcgcagatcaaacttgtagccatctataagtaggggctacaaatgggaaaattgttgatcatatagatcgttagtatcattctccagacttacccgttctatgtaagtttggcagatgagcttctcccgtttgcccacagtgcgaagatcggtggttatccagatgccacgtccttggcccgccgaataaggctttaggataaaagtgcgcttgtgtttgttcgcataaatggctacatcgtaggcactgacagaaaataatggttattatattatatttttagctgaatttatgacaaatttcaaaaataagaaaactcactcggttggcattagccaggttttggggaatatgcgatagtcgccgggaaacattttgagcatgcgattcaaatttcttgacagcagatccttgcggcatatctccaccatgcctggaaaatggttaatctgctgaaagcgtttcatattacgcagcaggtcatgatggggcgtggagtccgaccattggatgttccacaatctatgctcgggcacatgctgaaatcccatgttcctggtaaccttggccaccagctggaatcgcgtgtgctccacgcagacactgagtctgaggccgcgaatactgggcactatgtcggtgccattcacgtgaaattgcatcggtggctctttaataacgtcatagcaaatagagtccaattgggaggcggtcagcaatggcttatccctctgctgttgcgtgttatcctgcgtaacgaccatgatgtggtcctcgttaacgccgccaccgcgtcgtcgccaagttggctggttattttcccgtcccgatcgccgtttgccacgtgacttattcgacaggacataaacactttcccgattgtagatttcttgcttttgaccgtttttatccgggggcagagatttatgggcattaaagaatcgcgtgtacggattaggctcgcagtaagtgggcctgggcgatttcttggaaggcatctggtgatgatggtggtgatagcgccgcttccactggtgttctggacttttcgcagtgctttgctcttcaatttgtcatcaaaaaatccaaatatgatagggtacattgaattttgacagaataatgtttgtacgacgtgttgaactagggtgggaggttgaaaaacatttcataaaatgcccatctcatcttgcaaccttagaacgcccaccagcccaccgcaaggcaaggtcaagtgctcggcggttgacactcgagatgtgagccactcaattaccaaagtcagtgccgcgagtgaaacttgtgccatgtggttggccaaaacaccttgcgacaaccgaatcgaatcagtgcgcacacctggctggcccacctaccatctcccatttccctcgcttttcgtattaatttccatgtgaggagctttggggtggggctcattaaccgcagttttatcaggctttaggctcatgtggttattagttcaggcagtcaatgtcacgaggaaaagtacatgagaaaaaagatggaaagccatcagcaatagcagttacatagcgacagatgtaaatgtcagctcgtcattcgcttggttaacttcaggggcacaagagcaagagggcgtgattgtgtggatgggtcacctcaacctggtaacctcaacctatgcaccgtaatctctcgtacagtgaacacaaccatttatttttttaatgactaaatttgactaaactaaaacaacagaatttcaaactattagagctggaaaatcacatttttaaaataggattagaatgtttatttataagttctctggataaactaaatctgcagtctacataattgccttagttgaatgtttgcttaaatcccattgtgtgaaaaaccattataggtttcagttaacaattgctgctcaaccccaaagtttaatcggagtatttttgtttagtttttttcctttgttttcgaattaagtgacacaaacaattgtggatgcctgtgcctcattttgcacatgcgttgttttgggtttcggcagcgacccgtgtaatttgtcaagtttatttggttgagcaacgccagctcctatctatctgccagcttttcctctaattggctgtccaagttgtttggctggtgctttatttgtttttgttgcactgctaattatgcgcccgctttgtcgctcgagatggtaaacaaaaaaaaaaaaaaaaaaaacaagcgggaaaagcgcgttggaaacttttctgcatttcaaatattaatgatagtgcacgtaccaccaacaacgggcgaggaatgataacaaggggtgcactttttgttgacagaacaggagcgttgataagcgcgagagaaatgagcggaaaatggcgattaa

SEQ ID NO: 37304 - DNA, 2679 bp, DROSOPHILA
atgggagatgagcaaagcactgcgaaaagtccagaacaccagtggaagcggcgctatcaccaccatcatcaccagatgccttccaagaaatcgcccaggcccacttactgcgagcctaatccgtacacgcgattctttaatgcccataaatctctgcccccggataaaaacggtcaaaagcaagaaatctacaatcgggaaagtgtttatgtcctgtcgaataagtcacgtggcaaacggcgatcgggacgggaaaataaccagccaacttggcgacgacgcggtggcggcgttaacgaggaccacatcatggtcgttacgcaggataacacgcaacagcagagggataagccattgctgaccgcctcccaattggactctatttgctatgacgttattaaagagccaccgatgcaatttcacgtgaatggcaccgacatagtgcccagtattcgcggcctcagactcagtgtctgcgtggagcacacgcgattccagctggtggccaaggttaccaggaacatgggatttcagcatgtgcccgagcatagattgtggaacatccaatggtcggactccacgccccatcatgacctgctgcgtaatatgaaacgctttcagcagattaaccattttccaggcatggtggagatatgccgcaaggatctgctgtcaagaaatttgaatcgcatgctcaaaatgtttcccggcgactatcgcatattccccaaaacctggctaatgccaaccgatgcctacgatgtagccatttatgcgaacaaacacaagcgcacttttatcctaaagccttattcggcgggccaaggacgtggcatctggataaccaccgatcttcgcactgtgggcaaacgggagaagctcatctgccaaacttacatagaacggcccctacttatagatggctacaagtttgatctgcgcgtctacacacttgtcacctcggtggatccactacgcatttttgtgtacaatgagggtctggcacgctttgccacccagaaatatgtgccaccaacaacgggtaatagccacaatgtgttcatgcacctgaccaactattgcctgaatcgccggaactcacaatacatggtgggcaatggaccggaagcgggttccaaacgcaagctaagtgccttcaataagtggctagtggatcacaactacgatgtgggcgagttctgggcgagtgtggatgatgcgattataaagacgctgattagtgcttggcccacactaaagcataattacaatgtatgctttccaaagcacgataagatacaggccagctttcagttgctcggattcgatatcctggtggactggaaactgaagccctatatactggaagtcaatcacacgcctagtttgagtgcagatgagtcggtggacatggaagtgaagcggccattaattcgagatactctcaacatgctcagcaccgccttggtagataaagaacagattatacgtgatgatcgaacagagcacagggctagattactaaggaatatatacaataagaaggctgctgcccaaatgccgggctattcgtcaccaatccgagaagttggtggccacgatgtgcggcaagcctgctccattggagcgttaacccaacagattgcctgggaggagagccaccttggcaactataggcgtataatgccgccacgagattcctcaaaggtcaactactattgcaagttctacgagcagaataagcaacccatgttcgcagatacagttgcaagtagaagacgtgagcagctgaatctccaggcaatacaaaagcaccaacgggagcgccagcaggatctgattcagcaacagcagatccatacgcaggcacagaatcgcatgggcaagcacgtgcgttggccaggtgatctggtgcaaggtgaacaggtaaatcctgtcatcctgcagtcacgacgacgccgagaggaggccgaggcttatgcgaaaaagcatcgagccttgatagcgcgcgaaattcagcgccaaaaagagcaactcctggcgcccacttgcgccaaggagcgtttgggcatttggcagagtgtgcgcagggaaaagcgcagccaattttcacccaaacgcggcagcagcatcaccaaagcttatcgtcgcaaacagcaacgaaatcttagcctgcgggctcgtcaacagcggatgatcgaaatggaagcccagcgtgatgccaaattcctggagcaacacgcccaaaaacaacgcctcgaaggtggcaggaaaacgggtcaaagtgaatcgccaaacttactgagcaagatcaccgcgaaaagcaagaccagcttgaaaaaaaagatgaaaccaaagggaaaacccgagctgaaaaaggaaaccctccaggaaggcaaccactgccagatgacaaagtctaaggtggagctaacacctggcagcaaggctcgagcatttgcaaattggacagccagaaccatcaacgaagcggaaactgaccaacttcttagctggcgaaaggaaagagccaatcagttaaatgaaacaaggctcagggaattgatattctcaaaaatgtacgaaaacggtcacctaacgaagaacgatatcaaatgcttcccggatctactttatcaaatacttaataatgattgcaaggaagcgagttctcgatag

SEQ ID NO: 37305 - protein, 892 aa, DROSOPHILA
MGDEQSTAKSPEHQWKRRYHHHHHQMPSKKSPRPTYCEPNPYTRFFNAHKSLPPDKNGQKQEIYNRESVYVLSNKSRGKRRSGRENNQPTWRRRGGGVNEDHIMVVTQDNTQQQRDKPLLTASQLDSICYDVIKEPPMQFHVNGTDIVPSIRGLRLSVCVEHTRFQLVAKVTRNMGFQHVPEHRLWNIQWSDSTPHHDLLRNMKRFQQINHFPGMVEICRKDLLSRNLNRMLKMFPGDYRIFPKTWLMPTDAYDVAIYANKHKRTFILKPYSAGQGRGIWITTDLRTVGKREKLICQTYIERPLLIDGYKFDLRVYTLVTSVDPLRIFVYNEGLARFATQKYVPPTTGNSHNVFMHLTNYCLNRRNSQYMVGNGPEAGSKRKLSAFNKWLVDHNYDVGEFWASVDDAIIKTLISAWPTLKHNYNVCFPKHDKIQASFQLLGFDILVDWKLKPYILEVNHTPSLSADESVDMEVKRPLIRDTLNMLSTALVDKEQIIRDDRTEHRARLLRNIYNKKAAAQMPGYSSPIREVGGHDVRQACSIGALTQQIAWEESHLGNYRRIMPPRDSSKVNYYCKFYEQNKQPMFADTVASRRREQLNLQAIQKHQRERQQDLIQQQQIHTQAQNRMGKHVRWPGDLVQGEQVNPVILQSRRRREEAEAYAKKHRALIAREIQRQKEQLLAPTCAKERLGIWQSVRREKRSQFSPKRGSSITKAYRRKQQRNLSLRARQQRMIEMEAQRDAKFLEQHAQKQRLEGGRKTGQSESPNLLSKITAKSKTSLKKKMKPKGKPELKKETLQEGNHCQMTKSKVELTPGSKARAFANWTARTINEAETDQLLSWRKERANQLNETRLRELIFSKMYENGHLTKNDIKCFPDLLYQILNNDCKEASSR

SEQ ID NO: 37306 - DNA, 2809 bp, DROSOPHILA
cacctctttactggtttcactagtaggccgttctttgtttatacagcgattattttatgttcaatacactggcaaataaagtgagcttgcttctatttatagaatattttcaactgtgttattagtaacctccttatcgaatcaaacaactttctcgtggctttatatttaaattcaaccaatcattcactttatagtaaaaaaagtattaacaaagacactagaataagacaatagaataagaattctagtgtctttggtaataatatattaaaaacaattaacttaaaacaaaataagattttttcaagtgcactgttttgtacaacttgatagaaatgaaatagggaatcaatacagaaaatatttcgaaaatccgagatcatgactaatcaaagtcaaatctaaggtgttgatgcttttgcaccttgtctgcgccaaaacaaaaatgaagtgaaaatttcagtaaacaacgtgcacttaggtcagtttttaataatattataatcacaaatgcctttgccagcatgctatagtgtgttggcagccggattaatctggtttggaataaagtctcgtaagattgtcagccatttgagtacagggacactcgtgatgggaacgagagcccttcatcttggctgcggctaaaaagcaaaactggtctatagatccagggctctgatagccatatcaagtacacaaatctacttcccagccccatcgaaacttcccgtagagcttggaaacaaataggcttgtgtgtggaaatgacaaaaaaaaaggcaaaaccaaaacaatgacaactgcaactgataagtggcacaaaatggcgatcacttgccggctttataatcgcgctatcaaggcagcctgatctcctgtctcccgcttatcacttggcggcagctccgagccgaaccgatccgatccgaacacgcgttctataaattccattcccagccaggcgacgtcttcagtttaaatccgaacccttgtgctgagtgttcatctccgagtagcagacatagacaatcgcagacaatcgagcaaatcccagaaaaaacgacaggcatcaaatgccaaatccatcgtgcaaagctaaccattccaattggcctaatctgattcatagttgaaattgtgataaaaaacaaaaaccaaagaaactgggacacatttcgatctaagcgaaatatcccctatcccacaaactttttccggactttcagtttggcctttgaatgctgctgcagcagtgcggaaaaatcatcaatctcgatcagcatttcaccgagtgctggaatacaagcccattgcgaaactttgacttcatcatctcccttctgagcgttatttccctaagtggtgggtggtgattttagccatgtatttacaatgtataactaacttttgatgctcctcctccgcctccagttgttaagatggccgccattccacaaggtgcattcgcagcctgcaagattcgcgagcaattcaacgaacgtgagctgatcatcgcccgtctgaggtccgctgccgcagataagggttccgttgacaacgggaacgccctaacccgtaagtgcacatgacgatccacgatctcgatccgctgggtcaatggagctcatacgcatcaattttgcatttccagaacgcgagtactcgcccaacaagtacaacgacaagctgatgaactccatctggggattgtacaatcgctattccccccacaatgtgaagaagaacgagtacgcccccaccaagtgatgacctaaagtggggccacgttcgcttccagctgacgtgccccaaacgcgactagcatccccaccaggatgttggtcaaaatcaattatatattatatatacacaactataatctcaagcatatatcgatttaaacgcacataacactttggtaacaaatatctatttaatgctgtaatgttttgtaaaattcaataaatacttatgatattgtatgtaaagggacaagaccatgaggcgtagtttaatttaaatagcaggactcgtaggtcggcaccatgtacttgatgttgatgaaggcatcctcgccgccatgcagttccagcacctgcagcgtctcatcgatcagatcccccagattcagattgttcttctgggcatagtcgatctcatcgccgcagtttactatacagcacagaatatccacttcaatggaagttactggaagtaatcgagtttagtggaatacctacagtttttcaccttaaatgcattgaacatgggcagcaactggcggtagaagggcaccagggcgggtcccaccaaatccgaggacatgaccagctgttggattatcttcaatgtcgtgcacattacctccaggtttcgtgtgctcaatgcgtctgcaaatgggggcgtatttggttttggttttgtgctcgcattggcaaggtgcaaattagaccgaaaaacttcgaggcatttgcgtgccagccaatgccctggtactcactcttcagcggcaatattaattgcggtatcaccgggtgtatcttctcgcccccggccaagaggagatccgtgaccccctggcgggcataggtcttgtagggatgtttcgtctccgccagtccgtcgaagaagagcggcagatagaggctgtagtccagcttttcaatgtccacctaggcgagatacgggaagaggtgacaccgttggcgggtcaaaggtgaatagagccgctccaagttcgaaattggttcgtgtaccggcggtggcgcaagtcttgcaagtgtacatttgcacgccatgccgg

SEQ ID NO: 37307 - DNA, 664 bp, DROSOPHILA
ctgagtgttcatctccgagtagcagacatagacaatcgcagacaatcgagcaaatcccagaaaaaacgacaggcatcaaatgccaaatccatcgtgcaaagctaaccattccaattggcctaatctgattcatagttgaaattgtgataaaaaacaaaaaccaaagaaactgggacacatttcgatctaagcgaaatatcccctatcccacaaactttttccggactttcagtttggcctttgaatgctgctgcagcagtgcggaaaaatcatcaatctcgatcagcatttcaccgagtgctggaatacaagcccattgcgaaactttgacttcatcatctcccttctgagcgttatttccctaagtgttgttaagatggccgccattccacaaggtgcattcgcagcctgcaagattcgcgagcaattcaacgaacgtgagctgatcatcgcccgtctgaggtccgctgccgcagataagggttccgttgacaacgggaacgccctaacccaacgcgagtactcgcccaacaagtacaacgacaagctgatgaactccatctggggattgtacaatcgctattccccccacaatgtgaagaagaacgagtacgcccccaccaagtgatgacctaaagtggggccacgttcgcttccagctgac

SEQ ID NO: 37308 - protein, 83 aa, DROSOPHILA
MAAIPQGAFAACKIREQFNERELIIARLRSAAADKGSVDNGNALTQREYSPNKYNDKLMNSIWGLYNRYSPHNVKKNEYAPTK

SEQ ID NO: 37309 - DNA, 3899 bp, DROSOPHILA
tggctaattgcattaccaggcagctatttggcctcaaatgccagaatgccagaatgccaagaaacggcctgataagccgtcgtggctgccactgagctcgtggcatttgcgtcaattatggagttttgcagcaatgaaattttaatgagcagtgcaacatgctcctagtttcgacattgttcaacgacattgctcatgcgaaatgaccacgctctgaaatttaatactattttacacgccattgaagaagatttccaatcgttcagttcgatttatacaatttatgctttgctgatacatttattaaactcaccattaattcaagtgttcaactttaaatttctgtttctgtcataagtgcttttagcgcaccataaaagctatttaaaattcatggatcgaattaaggtttaaactgaaccatttcccaccttgtcgaacctaatttggctccactgaagtccgtgcatttcggtcgaaacaaagcgatgggaggaagcagccgcaggtttcgccatcgccatcgcatgaccagaacctatttgtccaattatatggcccttgtcgcataaaccgcgaaatgttaaatatgcccgatttgcacttaagataaaattgcaatagggccttatgagctaataagctggtcgagcggatttcgcaccaggagcgccaatgtttaattaagcaagaaagggaaatggtaatgaagtgtaaatatgtcagctttgtaaaaaataatgaaccagtttttcacattaagtatattcaatttatattatatttaacgtatgcaaaataaaaccccttaaccgctcctggcccaatatgaattgtcattactgccgttcactttgacctagccggatatatggtaactccagtaaactggtgataaatacttggcacgtttcacactggcacactggttccacatgcaaagggcaggacttagcgtccttcaacttgacagttacccactggcagtcgccgtacaaatatggataatcgtgctgcggaacttattctcagagaacgaaacattttcccaaccaatggttccgataacattacattgctcaacaacatgttcgttttggaaatgttctacagaataacgcagctgtaccattttaagaacttcattttttatatatctgaaaggctagacttgaataacaaggactcgcaggagttcttccacaatttctggacctattttccaatggcgcccaacttgataataacgagagagcaccatttgggcatacccatgatgcagttcatcagcactccatcgctggtgatggtcttcactacgggtaaggacgatcccattatggagctggcttcccacaatcaacaaggaattcactggctgaagacgatattcgtcctttttcccagcctacagagccgtgacttcgagaccaatccggagtcactcgctcaattcacggcggagattaaggatgtctacgattgggtgtggaggaagcaattcatcaacacatttttgattaccattaaggataatgtatttatactggatccctatcccacaccatcgattgttaacaaaactggcgtatggcaagccgaagagttcttccacaaatatgccaagaacatgaagggctatttggtaaggacccccatcctgtacgatatgccacgggtctttaaatcggatcggcccaccaacaggtacgagaagaacttcatccacggcaccagtgggaatttgtttctgggtttcctggaattcgtcaatgccactctgatggataccagcgcaaatgtaacagctgactatttgaatatgacgaaccttttggatttggtgtcgcaaggggtgtacgaaaccctgatccactccttcaccgaaataaccaccaagttcgtggtcagctatagctatcccattggcattaacgactgctgcatcatggtgccctatcgaaatcaatccccagcagatcagtacatgcatgaggctcttcaggaaaatgtttgggtactgatcagtctattcaccctctacataactgtggctatctatttgtgttcaccactgagaccacgtgacctcagtgccgcatttctacagtccatatgcacattgacgtacagtgtgcccactttcatcattcgcacgccaacattgcgtatgcgctatctctacattctgctggctatctggggaatagtcacatcgaatttatacatttcccggatgaccagctacttcaccacagccccgccagtgcgtcaaataaacactgtgcaggatgtggtggaagccaatctgaggattaaaatgctggccattgagtatgagaggatggccaagtcaccgctgcaatatccagaaagctatttgaaccaggtggatttggtggacaagcacatgctggacctgcatcgtgatccattcaacacctcctttggctacacggtaagcagcgatcgctggcggtttcttaacttgcagcaactccatcttcggaagcccatcttccggttaacggaaatatgcgaaggaccgttctaccacgtgttccccctgcacaaagactcccacatgcgctccgtgatgaccgaatacatcatgatcgcccagcaggcgggcctaatgaaccattgggagcgcgagacgttctgggaggcagtgcatctccaccgcatccatgtgcacttatttgacgatgagccgatggcactcagcctggatttcttctccagccttctgcgcacctggactttgggtctgatcctagccggtctggcttttgctgccgaaatgaagtggcacgagcatgtgaccttcaaacgtcgtcctgttatacggataacccgcaagcccagatcgtttctcaggcgcttcatgaaattatgatccaagaaaaagatcctctctgaaaacatggaaacataactttcagtggtatcacaaaaagcttgcaggattttgtagatttctcactttgaaaacagtcttagaatttacatcaacaaattaggtttaattgaaaaatgcactgtatttcccaataaagaagtccatttagtaataattcgaaattgtataattaaaccttcacctagaaagagtttccaggacaaacacgatcccggccaaaaaactcatcacaagcagcaggataaaggcaatggccagatgctgcagtccagcagatgtatactcctgcgtgtccggcattcgttggaccaagcctgcatggagggcagatccaaagctgctgcgagcatagaagttgagaagtcccgaagaatggatgcggaacgtgaagtactcgatgtcccgccacaaggacgaatccatctggaggggaaaagccaggtggtaggagccaaagcaaattgagcttagcttgaagagtcgctgcttcagatgtttctgctgttcgtcgaggaactcccagtgatcctctgtgacgaaataggcaaaggagctattgaaacttgtttggtgctccgagaatactgccgaatccacggggcgtagaagctccaaaaactcctggggcaactccttgttcagatttagcaaaaattccatttcgtagtcaataatcatgacgggcaactgggcactcactatgtcattcatggtgttaatctgggcgtggaagagattcaccgtgaggatgctacccaaattggatgtgtagtaggcggaaaggaagaatccgtgaaaaaaaaccgtggcaagaagtagaaatcgaaggaggcagggctgttgtagctggccctcgatgggcacattgatgatataacaaaaagagttcagtacagcgccccgataacctgaccacccaccgaacatcctgagccacatcaactccagaagtaccagcgccagcaaagctcccaat

SEQ ID NO: 37310 - DNA, 1899 bp, DROSOPHILA
atggataatcgtgctgcggaacttattctcagagaacgaaacattttcccaaccaatggttccgataacattacattgctcaacaacatgttcgttttggaaatgttctacagaataacgcagctgtaccattttaagaacttcattttttatatatctgaaaggctagacttgaataacaaggactcgcaggagttcttccacaatttctggacctattttccaatggcgcccaacttgataataacgagagagcaccatttgggcatacccatgatgcagttcatcagcactccatcgctggtgatggtcttcactacgggtaaggacgatcccattatggagctggcttcccacaatcaacaaggaattcactggctgaagacgatattcgtcctttttcccagcctacagagccgtgacttcgagaccaatccggagtcactcgctcaattcacggcggagattaaggatgtctacgattgggtgtggaggaagcaattcatcaacacatttttgattaccattaaggataatgtatttatactggatccctatcccacaccatcgattgttaacaaaactggcgtatggcaagccgaagagttcttccacaaatatgccaagaacatgaagggctatttggtaaggacccccatcctgtacgatatgccacgggtctttaaatcggatcggcccaccaacaggtacgagaagaacttcatccacggcaccagtgggaatttgtttctgggtttcctggaattcgtcaatgccactctgatggataccagcgcaaatgtaacagctgactatttgaatatgacgaaccttttggatttggtgtcgcaaggggtgtacgaaaccctgatccactccttcaccgaaataaccaccaagttcgtggtcagctatagctatcccattggcattaacgactgctgcatcatggtgccctatcgaaatcaatccccagcagatcagtacatgcatgaggctcttcaggaaaatgtttgggtactgatcagtctattcaccctctacataactgtggctatctatttgtgttcaccactgagaccacgtgacctcagtgccgcatttctacagtccatatgcacattgacgtacagtgtgcccactttcatcattcgcacgccaacattgcgtatgcgctatctctacattctgctggctatctggggaatagtcacatcgaatttatacatttcccggatgaccagctacttcaccacagccccgccagtgcgtcaaataaacactgtgcaggatgtggtggaagccaatctgaggattaaaatgctggccattgagtatgagaggatggccaagtcaccgctgcaatatccagaaagctatttgaaccaggtggatttggtggacaagcacatgctggacctgcatcgtgatccattcaacacctcctttggctacacggtaagcagcgatcgctggcggtttcttaacttgcagcaactccatcttcggaagcccatcttccggttaacggaaatatgcgaaggaccgttctaccacgtgttccccctgcacaaagactcccacatgcgctccgtgatgaccgaatacatcatgatcgcccagcaggcgggcctaatgaaccattgggagcgcgagacgttctgggaggcagtgcatctccaccgcatccatgtgcacttatttgacgatgagccgatggcactcagcctggatttcttctccagccttctgcgcacctggactttgggtctgatcctagccggtctggcttttgctgccgaaatgaagtggcacgagcatgtgaccttcaaacgtcgtcctgttatacggataacccgcaagcccagatcgtttctcaggcgcttcatgaaattatga

SEQ ID NO: 37311 - protein, 632 aa, DROSOPHILA
MDNRAAELILRERNIFPTNGSDNITLLNNMFVLEMFYRITQLYHFKNFIFYISERLDLNNKDSQEFFHNFWTYFPMAPNLIITREHHLGIPMMQFISTPSLVMVFTTGKDDPIMELASHNQQGIHWLKTIFVLFPSLQSRDFETNPESLAQFTAEIKDVYDWVWRKQFINTFLITIKDNVFILDPYPTPSIVNKTGVWQAEEFFHKYAKNMKGYLVRTPILYDMPRVFKSDRPTNRYEKNFIHGTSGNLFLGFLEFVNATLMDTSANVTADYLNMTNLLDLVSQGVYETLIHSFTEITTKFVVSYSYPIGINDCCIMVPYRNQSPADQYMHEALQENVWVLISLFTLYITVAIYLCSPLRPRDLSAAFLQSICTLTYSVPTFIIRTPTLRMRYLYILLAIWGIVTSNLYISRMTSYFTTAPPVRQINTVQDVVEANLRIKMLAIEYERMAKSPLQYPESYLNQVDLVDKHMLDLHRDPFNTSFGYTVSSDRWRFLNLQQLHLRKPIFRLTEICEGPFYHVFPLHKDSHMRSVMTEYIMIAQQAGLMNHWERETFWEAVHLHRIHVHLFDDEPMALSLDFFSSLLRTWTLGLILAGLAFAAEMKWHEHVTFKRRPVIRITRKPRSFLRRFMKL

SEQ ID NO: 37312 - DNA, 2639 bp, DROSOPHILA; identical to SEQ ID NO: 27532

SEQ ID NO: 37313 - DNA, 282 bp, DROSOPHILA; identical to SEQ ID NO: 27533

SEQ ID NO: 37314 - protein, 93 aa, DROSOPHILA; identical to SEQ ID NO: 27534

SEQ ID NO: 37315 - DNA, 2576 bp, DROSOPHILA
ttttggcatttcccatcaattttcatataatgcaaccccatccttttcgctgggatgcaggtcctgttgcatggaggaatgctgatagtgagtgggattcgtctgtggcaagtcattccagccctacacaagcgcacacatcgatgtggattgaaagacaggcgcacacaaccacacatgctcaatcatttatgcagcaatcagtgctgacgtcttttccacacgtacgattaccggcatagagaatcgagccctactctcggttatgtggagcatattgggaatcgaaattgagtgcgggttaacaatgaggcagttgagattgcggcagcttctctcgaacttctgttgctcgtgagtttcttgaatttaaatcaatggcccgggcatccactgcgtatgagtaatattatacaaggatgaacaggtaatttaatttagcttttcggaacaattttttgttcacagaatgcaatcaaaacatgtatgagataatatacatttaaacaatcgttgtcgaattatttattttatcatgatccctacttttttataaattgacaatcatttaagtaaacaatcctttcagcaaaacagaaataactcctttttcaaggtgcaaccgtgaaggacgactgcacaaaaactctattggattatttgaaggttgaaatcaaattaagtcaagtgaataaattgacttttagtgcatataaaaatcgcaaaaagcgcaaataaaaatgaaataaaattgcgatggataaaaagtttaaaagtgaatccatagaaattcatcgtttgctgatgacgaaacatgaaaaaaggaaacttaaaattggttatatatacgaaattaacaagggaaattaaacgatcacatagcaaagcatttttttggaaagtagtcattgcatatattgctttctgagaaacttcgtataaatttaaattattaaaataaaccgctagaaaaataagttaaaatttgatatcaattagaatggataacgacaatatgctcgactttacagacttaatcagctgcaaggacttaccgaacataactctgcacaatatccgtcccatttacagtataaaggttttcatgtccgaacctaaaaactccaatgtctctattgctgaattaatcaaacgccaggaagtgtctgcagagcaatgtcgcaaggcacttaaagtcataaaggacagacttcttctgaaaatggcagcgttgcaagagcttaagaagtatctgctggatttgcattcggagatcaaaaagcccggtgcagggactcgttttgtgaccaatcaggagaaagttaaattgcatttcctagacgagacggaaatcagagaagtcgaattgtctgacgccgtagaacgttgcaatataaagctgagctcgctttattgcgaaatcctggctttggacagcgacatgggcagtgtcgcctatttggagagggtcgcccagatcaacaaagactttatcatggattggcataagactcagaggcagaataagacaagcaacatccattgttccggccaaggcgtcaaaaagactttttaatttggactgttttaaactttacatgtttcactcatatgcaattattatcgcactattctggaaaataaatatttatcgcgaaagcaaatacaaaatgttttattacacctctccgagattgaatagttgaatttccagcaatgaaattagccttaagtaatgtgctcctctcttaaatcctatccctaggaatcttttttccccctcgacttttcctgcttcgtgtccttccgtttcccttttctccgtttacctgtcactgacagcccgctggccgcttcatcttcattccccgtccatgaataatccctgcgacacttgcgtttcatggctttgcatagttaggacctgttaaaggagggacctggtcctggacagtgtgctcaggcatctcctctcttagccagcgcttagctggacctggggagttgaatctgtagctgcacagcaaaaaaaattttaaaggtttcaaaaagatctcaaaaaaatgtcccaagagttttaaactctatatagaatagtcttgagttacgtgtcccgttcaggtagtatttttaataccatttgctggcaagttactaatattttctctgagtgttcagttagctgggaaccggagcaggaagccaacaacaggttgcgtgccaatgcagtttttcatcgtgaaatgtcggcgctgatagcgattgtaattattatgctgaactgcgggtatgtatgtatgtatgcaaggggattcgcttttacgagaggcagaatggttctatttcaggtcctggccactcttacttgtttcccattctttttccgtcttgttgctatccactctccgacgcataaacaccgctagttatgcaataaataaaatgcaattgttgcgtcacaaaagctacatagatggcagtgcgttggtcagaaggggggattggctttttggctctgggcttttgccgccatgtttgcgaacaacagcaagatggcgccccgcatccgttatagc

SEQ ID NO: 37316 - DNA, 576 bp, DROSOPHILA
atggataacgacaatatgctcgactttacagacttaatcagctgcaaggacttaccgaacataactctgcacaatatccgtcccatttacagtataaaggttttcatgtccgaacctaaaaactccaatgtctctattgctgaattaatcaaacgccaggaagtgtctgcagagcaatgtcgcaaggcacttaaagtcataaaggacagacttcttctgaaaatggcagcgttgcaagagcttaagaagtatctgctggatttgcattcggagatcaaaaagcccggtgcagggactcgttttgtgaccaatcaggagaaagttaaattgcatttcctagacgagacggaaatcagagaagtcgaattgtctgacgccgtagaacgttgcaatataaagctgagctcgctttattgcgaaatcctggctttggacagcgacatgggcagtgtcgcctatttggagagggtcgcccagatcaacaaagactttatcatggattggcataagactcagaggcagaataagacaagcaacatccattgttccggccaaggcgtcaaaaagactttttaa

SEQ ID NO: 37317 - protein, 191 aa, DROSOPHILA
MDNDNMLDFTDLISCKDLPNITLHNIRPIYSIKVFMSEPKNSNVSIAELIKRQEVSAEQCRKALKVIKDRLLLKMAALQELKKYLLDLHSEIKKPGAGTRFVTNQEKVKLHFLDETEIREVELSDAVERCNIKLSSLYCEILALDSDMGSVAYLERVAQINKDFIMDWHKTQRQNKTSNIHCSGQGVKKTF

SEQ ID NO: 37318 - DNA, 3082 bp, DROSOPHILA
acaacttcggggttaactggcaataatggcatgcagccattctgtcgttttagccaactcgcaaagccgccgataaaccgcttgggaaattgttaaaaagcgattgtctgacttcgagaccttgcgtgtggatatgccaccacattcatctacattttcttataatgtttggtcaggtatttcgaaaatattttaaaactatggcgagcaaaaatacgtcagatttacaacttgatttcatactgctatcagttgttaacgacattttcgtccattaatttgagtttgttgcagagcctgtttgttaccaaatttgaatagctatcctttgatagctaagtttgtacccttaaacgttttctcaatggagggtaagttgaaatccaaaaatgcaacacgatttttaagtgtatagggtttgatttctatgtagattgtgattaatttgtatctgcttgcttagtgacaggaaaccaaaaaccatatggtgaaaatttgttttcagccattctacagggcttaaatgctttccgaaagccatcacgcactgcaaaacaatttttacctacctctgttatcgacaccaatgacaaaccactttatgccccatttcctcttttgcccctcgaagctattagacccgcacaaaaatcccccaactgggtcaaagttcggggggcagtcagtcagtaaggaaggccgaataacagcgaaatagaatgaaaagattgaaacattgaaaaaatacgaaatacggaaagtcgtctagacatgtgctaaatgaaatcaaacatcgcacaccgattccgcggcgaaccgtcgacggtttagacatattgattttatatcatcatcgatgggagggatatatattagaattccattaaggcactcggtgcgtgctacgatgcgtgtggtgcggtggctgtcacggttcgacagtccgccaattttagtattttcggcacaactttcagtctttcaccgactttcctccaatatgcgtgcccaaagaccaaatgcccaggagcgcgaaaaactgcgtcgccagcgatccgaaactaggctcgttgtcgccggttgcaatgatctaggttctagatttttcgatttcaaaattcaagtcactaatatcgcaatatgtcccttttgcaggtttcgagtatgtggtcaatcctccagtatggccgaaagtcggatttctcaggaaaatccatcgggactcgagcggagacttctgtagggacagctacaccaaaaatattccgtcggtcgctcctaatacgtatgatgttcccagaccaatgggatttaaggtaggactgttttaaaaataaacttatttcaaatataattcattagaaataagtgtaagcacagtagataaaataatgtattattacagtacccgtcaaaggcaggattttctgccttggccaacaagatgccacgattaccaatctttcgagaactgggatatccccctattggatcctacgctaccgattttccaggaactcaatactacttcactttcaacaagcaaactgtgcgtgaacaaaaatggttgacacccgggtaagaatcctgctgcggttttaaagaatgaacgcaatcgaatgctttttcatttgggggcgtttttcaattttattttccaggccgtcaacctatacgcaccacctcaaatatccggactgggacgtggagacagctttcggatccaagcgcatcatctggccagcagtggccgtattttgcagtccccaaaacattgtcaaatgctcgacatgtggcgaaaagccagtgggtgactattttcacaactttagcaatgacgcggacatgtgccgacaatgcatgcatgtcgagatggcggcgatcaagaagtgcaatcttcaggtgacggagcggtatagtcggcagcagaaaatcaagcaattcgtaccggccagatactgcggattcttccacgatcacaaccaaactacggccacaattgaacgggattcgcgaaaagtgctgcgccaaaagatacgcgtggaaaattacttgtatcggctgaatgcaaagatagaatagagctaaatacccatatttattgttttaatatatattattttaactaataaaaagcgtatatattacaattgaaatgaacgcgtttttattggggttttattttgaattcaattggggcaatacatttacaataacactgtaggaaactatagacaagtttaatctttgtttagcgcactaattctacgaacattattctttgtttttctcacagcggatgcctgcagtgactatacggaccattttaatcgcatttccgccactcggtttcctctatcctcctccgtgtattcccacttccggtcgagctggaggatttagcaacccacataagtcgaaacaggaacggtggcacagacagcaacgtccttggccacaatgcaacaatggctgctggccatttgcagccataacgaacattatggcatggcggccatgtcaatgcagaatgggattgcgccgtttgcttgttttgcatttggccagcagcaaactggccacgcctcgggccaagagttggttttggccaacttttggccattccgcacacgcgttaaattccaaatgcgagtcaggtgctctttcacctggaaagggttgagcagcaggctgttaccggatagaaagttttgcacgtggtactcccacattaccatgacacatctcagcatctattgaaaatgcatgtgcaaacttaagacggttctttaaattgaagtttatactgacaaatacgcacttggcttagagtagagtgaagaaaatagatgtagaaatcaactccactagaatttgactttgcaaatgaagataaaatcaaatcttagaattaaacttataaattcaacacacctagatacagtttttatttattcactagaaataaaatatcttctagttgcaccaccacccaaaaatgattgaacaaaaagcaatgaattgtaaagtgcaattaaagattgacaaaactgcagacaaatgacgaattgatgcacaagct

SEQ ID NO: 37319 - DNA, 849 bp, DROSOPHILA
atgcgtgcccaaagaccaaatgcccaggagcgcgaaaaactgcgtcgccagcgatccgaaactaggctcgttgtcgccggttgcaatgatctaggtttcgagtatgtggtcaatcctccagtatggccgaaagtcggatttctcaggaaaatccatcgggactcgagcggagacttctgtagggacagctacaccaaaaatattccgtcggtcgctcctaatacgtatgatgttcccagaccaatgggatttaagtacccgtcaaaggcaggattttctgccttggccaacaagatgccacgattaccaatctttcgagaactgggatatccccctattggatcctacgctaccgattttccaggaactcaatactacttcactttcaacaagcaaactgtgcgtgaacaaaaatggttgacacccgggccgtcaacctatacgcaccacctcaaatatccggactgggacgtggagacagctttcggatccaagcgcatcatctggccagcagtggccgtattttgcagtccccaaaacattgtcaaatgctcgacatgtggcgaaaagccagtgggtgactattttcacaactttagcaatgacgcggacatgtgccgacaatgcatgcatgtcgagatggcggcgatcaagaagtgcaatcttcaggtgacggagcggtatagtcggcagcagaaaatcaagcaattcgtaccggccagatactgcggattcttccacgatcacaaccaaactacggccacaattgaacgggattcgcgaaaagtgctgcgccaaaagatacgcgtggaaaattacttgtatcggctgaatgcaaagatagaatag

SEQ ID NO: 37320 - protein, 282 aa, DROSOPHILA
MRAQRPNAQEREKLRRQRSETRLVVAGCNDLGFEYVVNPPVWPKVGFLRKIHRDSSGDFCRDSYTKNIPSVAPNTYDVPRPMGFKYPSKAGFSALANKMPRLPIFRELGYPPIGSYATDFPGTQYYFTFNKQTVREQKWLTPGPSTYTHHLKYPDWDVETAFGSKRIIWPAVAVFCSPQNIVKCSTCGEKPVGDYFHNFSNDADMCRQCMHVEMAAIKKCNLQVTERYSRQQKIKQFVPARYCGFFHDHNQTTATIERDSRKVLRQKIRVENYLYRLNAKIE

SEQ ID NO: 37321 - DNA, 2817 bp, DROSOPHILA
ttgcaattaagcagccttcgcacacagatgtccccacacaaatacaggcgtagtcacagtagtgcacacccccactcacagatacacatattaacgtaaaacaatgccgtttcagctgcaattgcattttaagcgcatgcggaaattacaaactcaaattgataaagcaaaacctgtgcacatgtgtggccctggcatatggcatatggcagtaataaaaatctggttatataaggtgaaaaattggcttacgcctgggactccagcatggccaaagaaatccgagtgccagcacatatgaaatcggaatgcaattcatttctccattaaccaattaaacgcaattcatcaactgacgttcgcaatttgcaaaaaaataaagaaataacaaaactattaataagggatgtaaaaacttttacaattttaaatttccactgacagtcaacattgaaagggtttttcagtcaaacggaaatttgttttcaattaagagttgatttaaatttaactgccttttcatgacgaacgcatgaaaaatcagttataaataccttctacggtaatatgcagacgttaaacaaatgtatgctaaaacttttaatttaaaacaccataagcttcttaactttcctttgcttgccaaattctcaacgaaaatcacaagtcttactttaatgaatattcttgcactattaagttcaaacaaaagtgagtaaactctttaatttactggctttcagtcaatgtatttcacgccaatggctaagatccaattagtggcacttaaactctatgtctgagttaaactatatggtagttaaaactgttaagtcatcaagcactttctgcggcatttgcggctgccaaaaaaggaaaattcatccccatcagcatgctgtacagctttctgctatcgaagagaatgagagatacggatagtaaaaagttagacgattggtaagcggcttagtggtcattttgtatacatttagacttactagatcgagtcggtgcacttgccctgggcatctcgcacctgatgatttcggcagcgagcgggtttcttggtagccggcaccgaagatcgttgaactttcaccttgaaaatgggcgagttgtgacctttgggcggcgtgtactcaatgttctcgcgcaaagtgggtggcgtaattaaagcagttggtgccgctgcagccatactgggtatatccttggatcgagcatgaagtgggtggtgcaagggcttcgttagaccgccgattggcgtctctacaatcatcagattgtttagtctggacttgggcttcgttataccactggccgcaatgtcagccaacagatttaagcttgtattcagctgcgtggcttcggtagtaggagccactgtagatacagtgctctctggcagggtggccgatgtggtgctcgttgttgtggtgctactggtccctgtagttagcttgatcggtttgacggtcaacgcactgtcatcatagtagtaatcctcctcatcgttatacgtctcctaattgagagatcgaagatgttatttttagctcgctggcaactcgttagctgcatatcggttaactggttttcgggcccccactcacctcggccagtccattctggcccacctcgatgatggccacatccttgatgctaacgtggatgttgaatctgccagtctgtcgctgatcgaaaaccactcgccctgaatccggcatttcgctggtcgtcggcgtttcggcctcctcgatgggcagcgtttgggccaggccaaaagccatcagcgtaagtgatatcagcagcattttcaaattgaaaccagttctaagggcgcacgtcaagaaactctgctgaaagaacgtccgttcttcttgaagccgcgatcacaactgatttggtcgctgggtatgatagccctacttaaaggcctaacaaagtaggcaacactgcaaaaaagtacaaggggtttttacaacgatggctaataaagggatcttgattagaccggttttataaattggctcattattactatgttgtgtagttatgcacacattatgggaatattgtgaaaacaaagctgcatcccatgcattggtactcttcctaaattttgttgaaaatgatactcttagtgtacacctctcaacttgaaaccctctttcatattcattttcttttaagcccattttttattttcaagagatgccaaaatcgacataccccaattatggcaaggctctatgcaaataacctgcatttatatcttcatctactgggaaccgattgaactgcattcaaatatggtgtgccaatgcacatttaaactagactatatgaagtccaatgtatgtacatatatacataaatatatatttcgaatatttacccgttactaggcaaacacaaacgccacctttgaggtgctaacaagctgtttagaagagctgggaactaagtgaccaacagtttggctaataccaaatgcatataatcataagtgtaaacagatagacatccgagcaaatagtgaggcagtccagttgagttcatttgaggactgttgatgtgggtgagtgacatggaaatggttcaagaacgtttagcatttaaatgggtgttaaatgcttcccacatacattcattagagagtaatccctgttgcagattaatggtcaagatggagatttatataccatccgttgccgaaatacaaatcataatttgcggctcaataggcgcagttcatcgaaaagtcattaattaatccaggtatcgagtccagagagttttcggccttcaatt

SEQ ID NO: 37322 - DNA, 729 bp, DROSOPHILA
atgctgctgatatcacttacgctgatggcttttggcctggcccaaacgctgcccatcgaggaggccgaaacgccgacgaccagcgaaatgccggattcagggcgagtggttttcgatcagcgacagactggcagattcaacatccacgttagcatcaaggatgtggccatcatcgaggtgggccagaatggactggccgaggagacgtataacgatgaggaggattactactatgatgacagtgcgttgaccgtcaaaccgatcaagctaactacagggaccagtagcaccacaacaacgagcaccacatcggccaccctgccagagagcactgtatctacagtggctcctactaccgaagccacgcagctgaatacaagcttaaatctgttggctgacattgcggccagtggtataacgaagcccaagtccagactaaacaatctgatgattgtagagacgccaatcggcggtctaacgaagcccttgcaccacccacttcatgctcgatccaaggatatacccagtatggctgcagcggcaccaactgctttaattacgccacccactttgcgcgagaacattgagtacacgccgcccaaaggtcacaactcgcccattttcaaggtgaaagttcaacgatcttcggtgccggctaccaagaaacccgctcgctgccgaaatcatcaggtgcgagatgcccagggcaagtgcaccgactcgatctag

SEQ ID NO: 37323 - protein, 242 aa, DROSOPHILA
MLLISLTLMAFGLAQTLPIEEAETPTTSEMPDSGRVVFDQRQTGRFNIHVSIKDVAIIEVGQNGLAEETYNDEEDYYYDDSALTVKPIKLTTGTSSTTTTSTTSATLPESTVSTVAPTTEATQLNTSLNLLADIAASGITKPKSRLNNLMIVETPIGGLTKPLHHPLHARSKDIPSMAAAAPTALITPPTLRENIEYTPPKGHNSPIFKVKVQRSSVPATKKPARCRNHQVRDAQGKCTDSI

SEQ ID NO: 37324 - DNA, 2162 bp, DROSOPHILA
gattataagggaaaactgatgcagataaaattaattgaattcaaaaagccaagccattggtcttgctccatccgttttcttgccgaatgtgcctgcacttggcttggcgaattttcgccatacttttctgggtcatgtcatggggaaagtaaatagttacatggccacggctgccttttctttatcaggaattaaaatcaagttgctccactcgcatgaactatatatgcactatagcaatctcaatggcaaattgacaaaatcagattggtggaaagttcgtattctacaattattaagtactattgccttcattggcaagggcagtaaataaagtacaaatggagtttcggtttcagaagaaagccaataagtcgtgtattctaagaacattcgaattcgtatttgaatttccatagaataatgttgatcgattgggcggtcttataagcacataattccgcaaaatttgaaagccattatcttatcgatttaccaacaaaccttttagaaaatcggaaataccttggaatagattaccaatgaaagttacatttgttatctcttgggttatgttattttgaattattattaaattttaagtgtacaatagagaaaatgcacatttcacaaagtcccagcggtagtgtactttttataattttggaagcttaatcttatcacttaaaaactagaagcaaaaaaaaattgtacatatggctatctcagaaggagaccttagaggggttttcctcattttatttgtcatgactaattcagcatttacaaggccttactcatcgccatggtcatcataatattcccatgtttgtgctaactaacacttctatcgattagcaagcaatactatacagattagatagtacttatctttatgaggcaggtcttgattagatttaccctgacaatatggatttagttgcctataagagttggacccaaccgcacggttttcaaagtttgcaaaaatatctgaataatgccaccaccacacggaggacccggaggccatggacatggaggaccgcatcatggcggacccccgcatcatggaggccaccatggaccgccacatcaccatggaccgccccatcatcaccacggacctcgtccctgctgcctttgctgcacaatttcataagaatttataaaggaatttattaaagattgtagttttaagaaccctcacgtaataaatacgaatgccccgaaggagttctgtaactgtgtatgtgtttaaggttaataagacgcctaattagtgtaatcgagtgcctcgagtgctaagcaattaatggctggctaatcattatgtgtcacctcaaaacgctttaaaacctcaaaagccgctgccataatacaagtgtaccaatggtatctgtgtgttttgttgcgtgtcgggaatgcgtgtgtgtgtgtgtgtgtgtgcgtatttgagggggagtggatggatgtggttggaggtggagatcctgtagccatacacacacgcacttcacatttaaggtcggactggtcggtggctctaatttatagcagccaagtggatgccgaagaccagaagacatacaagtgccataaattctggcaaaggaacacattatttatactgtcaaccggtccatatttcggatgggaaatactacggcctaaccataaataagtgcattgcctttgctgtgctgcgaaataagtcttcattagcggttaaaaggctgactggttgacccacaaaggacttcttaacgctacgaaatcggttccctattctccattttccgattcacattgagttgttttcgtcgcccagccgcagaaatgccgcattaaagccggaaattcccaaacaacaacaaggaaaatgcttaaagttcaaattaagcacaacagctggcgaaaaattgaattgaaagcagtaggaggagcaggagcggcagcagagtgccaacaaaagcaacaaagagtcgctgctcccggtcacccaaccccgaaaaatccccaaccttaaacctcgaacccaaaaactcaactcaacccaaggcattttcacgaaaggcagcggaaaacagccaagggaaaacctaaaaggaaaaaccgaagcacgcttttgggcgacagaggcgcgatgttagccataactt

SEQ ID NO: 37325 - DNA, 162 bp, DROSOPHILA
atgccaccaccacacggaggacccggaggccatggacatggaggaccgcatcatggcggacccccgcatcatggaggccaccatggaccgccacatcaccatggaccgccccatcatcaccacggacctcgtccctgctgcctttgctgcacaatttcataa

SEQ ID NO: 37326 - protein, 53 aa, DROSOPHILA
MPPPHGGPGGHGHGGPHHGGPPHHGGHHGPPHHHGPPHHHHGPRPCCLCCTIS

SEQ ID NO: 37327 - DNA, 2258 bp, DROSOPHILA; identical to SEQ ID NO: 27529

SEQ ID NO: 37328 - DNA, 258 bp, DROSOPHILA; identical to SEQ ID NO: 27530

SEQ ID NO: 37329 - protein, 85 aa, DROSOPHILA; identical to SEQ ID NO: 27531

SEQ ID NO: 37330 - DNA, 4197 bp, DROSOPHILA
caatggtaggttgaactttggtcagaaccaagcctattggcactgtttctgtatagacacatataatatatataaaaatgataaagcaaaatggcgaaaagtggcagtaaaaaataaaatgcgctgccgcaaaagtgccatttgtggcataaacacatgcgcgccaaaaactttgataagacaaaagccgagccgaggctaccaaaccaggtaggcaatagctggcaggtgggtaggcgtgccatgtgggtggttgttaaaaaagtggcaagcggcaggatgaaggccaaaaactttgccaagtacggcggcggcgggagagccagagtggaaatgtcgcaagaatgaacttcgtcgttggatcctgcgaccgcagtgtgccactaaatgctgccactaaatgtgtgccaagtattattgcaggtgccaccaggtgcctatctacacacacacacacacacacgcgtgtgtgtgtgccagttctctgccgaaattgcccaaggagcacgaggagcaaaaggagctgcttcttgaggtgttcgccgcgccagcgggactggcataaaattagcacaataaaaacacataaatgcggcacaaaaacatgaaaatccacttgttataatttaatcgagttgatagaatttttacgactcttctccaggtatatgtacaatatataagttagtgtgtgtttctctcagagcctttgcttaaaatgtgggacaaagtaaaagttttaatcacacgtcgccattttattgctggtcatgaagatagcaaatgcattacgaactttacgtgggataaactttagtttaaatagaaatgttaatgaacgaaatcacttacgttttacgagcacatttactttctttaaatatagaattaacatttagtaacaagttaaattaaaacacaaatatttaaaatttatatttatttctttggtgtaaccgtaaaatagtaaaacaaatgtaaaatagtcaagtatataatattaaccaccttgggagtcgacatcctggccgctgaccagcgagtgggtggcaacagattcggacttgctcacgcggcgagcctgcattagggtggcccgcttgttgatcgaatcctccgtgttgcacgccatgcagttctctatgaagagaatcaactctgaagatttcagaaaatgagcaatgggcagagcatcttctagggcttccttggtctgttccagcttgtgcagaatggcattggccttgactatctgaaccacactgaggaacttccacagattgctattgcagttcttgctctctaaaatatatacatatatataaatggtgttgcaaacaaaaggcgatatagaaattgatcaatacaaaaaatcattttacctttaattgccttgcgagcattgtaagtgcactctgaatgacgcccttggtccaaataagattgcgaaatctggtgcaacaaataacacttttcgattgaatacttggcaaagaccattcgatgttccaggcgcgcagttagcctcctaaaaaatataacacagattaaagaagtctatattaggattatgggtatttctctcgtacttggcccttgtagttgctggatcgttgccctccggctctggtgctcggtccccaaatgtcacgggaacaaaatccttgaccctttccactggcagacgaagcagctttagtatagcattactaccatagggcgtaaagcctttgggcactcgaagctgttcggccaaagtcaaagccattgtgttgtacacctcgttaaggaactcaaatttccaacacatcacacgggccgtcttcaggaccacatatgtgcccattagctcctcgacgaatttcgccaattgctatgaagaagtaaataatgcagttaattagtttggtatctgttcaatactgtatatcactagtaggtcaattttaaaaccactcacctgaaccttcttggccttgcggagtgccctaatctccttcagagcatggttcatgttacgatgtgtctgatattgtacgcggaacaggtaagcctcacggtatttatccgacatggctttattgccgtatttcagataattgaccaggtaaagtggggagcgggactgcagcattttctgcggacaggggaaaaacccggcttaggaccgacggctaaaaatgtccaatataatccagctcaccataaacttgcgaacaatctcgtattgcttgctagaaagctgctgaaggaagtatgaggactccttgcactggggtagcaaaaggtttggattcttgcacagcatcttcatgaagagcacatcgatccaggagtcgttgatgtaactctggtggaagatgttaaaggcacgcttccggcgagcaatctccatgggcgagagcatctcctcaggaacctctggaatactctgcacatcgcacttgccctgctccttcagtctcttccacaagggtcgattatcgaccctttccctttccttgatcaaatcgtgaacaatgctgacggtcttcaaattcttggtaaagaatgctgacatggcctcaccagtcacatctttgatcacaccatccacctattgatgcaaaaaaaaaaggaattatcccttttctttcatatgtgttatataaatatatttaaaatatttgttaacgttcaatcttaccaccaactggcgctgctcgaagctctttcttttattaccaataaacactcgcatattattgtgcatctcagccttgctgttttcgaactggtttagttcgtagagtacatcacaaatatcgagattgattatggccttttcctcgccatccttactgcgtgctagctctgttaaataccattaaaattaaattaactaattattaaagagtcctttccgaatccttgaactactcactggcagctgcccggctgtcatccagcgcacccagcatctgggcagccttcctcttgctctggcatcgtttgtagagggtcatgtgatccgttggctccaatgcgagtgccttgtttagatagtgcaatgcgaagttctcccgacggcggcgggaatagtaggttccccagtccctgtaaatgtcgtggagcacctcgtccgaccagtctatcttcatccatggtggcaaggcctcctctaaatttgcccttggcatctccacaatcgacgtcattttggcttcttgtattcactagttttgcgatgtagaccttgccaaaattctaatgggtatcgttttcacgctcttaaaatgagtattgtgtacaacttgataaagtaagtgttaaagtgttattaaaacttggctgttaattttactataaatttaataaagattaaaacaagtgtgggttgaaaggagtccgatatgtttcgatgatatgtgttgcttaacatcagtattttgaaagaaagtaaatttcaacgtttcctatgatttattaggttttccataaactattttgtttgctctttgtttttcctagttcatttataatgagccgtaaaacgtgttgtttaattcttttctcatattttgattaaagttttcattaattcacaactgtttgtatttcgaggcacaactaatgcttgccccatattattagtgtgggccttcgtgtgtgtcaaatggaagtggcaagtgagggggcgtctccgtttcctcttcaacttcgaattctgtcacacttctaataagcgcttaaaagccacgcaaggctatccaaaacctgtgattaaatgggaaaactaggggaaaaccgggggaaaccctctgtggaaatttgaccgcaaggcgagtgacagaagtggcacaggccacccaataattgtgcatgcccagtggcacccgagcgaaagaaatcacttaaaaacttgcacacactcgccacacggtcacctataaattatgcttcacactcagttcaaatagaagttgtaacaatgaaattaaagccaccacaaagggcagtgataagcagtgaggagtgttgcgggaagtaggggcaactcaacgcgatcataaatctaatgtgtaataaatttaaacagcgaaatcatgcaaaaagcaaaggcaggtcctgtggcttagctcacgcacaggactccttttctaatttttttttctacttttttttcctcgacaatgactacactttagcggcaaattt

SEQ ID NO: 37331 - DNA, 1743 bp, DROSOPHILA
atgacgtcgattgtggagatgccaagggcaaatttagaggaggccttgccaccatggatgaagatagactggtcggacgaggtgctccacgacatttacagggactggggaacctactattcccgccgccgtcgggagaacttcgcattgcactatctaaacaaggcactcgcattggagccaacggatcacatgaccctctacaaacgatgccagagcaagaggaaggctgcccagatgctgggtgcgctggatgacagccgggcagctgccaagctagcacgcagtaaggatggcgaggaaaaggccataatcaatctcgatatttgtgatgtactctacgaactaaaccagttcgaaaacagcaaggctgagatgcacaataatatgcgagtgtttattggtaataaaagaaagagcttcgagcagcgccagttggtggtggatggtgtgatcaaagatgtgactggtgaggccatgtcagcattctttaccaagaatttgaagaccgtcagcattgttcacgatttgatcaaggaaagggaaagggtcgataatcgacccttgtggaagagactgaaggagcagggcaagtgcgatgtgcagagtattccagaggttcctgaggagatgctctcgcccatggagattgctcgccggaagcgtgcctttaacatcttccaccagagttacatcaacgactcctggatcgatgtgctcttcatgaagatgctgtgcaagaatccaaaccttttgctaccccagtgcaaggagtcctcatacttccttcagcagctttctagcaagcaatacgagattgttcgcaagtttatgaaaatgctgcagtcccgctccccactttacctggtcaattatctgaaatacggcaataaagccatgtcggataaataccgtgaggcttacctgttccgcgtacaatatcagacacatcgtaacatgaaccatgctctgaaggagattagggcactccgcaaggccaagaaggttcagcaattggcgaaattcgtcgaggagctaatgggcacatatgtggtcctgaagacggcccgtgtgatgtgttggaaatttgagttccttaacgaggtgtacaacacaatggctttgactttggccgaacagcttcgagtgcccaaaggctttacgccctatggtagtaatgctatactaaagctgcttcgtctgccagtggaaagggtcaaggattttgttcccgtgacatttggggaccgagcaccagagccggagggcaacgatccagcaactacaagggccaagaggctaactgcgcgcctggaacatcgaatggtctttgccaagtattcaatcgaaaagtgttatttgttgcaccagatttcgcaatcttatttggaccaagggcgtcattcagagtgcacttacaatgctcgcaaggcaattaaagagagcaagaactgcaatagcaatctgtggaagttcctcagtgtggttcagatagtcaaggccaatgccattctgcacaagctggaacagaccaaggaagccctagaagatgctctgcccattgctcattttctgaaatcttcagagttgattctcttcatagagaactgcatggcgtgcaacacggaggattcgatcaacaagcgggccaccctaatgcaggctcgccgcgtgagcaagtccgaatctgttgccacccactcgctggtcagcggccaggatgtcgactcccaaggtggttaa

SEQ ID NO: 37332 - protein, 580 aa, DROSOPHILA
MTSIVEMPRANLEEALPPWMKIDWSDEVLHDIYRDWGTYYSRRRRENFALHYLNKALALEPTDHMTLYKRCQSKRKAAQMLGALDDSRAAAKLARSKDGEEKAIINLDICDVLYELNQFENSKAEMHNNMRVFIGNKRKSFEQRQLVVDGVIKDVTGEAMSAFFTKNLKTVSIVHDLIKERERVDNRPLWKRLKEQGKCDVQSIPEVPEEMLSPMEIARRKRAFNIFHQSYINDSWIDVLFMKMLCKNPNLLLPQCKESSYFLQQLSSKQYEIVRKFMKMLQSRSPLYLVNYLKYGNKAMSDKYREAYLFRVQYQTHRNMNHALKEIRALRKAKKVQQLAKFVEELMGTYVVLKTARVMCWKFEFLNEVYNTMALTLAEQLRVPKGFTPYGSNAILKLLRLPVERVKDFVPVTFGDRAPEPEGNDPATTRAKRLTARLEHRMVFAKYSIEKCYLLHQISQSYLDQGRHSECTYNARKAIKESKNCNSNLWKFLSVVQIVKANAILHKLEQTKEALEDALPIAHFLKSSELILFIENCMACNTEDSINKRATLMQARRVSKSESVATHSLVSGQDVDSQGG

SEQ ID NO: 37333 - DNA, 4206 bp, DROSOPHILA
aaactaaacaatagaattatatgggttttaaagtcttgaaatattttattggactctaaccctataagatgtaatatttataagcatatatctacactgaagaccctgacttggctgtaaatataaagtctgaatcttcgagcctttggtgtgtgtttggaatatatgaagtaaacgacttggctaaatgtttttgttattaaaaccttaaattatcattttcttagtcccttaatctgagcgacgagcagaaggatctggccaagcagcatcgtgagcagtgcgccgaggaagtgaaacttaccgaggaggaaaaggccaaggtcaatgccaaggacttcaataaccccaccgagaacatcaagtgctttgccaactgcttcttcgagaaggtcggaaccctgaaggacggtgagctgcaggagtcagtggtgctggagaagctcggcgctctcattggcgaggagaagaccaaggcggctctggagaagtgcaggaccatcaagggcgagaacaagtgtgataccgcctccaagttgtacgattgcttcgagagcttcaagcccgcccccgaggctaaggcctaaagaagttagggatttaatgcttggcaaattgtgattcgggaaaaaatgtaacaaaatttaaataaattctttgtccaatgaaactatgctttgttttccatattaggtgttaatatgtcttcttggtttgtttgagtttgggttaatagaaatgcaacaatacgttaaatccttgttattattaaatcacccagtttactttgattcaatgcaatcatagaacaagtgcatcattctgaatcagaagggtgagtggcaaatttgccacagcttaattgatgctctcaagccctgtttcgcgtaagctgattataatccatattcatgtgtaagtcaggtgattcggcgttttcaatttgcataattaaatgtatgactgcattgaacacttaaactgctttattgttttaattttaggcactaatacccttaacaacacacttttcatagttgtagacaaagtcacaggtggcggctgactttgtggttccgcagctggtaagcaaactctttagcttatccaccggcagactgctgaaacggatctgggccaacttaacgatcttatcagtattgggctttccatcgtcacccaggagacccagtttcttgtagacgcagctgtgatagcacttcaccgactcagagggattcgccacctccttgtcggtggtcagcaaattagcatcactggcagcaatattcagctccttgatgcaggcctgttgaatttgcttgtaggctgccaattccgcagctgactggccctgttttaaaaatgcgaataaaatgatgaattatccctaaagcaacgtttcatccaacttaccgctactagttcgcttagagcgaaaattaggaatacaaccaacaagtagataagtttcatctttccaaagctacattcactgtcgaactgaatttcgttcacaataatatggcttaaatacgcgtaacatgcttaagttccagacttaattttgccaatcaagttattattttattaaaattcaattaataaaatttatcaattttaaactgggttatttttaattcagatccaattttcccattttaaccagtaggcgttaaatcatcgctgcctagatgatcattcgggtcagtgagctttgtttggactttggatttatttacttattgtgcgtgaaatagattttcttcttttaagattgattcttatgttttaagtgaaatggcttttgtgtttcttagtttctacaaacaatttttattcgacatacagctgcatataataacataatatgggtcttcttattagtgtattaatgattgggaaatggttacttacttattttaagtatgataaaattgcttacattcgttttcttctttttacattcaaatcaacacattagtttacttaacaatctgcccaaaactatgctatggaaccgttaaaaacatttagaaaaaagttaagcccaaaattgagccctataatatggtattcagcttttcaaacacatcagaaaatattaaagcttttaattaataaaaaaaaaactctagcaacttaaaattgtttaaactaattacgctgaaatgcaaaactcttgtttttattttattttatagctttaaaactctcaaacgctgaataagttacaatttaagtacttattcatacatacatttaaataataagtggattttctatatagcaaacaccgataagaaataagacctacaagtacacagctatttactccgacttagcggtggtcattgcttctccggaatgctggatgccgtcgataaagtcgctgccctccggaccgaatccctcgttctccgcctcggtccgctcaagtatctcacggatacgctgctccgcctccagagttttcaggtgattgtagcacaggtgcagcttgtaggctgcctcgcatcgtgttttgccctgaagatcactacactccttgatctccgccttctcatgctgtatgatcgtttgcacctgattcttaaaggcctcctccagcaggacattgtacctatccaaatccagggtctcatacagacagctcacaaagcactgcagcggctcattatgcttcagatcgagatatggcatctgcgagttgccattgaagtccagatcacccaggttatttacatcgccaatggattgaactggcgtaggggctatatcgttgtcattattgtagtcgctgttcatcaggctcatgtgaaagagtttcagttgcgacattgagatctcggtcctacgcatacaagccctcagcatctcctggctgagtttgttttctgttccatttggcggatctggaaccagggttcgtgtcatcgacatgttcagcgagacggaaagcgatcgggtctgtggatgaaatgtatttttgtaaaaattatatattgtctctatgtattccaatatgtctttttagttgtaagaaaatttgattcacttcccttttttaatatttaccttgtaaatataaaacatataattccaagtactacataagtcgaatttacaaaagatatataaaatatgaaaaacattacccatgctttagaaacgaattcactaagagtgaggcaaagcaatgccatcaaactggctcgaaaatacatctaagaaatatttttaaaatttgtttgacgatttactataaaaacttttcaactatagagcctgttgcgatttaacaaaagccttttatagagtcgtctttatggaaatcggtttaaattgctatttaattgtcgctcaaatcgattgccaaatcatgttcatgcctcacttgctaggcccatcaggtaatcatattcagatacatcgcatataatgtgtcatgcatcagtggattgccaatagcatttttgggtgagaactcaaattagcattcgccaaaaacactcatctgacttatttaatggtctctataattgcacaaatacaaaaaggtttgcaaaaagtttcaggttcaatttggtagatgaatctacaaaacatttaagtactgctctataaaggtgttttaaaaacggtacaaccattgttggcaatttcaattaaaataatcattgtaatttttgactaatttgtttttgcaagcaatgtgggtttttcttgttgtagttgtggaaacataaaaaaatacaaccagaagttttaattagattatggaagtggttacaagctgtatgcggaaaaatgatagtacatagaacacgttttccttctaagataaaattattatattccttactagtctagttgtattgcaaacaaattcaatcacattagttcaagccacagcaactggtttacttgaactccttctttctttggaccactctaattgacggacttaataacagacttctgctgataatcggaaacacaaccgcagcatccccagccacatcacatattggtctttaagatcaaagaaacttcacatggacggacaaaaagcgagagacatcggagcatgaaacaagcaagtggcagccaccctgcagcgaagtttttataaaattaaattacattaatgtgagaaccgcagggaaagcctcccccttcaaagcatcagcactcaaccccaac

SEQ ID NO: 37334 - DNA, 1149 bp, DROSOPHILA
atggcattgctttgcctcactcttagtgaattcgtttctaaagcatggacccgatcgctttccgtctcgctgaacatgtcgatgacacgaaccctggttccagatccgccaaatggaacagaaaacaaactcagccaggagatgctgagggcttgtatgcgtaggaccgagatctcaatgtcgcaactgaaactctttcacatgagcctgatgaacagcgactacaataatgacaacgatatagcccctacgccagttcaatccattggcgatgtaaataacctgggtgatctggacttcaatggcaactcgcagatgccatatctcgatctgaagcataatgagccgctgcagtgctttgtgagctgtctgtatgagaccctggatttggataggtacaatgtcctgctggaggaggcctttaagaatcaggtgcaaacgatcatacagcatgagaaggcggagatcaaggagtgtagtgatcttcagggcaaaacacgatgcgaggcagcctacaagctgcacctgtgctacaatcacctgaaaactctggaggcggagcagcgtatccgtgagatacttgagcggaccgaggcggagaacgagggattcggtccggagggcagcgactttatcgacggcatccagcattccggagaagcaatgaccaccgctaagtcggaccatattattgtgaacgaaattcagttcgacagtgaatgtagctttggaaagatgaaacttatctacttgttggttgtattcctaattttcgctctaagcgaactagtagcgggccagtcagctgcggaattggcagcctacaagcaaattcaacaggcctgcatcaaggagctgaatattgctgccagtgatgctaatttgctgaccaccgacaaggaggtggcgaatccctctgagtcggtgaagtgctatcacagctgcgtctacaagaaactgggtctcctgggtgacgatggaaagcccaatactgataagatcgttaagttggcccagatccgtttcagcagtctgccggtggataagctaaagagtttgcttaccagctgcggaaccacaaagtcagccgccacctgtgactttgtctacaactatgaaaagtgtgttgttaagggtattagtgcctaa

SEQ ID NO: 37335 - protein, 382 aa, DROSOPHILA
MALLCLTLSEFVSKAWTRSLSVSLNMSMTRTLVPDPPNGTENKLSQEMLRACMRRTEISMSQLKLFHMSLMNSDYNNDNDIAPTPVQSIGDVNNLGDLDFNGNSQMPYLDLKHNEPLQCFVSCLYETLDLDRYNVLLEEAFKNQVQTIIQHEKAEIKECSDLQGKTRCEAAYKLHLCYNHLKTLEAEQRIREILERTEAENEGFGPEGSDFIDGIQHSGEAMTTAKSDHIIVNEIQFDSECSFGKMKLIYLLVVFLIFALSELVAGQSAAELAAYKQIQQACIKELNIAASDANLLTTDKEVANPSESVKCYHSCVYKKLGLLGDDGKPNTDKIVKLAQIRFSSLPVDKLKSLLTSCGTTKSAATCDFVYNYEKCVVKGISA

SEQ ID NO: 37336 - DNA, 2318 bp, DROSOPHILA
gtcagatggggttgccgctctcttccttagcttgttggtaacaagcttgtaggcgaggccccagctgtctactctatcctgcatctccttgtaagaccgcgctttggcagccgcaatgccgtgcttgagagcaagagctccgcgtggtgggtgcagcctctggctcgttgcgccgttctccgagccctgaggcagtcagaccgaagttgactttgggtggcacttcatcagtactcgggtggtttgcggtgtgccttctcttttctttcttcttctgcacagcatattcatgaggccagccgccaaactctgtgcatccccatttgggatttccggggaattgatctgataggccagcatgacctcatcgatcttcctggggtcccatgcttgccgggcagttctactctgccgtctccaaggcggaccctccggggagagaatgaaggaaatcaaatcgcttttttgttgttatcaacaagccctctactgacaaaggtgacgtcaataaatgatgtacccctatcgttgttaaacgtcggacttcgaccgtcgttcagtagtgcgattccccgcatcggtgattcagccagttcctggacttggagggagctgcaacacctgatagctgctctgcctgactcgtctaggatcatggaggatggtcctgttccagtgatgtaaggttcgcttaggagcatgatgtctacattgcgctccgccgcagtctgagccaggagagctgctgcgcaatgattaacattgagctgtattacgctaatatgggcgtgcattatggtggcccttagcttcttttaggttcgctctgtaggtcgggcacgcaaagctacccgtcgggtgctttctgtccacgtcgctgctgcaaatcaggcactttggtgctgaaacacacccctttgccttgtgaccacgctcaccgcatttaagacaacagtgtgccctgtcagtcttcttgcacgttactggccatgtggttgactcatttggactcatttggtctgggtgtcgcctttccttcaccgttgccacccatcgtgttgttcctcggcttgggcgcctggactttgggcacttgccccttgggctccggcgcattgtgagaaacctttttggttggcttttttggctccgtctgggtagaactggtcgtcacgcggtgctcgctagttgcaccttcatacagctctttcgccctgttgttaagggctgagcgttcagaagctacgcccttagtctctcttgtgacgttccgttgagtctcgaatgcggatagcaggatgtttatcttgccattcatccaggtgagaattcccttcaggtcctcattctggagagccgtggtcaggtctgaagaccgatgcggtgatccagcagggaacttctggacttgccgcggtggtagctgctgtaggagctaagttctccacctctacagcagcactgcagtcgctagtcaacagtggctggggcctacttgctaaccccttgccaccgctggaaccgagattccgtcaccctgtgtcggaaatcgctcatatgtatttagctatttacctgcaacaggcgtatattcagctcgcgtgatggctgcgccaagataagtcacgtctcaaccgtgtggttcttaacataagcgttaacatgagacgtccgtctgcacggcgatgtagactttgtcttccatgtttgtctaaaatcagatcactgtgcacgaaaacacaagatcaaaactttcaagcgagctgttaagccgcacgagagcagtctgcaagctcagaaattttagattttgtatgggagagcgaaggagtgagagcaagagaatagatccacagtgctgtttacaacaccaaacaccaaacagcactgcgaacaacgcacaaaagggagagtaaacaaacacaaagacgaaaaatgcaaaagtctttgtatatttgtttaaactactgcaaaaatcgcaaagaatcactcgcgaagcgaacggatctttaataattatgttatatacaatgtatgaaaataaaagaagattattaaaaaccacggctagtttgacaaacacaaaataaaaatcggagggcaaaaaaaaacacgaccgttcgctttgaaagccaagttttttttgtttttatcagatcagcagccaattggcgatgtctctatcactgcagcgagggatctcacctgcaacaccctgacctaattaattggcgcttaactacgagaaacccaactcacgtgccactattggcacaatgaataattccagctgctgtgctaaagaaatatttaatttt

SEQ ID NO: 37337 - DNA, 318 bp, DROSOPHILA
atgaatggcaagataaacatcctgctatccgcattcgagactcaacggaacgtcacaagagagactaagggcgtagcttctgaacgctcagcccttaacaacagggcgaaagagctgtatgaaggtgcaactagcgagcaccgcgtgacgaccagttctacccagacggagccaaaaaagccaaccaaaaaggtttctcacaatgcgccggagcccaaggggcaagtgcccaaagtccaggcgcccaagccgaggaacaacacgatgggtggcaacggtgaaggaaaggcgacacccagaccaaatgagtccaaatga

SEQ ID NO: 37338 - protein, 105 aa, DROSOPHILA
MNGKINILLSAFETQRNVTRETKGVASERSALNNRAKELYEGATSEHRVTTSSTQTEPKKPTKKVSHNAPEPKGQVPKVQAPKPRNNTMGGNGEGKATPRPNESK

SEQ ID NO: 37339 - DNA, 2354 bp, DROSOPHILA
tggatgggctccgttcttcggcaccacttctcgcggcgcacaagcgtaggcaggtactcggtgtcgcagcatgcgagcaaccctccactgctttcttgtagagctatccatggacagctccgcatccaatccaggcgtatccggcagattggctactcctttgagtaagtcattcggcgtcaatggcgcctcctgttcgtcatccacaggcacatgggtaagcggacgcgacttcacaatactctccgcctcgatcaagagactctccaaatcatggtccttcggcgcaacttccttcggggtaagacgcagtctctcaggctctcttgacgcactgcaccatgctttaccatactccgccctcagacgggtttactgggcaattgaaaacccattcgctgcttctgcttgacaactcactctgaatcttctccatctcgaacacgtcaccaaagcgtatggcttccctgtcagctcccacgaagttcttgccgttgtcgctgcatattctatgtaatggccctctacggcagaagaagttcctgatcgcaattatgcaggaatccgtcgacaggtcatgcgccagctccagatgaatcgcccttgtcgacaagcacgtgaacaaggggactgcaccatgctttaccatactccgccctcagacgggtttactgggcaattgaaaacccattcgatgcttctgcttgacaactcactctgaatcttctccatctcgaacacgtcaccaaagcgtatggcttccctgtcagctcccacaaagttcttgccgttgtcgctgcgtattctatgtaatggccctctacggcagaagaagttcctgatcgcaattatgcaggaatccgtcgacaggtcatgcgccagctccagatgaatcgcccttgtcgacaagcacgtgaacaaggggacccaacgcttctccttgtgacgcgacagtcaccaacagtggtcggccgcaatcgctgcaacttgcactcgttgctcaaatattccgtattcgtaggggctcgatctccacgttgaatctgaagtcatctgttgctacctgccaacgcattccgtggatcttttgctcaccctcaccccatccgccgcttttgacgcgttcaggtcctaaagccgtctccacggtggatgagctggatgaaaactggcataactcgaatccagcatccgcatgtatcgccttcactcgggtagatacgatgaaaatctcgtcctctgtagcgaaactgtccacattgtcatcagaatccagaaacttcagagcattcacggtcttcacataatgtgcagcgctcgggaagaatgctgctccaaaggtcattacgttcatcttatagacatccggacctctctcgtcgtcgccatctctccaaaggaatcgttgggaacatctgtcctcaggtaggatcagcacttagtcgaacatctccttgatgtcagactccgactgctccctctctgaaatgaaagagcacagatggcaaaggcttaaagtgctaaggccctttgtccagcttcaaatttagagagattcctctaaccttggctgcatcatcaaacacaagccgcacattgccgggcttgttggggctttcgacaccaaatatggcaaataccataaccatccggctgtagcctccttgcgtattctttagacacgtaatcctttataatccgatcatatttctgcgccaacggctacggcagcacaacgtggtcgtcctttcaaagtaatcccgtcctccaccatctgttcaatcgcgtgcaagtaggcaggacctcgataatggtgtagtcgattgcctacttacaggcccagcccagctcggttgcggccgcgtacggtcaatctctagcgaaccgcctcgttctaagtggcaatccgagatgtccgtgatccaggccgatgagcagcttcggaaccgcgttgctgtagatgctgtctgcatcggcagactcagactcattgagctttccgcttatctttaaactcaccacgttggtaggctctctagttgttctacctcaaaaccattggatatttagctgacgacgctctccttgcactccaagatatcttcgcagctcgtcatcgatcatcgtgacggaggatccatcatataagagcgcatacgtatcaaatttcccagctccgtacagcgtaactgggcaataatacggaacagtaggcggcttcttcggtgtcgagacagctcaaattcctctgcatgggcgctcacgcttcccgcggagcttctctctccaggcagtttctgggaagggctggctgctggtttctctcttggtccctgtgaccatctcgtatcgaa

SEQ ID NO: 37340 - DNA, 354 bp, DROSOPHILA
atgaacgtaatgacctttggagcagcattcttcccgagcgctgcacattatgtgaagaccgtgaatgctctgaagtttctggattctgatgacaatgtggacagtttcgctacagaggacgagattttcatcgtatctacccgagtgaaggcgatacatgcggatgctggattcgagttatgccagttttcatccagctcatccaccgtggagacggctttaggacctgaacgcgtcaaaagcggcggatggggtgagggtgagcaaaagatccacggaatgcgttggcaggtagcaacagatgacttcagattcaacgtggagatcgagcccctacgaatacggaatatttga

SEQ ID NO: 37341 - protein, 117 aa, DROSOPHILA
MNVMTFGAAFFPSAAHYVKTVNALKFLDSDDNVDSFATEDEIFIVSTRVKAIHADAGFELCQFSSSSSTVETALGPERVKSGGWGEGEQKIHGMRWQVATDDFRFNVEIEPLRIRNI

SEQ ID NO: 37342 - DNA, 2228 bp, DROSOPHILA
actatgatacctaagttcctttcatttatattgcaaaattggttgttcttggcacttgactaaagcaacatatatttttactaggcgcaataattttgtcgttagcaagtgaatttttcaaaagttattttgtggcgccacacaatccagtctttttgtgcggccatttcgtgtactaggtttcatgcttagcaaagacaggaaccaacgacaggtggtgcctgactagggtaacagaagtctttatcaaaaagaaatgaaccgcgcaaaaggcaatttaaattcgtatttgagttaaatattaagtgattttttcataatacatgcattttaaaataaagttcttgacaattgggaacattctatattttctttagaaacggtagatattttgtgacctatctctgtttgttttctaacttatattatctgcgatcttacgcatatcaaccttcaatgaatccaaaccatctcagatgcttccactaatccgctggcattcgcgcagttcatcgcacacattttttataataatcccatccaacccgacaattgtctactcacgaaattccaaattaaaatttcacattttcccttatttgctgcgagtgtctgcgagttgaattgaaatcaggccttcgggctcatatctttcattagcatttttaatgcctgtttaacctttgtgtttgaaccgcatctttcgattgtttcctgctgaatttttctcccagctttcagcaggctgtgggtcttccgtatttggggtgaattgtcttataaatctttcttcatattatatcattttattttgatccacacaggcgttaacatctttggtaagtcgtctagttaagttacgaagcagccatttctattaaaaatatacagcttttaaacatttgatttcgaattaataaccatttcagggagcaacatgagtatttctttaatacgcaaacatctgaacgagatggggacccttaagctccgatcgtccatgggtcggaactatattcccatggccggtcctcctcgatttccgatgagttcagcgcagcgtttgatctttggttgcggttccttggttgtcatgatgatcattcccttctactgcctcttcagcctgccccgatggtcgaggatgcatttgggacttccgccggaggaggacgagcaggcggaggagcctccaccacaagaggaaaaggacaaggagaagaaatagatccctgatcttacgacacgctttcctttaaacggtgacttctgaataacactttcctggggtttccataaaaagaacttgcaactgcgtggcgctatttctatcaacaacgcagcatattaaaattgcgccatatcgatcgttaaaatataattgttcattttattggcgcatcatctttagtgtatgtagtgtgtggttaaaatccaatctcatgtgctacccacttttagtgaccatcgtaaaatggcaccctcgtcgatagtgaaagtgaggaggccatgctaaatcatactaaatcaagctgacttgatttagtttacaccccacaaatagatccgctttgaagtctgcccaccaattggggatccacagtagcaccgcagacaataaaccatccattgtccgcgtccaattagttggcttaaacacctttagccaagagccaagcgagcaagctcctgtggaaatgctcctccgaagccgcaagaccaatttcctcggctgcctgccacaaatcaaattgctggaaaactaaacaaaccaaaaaaataaagtaaaaccccgagaaatacgaaaaacccaaacaagccgaggaaacccaaaaagcaaagtgcctactttcattaaaagtatttctgcgctcattgccaatgcattcgattgtggactttctgggtccctgggagtcccatgcctagttaggcctccgacttgactttgaccacctccttttggctgtgggccccgtatctcgcatccaatcctcatgatctacaacacaccatgaccttcttcgccttgtctacacagcaagaaattataaggagtcactccactctcactctcgttctcccctttttactttaagctactcaaaatgaaaagtatttccctgtcgaggtcaaattaatgtcacttttatgcagctcatccttactaccattactaaattatgaaaattattcgacgtgcagagagatactcgtctcaagttgaa

SEQ ID NO: 37343 - DNA, 228 bp, DROSOPHILA
atgggtcggaactatattcccatggccggtcctcctcgatttccgatgagttcagcgcagcgtttgatctttggttgcggttccttggttgtcatgatgatcattcccttctactgcctcttcagcctgccccgatggtcgaggatgcatttgggacttccgccggaggaggacgagcaggcggaggagcctccaccacaagaggaaaaggacaaggagaagaaatag

SEQ ID NO: 37344 - protein, 75 aa, DROSOPHILA
MGRNYIPMAGPPRFPMSSAQRLIFGCGSLVVMMIIPFYCLFSLPRWSRMHLGLPPEEDEQAEEPPPQEEKDKEKK

SEQ ID NO: 37345 - DNA, 6883 bp, DROSOPHILA
gtacgtggaagaactaagaacgtgcggagttgacaacactttgtgtgccactttcatgcaaatcgccgtctgacgacccaacatcttagcataatttcgtaattttgttttacgaccagaagcccagacacataacacgttcgtaacccttgatgaagtcggttagaatgtacttccgaaattatagtctgatgatgatgatggcagtgggaacccactttcgactagcttcttgggcagaagtgggaacttcgtggaggagtgcatctatatcgggaatcgacctattgactgactttcatttccgcagaatttgagtcaaatgttttgggaaagattcgttagcggagatcattctgggccatgtatttttatgtatctcgctaaactgctattttctcttaactatcctattcattataactcagcagtgtctggttggcctcgctttttatgagtcccatttgaaattgtaggtcaggttttcaatttgaagtagcatgttagtaatatgcagttaataatctttttgcatttagttagcttctaacaccccttctaattcaatccaaacgtaataaaataagcaataaaatgtagtagctataatatgtatgtattctcggggcataaataatttatacaaaatcttatatctaggagtctacagactaatctcgctctatgagaagtgccatgcccgctcgtcctcctcgcgatcgcagttaaagcttggccagagccgaagtcgagcttataattatgtaaatcggaggatgcttaacccactggtaccgatggggcttgagttggaatccgttcaaccagggtccggatggggatgggggcgtggctatgcgcagtcatcttcagctaaatgctgaagttttcttcctctcaaaactttgacattcagcaagacaagtgggcatagctgagtagctggcggaggaaggcggaggacgcggcgggacagtcggtggagctggggcaggggcacctacaaggtgcactggtactgctgctgctgcagtgcacgcggcaacgttttgtgcggcaggtgggcggccaggcagggggatgggctgcggggcggagagcggatccgctggcgctgcagcagaacgatgcaaatgctgatgattatcacagatagcgagacggttaccagcacgctgctaagatgggagccaatataacgcagaacggctgcacaggaagaaaaaaggatatggaaaaatctatagaaatatttcaataataaaaaagcaattatataggtcatcaattcgagactttaatctaacaagaaatgtaaagaatgttattcctataaatcacaactaaaatatatttttctaaattttcacaagtttatgggcatttaggaatcacgattgtcgctgacaggccacttaccttcattctcgtcgctaccacctgatggcgagcccacctccaacggcatccaggaactgtggctctggtcgacaaccagtttggcgtacttggtgcccaccacaggctccaagtgatgttcctccgccggctcatcggccaaactgttgacctcgttgaggttcagagctctgccctgacctctgggctgagaagcctgctcggtggtgggcgtcggggcctgttccaccaccgcagcctgttccacggactccgaatcggattgggactcccgctgggagtccggttcgcgaagcaccagctccgtcttgttgacgtagcgcatcggtcggagttccctgcccaggcgttgatcctcgtctggctcaaaggggtcgttgggctcgtaggcggcggccaccccgttctttccaggtacagtgaagcttgctcggaccgtctgcatgcctgagtggtagctgcagaccaccacaaagctaggattcgaacagaggtttgataaaaatgataaacctctttaaaggtgccacactgtactacatatgtactacatatttgtagaaaataataaatagactatatgttaccgtcttgtgctgtgggtaaatatgccaaggttttcctgtaccgtgatgaaggtctccaccgtgttggtctccggtttcaccaagcttccacactctttgtgatcgatcctcatcgtgtacttgtccgccgcatcgctggcatcgcccttgatcccacagtttcctccatccacgacgatgcgtcctccgaagtacggacccgtctccacctcgatctctgaggcatgcggcaaacactgggtggcatgtgcggtgactggtaagttttggaaaatatatacgttttgaaaaagtactacgtacgacgttttcagtgcttcagctttttacaagcgtaagttggttgtaaacttaaataatacttggaaaccacttacagcccttggtgggtatgacgatgctctggcccgccagatgtccggatccactctcgatctcgttgttttcatcgtgaaagtctgcccgggcattggagctgcgagttccgcccgcctggaggcgcttctgagcagccgggcgaacgtggaaactgtatttggtggccatgcgcaagttgtccacggcagcaacaaagtggtgcacctgggacctacaaaggcattgagtaaatggtcttaaacgtaacttaacttaatcgtattcagctttgcactaaaaatttgatcaactatttccagttgagcggatgagctaggagtataactcttttattacttatatatcattttatttaagattacgcgaatgtatttgtatttcttttgaaatatttgcctaaagatattttcattttcttctgttcgttaaaggcaaatccaattaaatttcgaatttaaagtgcaccaacattcttacgaacttttgcatttcctaaatggcaaaaccacttaccctgagggttcatgcttctcctgctgatccgtcgccttctcattctcctcctgggacacctcggcggtggtgccattcaccaatttgacgcgacaccgctgtgggccgtagttctgcatctcacagtagaatatctggaatgccagatcccggggcggttccacatcgccgctcatatttgtcgcgttcacctggtccgctctggagttggagttggggctcgaatctgtgtcatgggccgacggcacgaattcaacttcccaggtcagattcaccgatttgtaatttggttcaccggcaacgccgcgtatctctatcgaaggttacaaaagcatgagcatgggcagcaacgggaaaacggggttatagccaagattcgtggcagtggcaatggcagttggtagttggcagttggtagctgttggtcttgcatgcaaatcagccaccatggttagttactttgctgcaagagcataggttcggggcaaggaactcgttttccgccgcctgagcttcagacacgcttttggattagttctgtttcattcggttggttttttgtggaccccactaagtggttgttcccactggcagatctgcagaagaagatctgaagtgtgctgccagttggagtcaccagctctgcacttccactccagctgcgagtgatggtggatctggctcggagtgtgacgtgaattagccaaggggggcaggtagttaagtcggaataagaactagacctgacgacgatgatgatgctggatgttgcggctaaagggatggtgcaacttggtacttgggctttaaatgctaccaagaactttgattgaacgagctataatgtagtattacattttcgaatcgcattgatgctgcacattctaataagaacggaaattataccttagcattaaaagtcagcagcaacacagcataaaagctgagaaaataatgcattttacaaacttagcttgcaaaaaacgcttcctcgagattcgtaacaataaatccctgatcaattatccattaatcacaacgtcgagtcccggtaaatttccaattttccgtgcccacttagccccgatttccaggcgatttcccaagcccgccagcttggggacttcttctgagccagaaccttgcataatctgcaattagaaatgccagttgccgaagctagcttgtttgtgtttggccatgtagtgatgttgccaatgttgcagttgttgcagcttcgggtggctgtctttaccatgcttttcccatgttgaaatcattgacaccgattttgtgtgtgtctgtgcatggtagcagcagcatttttaggcgaatttcgcacagagaacatggaaaagtgaaaagtctgcgatggcacaaattctgaaatcggggctacggctagatgccattgctgagccaaaatccagcagaaaattaataaaaatgcgatgcagaaatgaaagacacttcaattgcagcatcgcaatgattaatggtgcttttcgatcttgggaattctactatctatgacggtgcacaaattttcggttaggccatattttcgtaggccgtcactgcagtgttatgcaagccaggaagtggaagtgtcgatgagacccgaccagagattcattaattttccattggccacagccagcgggaagttctgtaatacaagatcgtcggacaaattgccttcaatcatctggccagatcaatcttgatctgtcaccgtatggcgatgtaattgcaccgctttagctaattcgattagagagagaacggccgaaacctgtgttttgtggccaacaattactggcattttgtcccggcctaatgacacttttgctctccattgaaaatctctttgcgatttccgctctgcggctctgggcgtgccagccgccctcatttagcggccaaaaggaaatgtcgacacatttcccgcgtgcccacatgattggcacacggtgcagaaaaagctggccgccgggcaagttcgttgtctgagtctttcgtttgccaccaagggcagacgtagggaaaataccacaaggaacataactaggttcagggaaaaaagcgcttgatcgtgaccaagtgcaattagccaacattcgacaagaataggtaaacaggaaaatcaacacgctaaaaaatattgtgttctagttaaatcttaaaaaggctatttggaaaaatgtttatgtttctatataacattgcgcagcagatggagttttcacgtaagaaatcatatttctaatttgcttgctgcttatgtgctgcttacaaggcaaatgagaaactaatatttaaagttatttttttctgtgcagctgacatgcctgcgaccgcagacttttagtagctgcaactttaactggccctgcgattgtctgaatttattcctcggctcataggacttaccatatttgctaccagccttggcattggcattgcggattgcagcagttgttgctgctgttgcggttgattcggttgatgcggtcgctgctgttgttgctgctgttgcattgttgctgctgcttttgggcaagcggacgggggagaccgacggcagcaggagcagaagacacagcagcaacatgttgcagctgccgtgggctgccattgatttcgttgacattattttcggtagatttttttaagtttgctgtttgttctcatcaaatgtgtgtcagccgggagttatattgggcgattggtcgtgagggaaaatgcaagtgttgccaggggacccaaatgtttgactttagatacttttttttttccagtactcgttttgttttattttatgttatgcactatttggtacggctctcgcagaacaataccagctgattgccaaaagccacttttgtccgcaaataaatcgcatttgtcacaacacaaaaaatcataaatagtacgaaagccgcagcgtccgaagttttggtaccgaatgttccgacacaagaaccgctcgcgttaacctgtgcggcacaactgaatcagcgggccaaaggcagcccaacatctggccaattcggatcagctgttggccataaacgaagccgaagtcttagttaaaaagcgagccaatgccaaggccgaaaagcaaagctttcgccgaagctttccgctctctagcgctctctctcccatgagagatggaaaatgtgaaaatggcttttcccttatcagcagccgcttatcagttgacaaacagccaattttgctgctgtgctttcttttgttaccaaaaggctacatttaaaacccatatattgggccgagctttttccataattaaaccagccgggttccataaatttcatcgaaccgagatcatcactttcccttttctccgacttccaatgcgactcccattgtcttgtggctttagtttggcgtctttgttgttgatttgcccagctggcggctttgattaatgcttaatcagcaatattattgttattaggtttctatagcgggccaggcagcattttcataaataatttgccagttactttgtgccgagcacagtcaattataagctcgaacaaaaagtttctctgccacaaaagatgctacaaaataaatgaaaagtgtacgcaacgaatggcataatgaaaatatataattaattattggcactcattgcataattgaggtcttttgatgaagtgaccagtgcgcaaacttttaaagccatctacttttgtctatcaggtatttataaaaaaaaaagggattgctcttttaaataatattatgccctgaagttagtttatgtctcagaaaagtgtctaaaatggaaattttatattactgttgtggttatttttacgtagaacttctttgaagtattttatattacagtcatttgtccttcgaaaaaacacacgagtcaacatctttattagaagtaatttgctgcttatcgcttgagctttagctccatgataaggtaaaccatt

SEQ ID NO: 37346 - DNA, 2019 bp, DROSOPHILA
gttcttgtgtcggaacattcggtaccaaaacttcggacgctgcggctttcgtactatttatgattttttgtgttgtgacaaatgcgatttatttgcggacaaaagtggcttttggcaatcagctggtattgttctgcgagagccgtaccaaatagtgcataacataaaataaaacaaaacgagtactggaaaaaaaaaagtatctaaagtcaaacatttgggtcccctggcaacacttgcattttccctcacgaccaatcgcccaatataactcccggctgacacacatttgatgagaacaaacagcaaacttaaaaaaatctaccgaaaataatgtcaacgaaatcaatggcagcccacggcagctgcaacatgttgctgctgtgtcttctgctcctgctgccgtcggtctcccccgtccgcttgcccaaaagcagcagcaacaatgcaacagcagcaacaacagcagcgaccgcatcaaccgaatcaaccgcaacagcagcaacaactgctgcaatccgcaatgccaatgccaaggctggtagcaaatatgagatacgcggcgttgccggtgaaccaaattacaaatcggtgaatctgacctgggaagttgaattcgtgccgtcggcccatgacacagattcgagccccaactccaactccagagcggaccaggtgaacgcgacaaatatgagcggcgatgtggaaccgccccgggatctggcattccagatattctactgtgagatgcagaactacggcccacagcggtgtcgcgtcaaattggtgaatggcaccaccgccgaggtgtcccaggaggagaatgagaaggcgacggatcagcaggagaagcatgaaccctcagggtcccaggtgcaccactttgttgctgccgtggacaacttgcgcatggccaccaaatacagtttccacgttcgcccggctgctcagaagcgcctccaggcgggcggaactcgcagctccaatgcccgggcagactttcacgatgaaaacaacgagatcgagagtggatccggacatctggcgggccagagcatcgtcatacccaccaagggcttcaccgcacatgccacccagtgtttgccgcatgcctcagagatcgaggtggagacgggtccgtacttcggaggacgcatcgtcgtggatggaggaaactgtgggatcaagggcgatgccagcgatgcggcggacaagtacacgatgaggatcgatcacaaagagtgtggaagcttggtgaaaccggagaccaacacggtggagaccttcatcacggtacaggaaaaccttggcatatttacccacagcacaagacgctttgtggtggtctgcagctaccactcaggcatgcagacggtccgagcaagcttcactgtacctggaaagaacggggtggccgccgcctacgagcccaacgacccctttgagccagacgaggatcaacgcctgggcagggaactccgaccgatgcgctacgtcaacaagacggagctggtgcttcgcgaaccggactcccagcgggagtcccaatccgattcggagtccgtggaacaggctgcggtggtggaacaggccccgacgcccaccaccgagcaggcttctcagcccagaggtcagggcagagctctgaacctcaacgaggtcaacagtttggccgatgagccggcggaggaacatcacttggagcctgtggtgggcaccaagtacgccaaactggttgtcgaccagagccacagttcctggatgccgttggaggtgggctcgccatcaggtggtagcgacgagaatgaagccgttctgcgttatattggctcccatcttagcagcgtgctggtaaccgtctcgctatctgtgataatcatcagcatttgcatcgttctgctgcagcgccagcggatccgctctccgccccgcagcccatccccctgcctggccgcccacctgccgcacaaaacgttgccgcgtgcactgcagcagcagcagtaccagtgcaccttgtag

SEQ ID NO: 37347 - protein, 556 aa, DROSOPHILA
MAAHGSCNMLLLCLLLLLPSVSPVRLPKSSSNNATAATTAATASTESTATAATTAAIRNANAKAGSKYEIRGVAGEPNYKSVNLTWEVEFVPSAHDTDSSPNSNSRADQVNATNMSGDVEPPRDLAFQIFYCEMQNYGPQRCRVKLVNGTTAEVSQEENEKATDQQEKHEPSGSQVHHFVAAVDNLRMATKYSFHVRPAAQKRLQAGGTRSSNARADFHDENNEIESGSGHLAGQSIVIPTKGFTAHATQCLPHASEIEVETGPYFGGRIVVDGGNCGIKGDASDAADKYTMRIDHKECGSLVKPETNTVETFITVQENLGIFTHSTRRFVVVCSYHSGMQTVRASFTVPGKNGVAAAYEPNDPFEPDEDQRLGRELRPMRYVNKTELVLREPDSQRESQSDSESVEQAAVVEQAPTPTTEQASQPRGQGRALNLNEVNSLADEPAEEHHLEPVVGTKYAKLVVDQSHSSWMPLEVGSPSGGSDENEAVLRYIGSHLSSVLVTVSLSVIIISICIVLLQRQRIRSPPRSPSPCLAAHLPHKTLPRALQQQQYQCTL

SEQ ID NO: 37348 - DNA, 3415 bp, DROSOPHILA
taccattaacttaattcacatgttccgagattacttgcactaccacattaaggtaagtgttgtatgcagctatgcaaaaatatcttttatatatttgaaatatgcatttttgagcagtgttcaaaggcttacattcattcgcgcatgcgagcaaaaacctcggatttcctcaaggtgctaaatcgtgcaaggccagagcccaaaaacacggagaagaaaactataacgtgagcattggactttccataacgaattctgattactaactcgtgttctttttgcagggggagaactttcaagcgcatcgattgatgtgttcagtatatttagttgtttttatataaatacaaaaaataaattgtgtattaaaattcgatatccgaatggtgaatccaacataaactaaaccagattgcaagacaaacccaagtattccaaacagaaccgtaaggctaaatgtaagctcagcaaaataatgatcaaagaattaatagttacgcgttagtaaatgaattgtgtgtgtttgtgtcgagtcatcgtcaaatccgtgtctccgccaatttgttacagtcataggccgagtcagcgccacagctgagccgcattttaaacaaataaacgtagacttaagtgcaacatgagaactaaaactaccatgtcaaagcgagcaacacgactaagggatgccaccaacttgttatatagtcgcaatggaggattcatccccgcaattagcctgtatgtgtagaaagcgcatttaaaaacgtactgcaaatattaacaaacctttgatacagcaatcggaattaataaaaacgagaaaatcaaactgcaatgtaaaataaaaaaagggacactcttttaatctctagctagctgcagacgctcgaatacactttattttctagcttattagcttttaattgcacataatgtcttaaatgttactaatatttcgcttaggtataccatctccgctgcacaatactataacaggcacttagatcttaaacttaacattctgcttcgcgttcatgctctccatgctgacctggaagttgagatagtcgctctggatgcgggcacacactgaaagaaatgtgttgggtaaactaagttgggactgaggagcgctttgactgttactattgagatgtgctacttacttacagtggcagtgttcattgcgatagagagtttactgcttaagtacttccgatagtttgtacagggtgcgggtgaatttacagagcccctagggatcatcgtactgttccaatttgatataagcaagtgctgtgatagagaagcggcagggcgagatggatagaataagtgagtaaatcgcttaacactgggaaaaattcgttccaagcatgcgaagagttctcataaatttggaacaagtccaaaactcaagaagatactgacttgaaatgcaattttgattattattctattagaagaagataactgagagtgaatattttgaatttgaaatattttaaaataacgtaacaatattaaaaaaccatttcagtcgaaattaaattgattactggtgggataactgaagatcaaagttttgtatcgcaagctactacttttccgtttatgttattttaagcccctttttataaatttgctatcaagattggaaaacagaagtgcttttcgtccaattgtggttcggaacttatcttaaatggttgtaatgccataaaatactacaattaacaagttatttagacacctaattattcagctgactagcatctctctataagaaatcccttcacattcaaaaacttcagaaagaatttttctcagtgtgaggtaactagcgtgcgacaagaggagtcagctggaggagtcgtttatcattttgtatatatacaaatgcgtgaactcgtgtgggaggtgggtggtggatgggcgggatagtgaggatgggtaggaggagctccagacaggaaaagggcttggctcgcattagggtgacagcgaaagtggggcagttggtacacaggttttctacgcgatgtgtatgtatgagcgggggtaatgagatggcggagccactttctcacccttctgcaggtccatgtcgtccatttcggagttcttgatctgctgcagcttctcgcggaacttctttgtgatctgcttgcgctggtagtccgcctcgatttcctgcttggtgcgcggtatacggaagcgaatgcagcagcataccataatcactgcggcaatgattcgattaaactgtgtccagaccgaagctacagctatgatgtactcacttattaggaggaggacacccagaacggcggcgataatgtgccacactcggaagcccgctatgaccacactttccagccacatttcatcgaagatatccgaatcgtcatccattttccgcttggtttgtgagctctgtcaggtgctggaaccgcggagctgctcccaaaacacgtccggctgcctggccaatccagttcctactgctggcccaggaactggtccgaactggcctgtcccaccaaataagttggtaagggaggcgcggcccaacacactcccttccttctggaaaaataattcgcggggtgtatccatgtggcggcaaaatggctaacttgtaaaataacaaacaatggagccatcccctcctgtggacaaatgaagcctgaaactagaaaaggcaatgatagatattttactagacacagggcaggattgcttcggatggaggaatctggaacacctttgtccttacgaaacttgcaatagttagtccttaacaactaacaagttcatgttctgaacataaggtatatttggaaaaaacgataaaaaccttttttaaaaaccttcatttgattttaaagtggtaaaattatacagttcctaaatatctgtataaagtattatgaacaaactcaacctcctttgtaaaaatccgtccctggtacattgtgaatatgaatgctaaaatgacaacaaactcgactcgagtccaagaaaatgggtgcggtgccgcatgcctcaggataaagacccactcactttacataccgcaaggatcgggggcgcaacagcggggaatcgcggggccaggacagtcctcccccaacaaaggacaacatgcaagtggttagttaaacgggcatggtcacctgctggtcacacccaattggttttgttactttccgcgctcgctgagatgctaactactaaggtctgggcgggatttggaggcgccggaatatggcctaatgactgtagaatgaaggaattggcgtccggtcttatgtgtgactgcaattactcaatcagactgaggggacgtggtccttttgtccctttatatacgtcttccagataaacaattgttatgaagccactgaggaaa

SEQ ID NO: 37349 - DNA, 414 bp, DROSOPHILA
atggatgacgattcggatatcttcgatgaaatgtggctggaaagtgtggtcatagcgggcttccgagtgtggcacattatcgccgccgttctgggtgtcctcctcctaataagtgagtacatcatagctgtagcttcggtctggacacagtttaatcgaatcattgccgcagtgattatggtatgctgctgcattcgcttccgtataccgcgcaccaagcaggaaatcgaggcggactaccagcgcaagcagatcacaaagaagttccgcgagaagctgcagcagatcaagaactccgaaatggacgacatggacctgcagaaggtgtgtgcccgcatccagagcgactatctcaacttccaggtcagcatggagagcatgaacgcgaagcagaatgttaagtttaagatctaa

SEQ ID NO: 37350 - protein, 137 aa, DROSOPHILA
MDDDSDIFDEMWLESVVIAGFRVWHIIAAVLGVLLLISEYIIAVASVWTQFNRIIAAVIMVCCCIRFRIPRTKQEIEADYQRKQITKKFREKLQQIKNSEMDDMDLQKVCARIQSDYLNFQVSMESMNAKQNVKFKI

SEQ ID NO: 37351 - DNA, 2862 bp, DROSOPHILA
tgcttgcctcgctaccaactgcaactgcgttcataattggtttggaataatagtttttgcttcggagactacctagctcgattcgattttcttgaaccaaaacaatttggcgaaataacaaaatgattactcatttcaagcgattgattctgtacccggtatggtttttttttttttttgatttaatgggaagattgttgtttattttaacgatgtttttaaataacctattgattcaacttagaacgtattgaaagagaacatactgcaaagcaaatcttttatgtaacacgttggttctactacttacttaatcacttgaatcaccttaattacctgaaattaaaaaataggtttttgtattttttaaattccctattactaacatatgccttcgccacaagtaccacgtgctagtcataaatcatctgattatgttgtttttcgtgctcattgctggaactggaaatattgaatatttgaatctcagaaatattcaaaattactcaaaaacgttgaaaaagagcgggcagcgccgagagcccgcagcagcagaggaaaacgagctctgccacagcgacgagcattttccgaggagctcacgaagtgccacgattttcaccaaggggaaggagggatcgttcgcttggagctccgccagttgggcgaaggtcgggggtcaggagacggcggagcagcgggatggacgggatgtgccaatgcaagaaaggcgtagcccttacacacttcgaaaaatattaatcgaaatactaaacttacgcagacaatcttgaattctgtgaaatatattttcttctcttttcagaattgttaaatgaattttttataaaatcaaacatttatattataaggacattttgtagaaaatattttttaaagttatttcataactcattatcattgaatattaaaagcatacttgtaactcaaaatgatggttatttctctgagtgcatgcggggggcgagagagcaaacgcatggagaagtccccgacgacgatgacgacacaaaaagcagagacgaactgcgacaaagagaacgccggaacggaacgtgaacgggaattcagaacgttgcaatcgttcgagggcctctggctcgctttttggcaggccgcgcggccagtcgtcagtcagttggccaacaaactggtagcgtctggtgtggcgagccaacaaaaggctggcagagcggccaacaccggacccggcccgaaactgaatccgggtccgggtctgggtccgtgtccgtgtccgggttggtttcgcagcatctacggcatcacggctgccaattgagcggagtttgggtctcaatttgacgcgtagccagccaagaagagtggccggccaacaacaaaaacaggtgacgcaggatgtggccaactgagtagggagatggcggaagagcaggaggcgcaggaggaggaggaggaggaggaggaggaggaaacgcagcacacttttttggccacggtccgcgtttgattagccaactcaaacatcagggccaagatcagggcaattgacagctctgctccctcagtttctgcttccgcttggcacacagtcacagagacacacattgccttatggccactggacgatggaccacagtggagcctgggcagtacgcaacacctgacgctgcccgccaggatactcccgttcgtctcgatcatacagcaaataagaaacattaaataaacaatcaaagaaacggagtattgctccgcaactgccaacaacattcaacgacaaccagttgctctgtggtgctagaaagtgagtgtaaacagtgtgtgcctttgtgaactgaactgaccaacgtgccaagaacgaagggacgaggaggtgggcactctggctcggacccaagcgatttggcaggagctgattgtttcatctggccaggcttaatgaaataactcgtcctggccgcggctccatgtcaaacgcagcagggcaatcgccagcgaagccccaaaggataagcatcgtccagaacatcggaatctccagcgaaggatgcaccaaaaacattatccacaggactaagatgccaaaggaaactttcaagatccgtttccaaaacaaaacataaaatatattcaataaaaatgaagtggaaatgaaatgatacataataaataccctaatacataacagaaacaaaagcaagtcactaaacttgactgcaaatataatacgatgacacttaatagaaacattgtaataaaattgaaaagaagtagacaagaataaccactcataaaactaaaatacccagcctataactatttttcaaatagttggcatagtgcttactatgaaccataatcgcatatgatataaccaatattgagcacttaatatagcccaatattatatagacccaaatatgaaatagtcacaaacaatagtgcaatacaatacgtttataaaacaacgtcaaaagttttataacgaaaatatatttctttataatgagcactttcgaacaactacatttaatataaaatagcgcgggaagtcttcggcgtggtgaaagtataaggtgtaagcacagctgagaagaaaggaatttacaaaatcgaaggaagaagtgaaagaaggagtgaaaaaacatctaagcgcggaaaagtgctacaaaatggtgagtagagtctacatgttgatttaaattgctgatgtggcatcttgatcatatctttgattatagttagtaagaagtattcgcttagagtagtatacaaacttctagtagcttagagttacattttaagacgggtacgggttaagaaactatcctatcaacacttaacacaaagttaagattt

SEQ ID NO: 37352 - DNA, 862 bp, DROSOPHILA
atggagaagtccccgacgacgatgacgacacaaaaagcagagacgaactgcgacaaagagaacgccggaacggaacgtgaacgggaattcagaacgttgcaatcgttcgagggcctctggctcgctttttggcaggccgcgcggccagtcgtcagtcagttggccaacaaactggtagcgtctggtgtggcgagccaacaaaaggctggcagagcggccaacaccggacccggcccgaaactgaatccgggtccgggtctgggtccgtgtccgtgtccgggttggtttcgcagcatctacggcatcacggctgccaattgagcggagtttgggtctcaatttgacgcgtagccagccaagaagagtggccggccaacaacaaaaacaggtgacgcaggatgtggccaactgagtagggagatggcggaagagcaggaggcgcaggaggaggaggaggaggaggaggaggaggaaacgcagcacacttttttggccacggtccgcgtttgattagccaactcaaacatcagggccaagatcagggcaattgacagctctgctccctcagtttctgcttccgcttggcacacagtcacagagacacacattgccttatggccactggacgatggaccacagtggagcctgggcagtacgcaacacctgacgctgcccgccaggatactcccgttcgtctcgatcatacagcaaataagaaacattaaataaacaatcaaagaaacggagtattgctccgcaactgccaacaacattcaacgacaaccagttgctctgtggtgctagaaagtgagtgtaaacagtgtgtgcctttgtgaactgaactgaccaacgtgccaagaac

SEQ ID NO: 37353 - protein, 106 aa, DROSOPHILA
MEKSPTTMTTQKAETNCDKENAGTEREREFRTLQSFEGLWLAFWQAARPVVSQLANKLVASGVASQQKAGRAANTGPGPKLNPGPGLGPCPCPGWFRSIYGITAAN

SEQ ID NO: 37354 - DNA, 2363 bp, DROSOPHILA
tccccatcatttttcctacacttttgtacaatttttttttttttttttttttggaagcgagcgtgagaaaaaattctaggcaagattttggcaagctaccatcttggcagaggcctattacccattccaccaatgaagaccaacgccgtggcacagtggcccaggactatgaaaattctagataagaataaatggtcgggatgaatcaagtttggggaagacgatccccgaaatgatttgttataaatgttcattaataaaaccttatagattaaaataaacagaatttataaataattaaatacttacgatttatattaaaagtaaagtgtcaaaaataggataacaagtttgaaaaagtttgctggcttaaattttatcatcagaaaactagagaattaatgttaaaagacatatattcaaaattctaattagtttttgtgtaagcttaaaggccagaaaagtattcctctgatatgaaactacaaattagattgtatgtggtccaaaaaagtaatcacaaatgtacgctctttggtacattcccaaaagaaatttgttgagattaaatgaaagcccttttgcaacaaaacctattaaaaatcttattttggcagccaaaactaatgtgagtcctttcctttactaccattgcagaagctgacatcctaaaggaaaccttgttggccaattggggaggaggcccagaaggtcgggccgattttccgctgcaaccgacgaaggtctgaccaaccaatcgcaacgcacagcggcgacgaagcccggccgaatgggagcatctcgggcaaacggagggacagtcagccgccctgcaatgcatttcttttggcaacgagtcaagcggcctttcacacacacacacacacacattaggattccataaggatactctgcctcgctcacatgcgcatcgagtggtatacgtaatatatcaagtatacgcctgttggccgggcagaaagtctgtgagtgtgtgcgaatggccaaacagagtgttgccaactgcattgccgggctgccaacgactcaacccccgacccgaggacaccaccctcctcccggccaggaggccaacgacgagtcctttttggaggcagcgcattggctgcaggacgaccggcgacaggacgaccaatcaccaatcaaatcgcggcttgtgcgcactatcacggccgtacgaagggccaaaggcacggcatccaggacctcagccggagaccccaagccgattgtcaatctcttagacatattattatgccaacgtctcctatattatagttctctagtcgtaagtcacatgcccaagccatcgccccagaacatcggggacatgaaacattagttttattgatagagttcttagtttcgagcagaagctatacgatgatgatttcaagaatgagaaaacggaataaaaactgtaaagcttcagagcggaacaaaaagttgatggttgtttttatttgcaaggggttggtcattaaagaaaccgaagtctcattctcaggttcaatcatttttggataatcttttttataaataattaaacggatttgctcattgagtaattcaatatggtaagcatttattggcacagaactgtctttatagattgtaatatcttttttgattaactaaacagccgtttttcagtctataacgactttaactttcggttaatgcgactttaagttcagatgatttcaaataacgccaactttcaataaattgattttcttgctaccaatcatctcctgatttgattgggtagtgcgaatgattgaacaccgcattccgagagttctcgctgcgccaccttaggtgcttgaccattagataaccctggatgagaaagacggctatgttgacggccagaagattgtagttcttgggtgtgataaccactgagtagcgagaccaaattaagcccgtgactgccaaggagccgcattgattcagcgatatattggcaggaggacgacttagcgtatcgctcagcccagccagcaccaaggactggaaatataaaacaatcaattaattaggcaatacaaaaccaggacaaattgtacatttcctaacatttaaagtcggctaatgcctagtttaatactacattacttttaaattgaacatttagattagattgtacatacccatttaaacgctggtgcccaaaaaaacacagtacggggtcctgaatggaaaatgatgaacatatatttggtaatatttaatggatctactcaccagctggggattgccaaagtggctgaactgcgcctggaacaaatttatcaatagtactgatggtaatattgtacaacttagacaagggtccc

SEQ ID NO: 37355 - DNA, 363 bp, DROSOPHILA
atggccaaacagagtgttgccaactgcattgccgggctgccaacgactcaacccccgacccgaggacaccaccctcctcccggccaggaggccaacgacgagtcctttttggaggcagcgcattggctgcaggacgaccggcgacaggacgaccaatcaccaatcaaatcgcggcttgtgcgcactatcacggccgtacgaagggccaaaggcacggcatccaggacctcagccggagaccccaagccgattgtcaatctcttagacatattattatgccaacgtctcctatattatagttctctagtcgtaagtcacatgcccaagccatcgccccagaacatcggggacatgaaacattag

SEQ ID NO: 37356 - protein, 120 aa, DROSOPHILA
MAKQSVANCIAGLPTTQPPTRGHHPPPGQEANDESFLEAAHWLQDDRRQDDQSPIKSRLVRTITAVRRAKGTASRTSAGDPKPIVNLLDILLCQRLLYYSSLVVSHMPKPSPQNIGDMKH

SEQ ID NO: 37357 - DNA, 11070 bp, DROSOPHILA
agtgcttttggcgaaggcactaactaatctagactaggtcgtgactcattcgtgactcgtgaagatacaagtagatagagatattcatatgtgatacgaatattatattttgagcgtaatttgttgcacactatttaacaatgcatttcaataataatggtcagtcggatatttcttgttattgttctaccattgaaattaatgttgcatttcttcttttgaaataataatgataattataatgatagactattttttacctaaacgattatgttactttattttttaagattatttttacagctaaaataaatgacaagtaagtgttgtgtcacaacacaattaaattttattattattcaaatgacagctgtacgcgccatcttcaccagaaacctgcgcatctctcccgtgagccgtgactatggcgcgtcacccggcgttgccagtcagttaatagctgcttgttgtgcatccccgatcgatcagctgttcgcgaagaagaagaaacgatgggagtgttttcgtccgaggcgaaattatttttatttttttcgcgcttcatagccagcgattaatgagctaatctagcttaaaacgcgaccgggtagttgcaactcttgctgtgataaaaggcagtgagctgcctcgatgagaaggcgagaaaaaacgaatcgaaaattgagacacccgcgacctccgaaacaaagtgggaaaaatcgaacctgtgtgcgtgtgtgtgtgtctgcgttcattaaaagtgtgtgtgtagaatagtaaatttaatttaaaattaaagagcccaatgtgtgcaatccataatcgaatcatatacacaacctgcgatcggtgataatgagcgcggcgatgagcaatcgctaatcgcgagtgcaaaacctgagtagcagcagcaacaacagcaacatcaacaaacgcagcaggcgaatccagcacacaccgcaccgccccgccccgcttacatacacacagagaagcggcgatggaggcgttggaagtggaggacaccagcgatgacagcctgcccatgggattcccagaagtgggcacctggaacagcacccataatgtctccttgaacgacatgaatctggatgcgcgcatggtgagaatacgcttcagaatgcgaaatttaatactcatgatgagggcatacatatgtgtgtataatttgattaatacgactgccatgccagtgaatcaaccgacgactggctttatctccacatttattggttcaatggtcaaagggagcagcggaaagcttatcaatcagcgggatttggtcattgacacacacatactccgcctccttgtcactccgccgccccggtgaagataagactactggtttctaggctgatctagagttcaaatcggaatttagatgtcccataacttacttttataatcgtctatatttttaattcaacaatattccattttaagatagtcgacatcaattgttatttataaatcccgtctgaaaaaaacagtaattcgatgaagtatctaaactcttttattgggatcaagtacttttataaggtcacaattaatattcacttgggtctttaatctaactaaaaaagcattttaagtaagaatagtaagccctatctgttaattccataataaatggtagcaatttggtttttattttttcttatcttattggcataacttattatattaaaattacagcaatgtagtttaaatgtagtttgcacgtttgtgctattgaagtccacagctggtaaccattctcagttactcacttttatgtggaacattaaatcgtgtgagaagtaggaattaccttgagtaaacttaggtttataaatcaaaattattctgtcaagtttcgattccttttaaacaccaacccttcagactttcttctattaaagccgatttttttatttgatactcaaggtccagcgttcaatgaggacgatcataaaggccattaaccactctatataaagacaaccatattttgggaatggtatactttagcattaattaaaaattatcaaatccgacggggcacacatgaaagctgtcagtcgttcgttctaagacgcagtcattaaacaaatcatcaaaatttcccttatcctcaaagatttgcggagtacaatcattttcttggtgtgcagtcactcaagaaaagacgcaaagagaatctgaatactcgaggaaccttgcaactgcgacaaccatccacgtccaaccatccatattcagatatgcaggctttgcgaacggtgattcaaggcctctcgacgcgacatggccagattatatcccacatacggagatccagtgggagcagtagctttcccgagttggcatttttcgacgacctcgacgacatggagccggaggatgaggagggagtgatgaatcatcagtatcccatccttcacagccgccactctgatctgttctacatgccaaactgcgtgggtccagcttatcagggtcttatttcttcgttggatcagccttataccaccgactgctatatggccgatgaacagactttggtgaaggaaaacgatagcattcacgatacaattctcgagtctttggtagcacctaccgaaatgtgtgtggtggcttgccccaagttgctgttgacctacatgcgtcgcctgttccagcatccgtatgcccgctttggcagctcgatgaacttcagcatgattggattgcgattcaaggacaaagatgctaacaaagccctaacctctttcgttcacttcgccagctacaattcgcgtgagatcatggataatggttattgggcggactttattaatcccttgactggtcgcgcttactaccgcgccgcccactgtatccggaagcagggcctggaggcccagctccttggccgtggcttaaaccttacctttgccaatggctgcaccatcattggggaggagcagagtgaccagttaaccggtttcatattcacagacacaccctgcaaggtcctcgagtcgtggttttcgtagggaggaaatcaaggaatccatgcacagctgcccatttaaatgtctctgattgtgtacacattaaagtccagttgaaaaaccgtgtccactgccatattcaagagggatattttataaaaattttacgtatttctcggactttctcattttggttataattatgaaaaatattcgcatctgtaaagtaaatttgaaaatgatgtttttttctacaaagatggcttctattcctgaagaaaaagataagaaaaacggcctaaattgtacaggatttataaaaattgttttattactttgaaaaatacatttttaaacccacaatagcaataaacttttgtttaattatattcatggatatgtatatattttgctttattcttaaaacctaatgccgatttgaaatctttttagatatggttgcttgcgtcgctcctgaccacgatcacctgggtgacgtatatcaccttttacaattctcgtgtgattggcatgctgataacgaagatcgccaaccgttggttcatcaagggcgcgtacttcaagatcggttctgttgctctaaatccgctggcaggaaagataatgttccgagacttcgtgtacatcacgtatgactacacagtgcgagcgcaggatggatacttcatattccgctggtggcgctcctatgtacccaaggatgtctcagaaggtgagttgaatttaaagagtaatcgaacacttttgatgacaatcatttttcatagatctttcccactcggacacgcgcctatcggtccagctaaatggctacgagctgcacatatacaacagatcggatttgtacgacacgctggaaaagacgtttggtctggaaccatcgctgcttataccgacagatgcggctagcaatgaggagagaaacaagctgaaggagcatcatatgaacctggagaatgcacggcagagccagaggattcagaatgtgaaaaactcggaggctatgcaggccacaacctggcgggatttaataccagtgataaaaattgacgtttgctccggtcgctttgtgtttggaaaccgattaacgccgactacactatcgatttccgtggaagaggcccattgcacctacagtacaaagccagctgtctgtagattggatcactttatgcactttgtgaaggctaaagtcgaaaatgcgaaagtgctcttctgtccgagtcccaagtatactggtttgattgatgaaccaccgcgatatatgggcgaaggctttgtggtgatgatgtccaatcaaatggatttgtacttctacatggacgagccaggcgttgtgccggaacatcctgtacagattgtcctgcccaacggtgatgttgtggagccttcgcctccggtctggggcataaatgccaggtgtctcagaggcaccgatttcagctacggaccgtgggcagatcggcaaagagatcatttgtacaggtacttttatccttctgactggaaggaggcagaagttacacccacaccccagccaggggaacttcgcagctatcaatccttcgatgtgacattgtgcgtgctaaatgaggcaactattgacatactcttttccaaagaaaaagagacgaatgcaatgcacattaccgtgggacctgcttcgtatgtagagatgacaattccctgggtcactcaaccggatggttacacatcgaagatccagggacagctcttccacgtggaggccaccacatcgctgcagtatcgcagcctggcagagttcgagtccttggagtacaaggtgcgcatacactacccgaccaagtggaacgcaccgcaggattggagcatatctctctccggctgcaagacgagtgctttcatcgtgtacaaacacaagtgcttcttccaggatctcatcgaggattgggctaacaaggccaggccggatatactcagttttgttccgtatacctgtaactttagcatccgcctgcatgagttcgaaatcctaatgctgtgcaacgagtacaattggatcgattgcagtagtgccaaccaggagaacaatcatttggctttctgtggagacgtctttgagatgagtttcgccctgccatttgacgatttcctgcccaagacagttacgctaaagttttggatccacggagagggtttggatttgagcttatacgtaccggaagtgtcctcggtgcgtcctattgttttagccatagatgagaacgcaagactgctgaccagggagggcaagctcatccggcgcccagagttgtactcgaagaagtggcgcaagatttgccagcgctctgccggttggatcgactgttgggcagtgcccattctggcactgtcaattcagtatgtttatcatccagttccaccactaggacctgatcctcaagcggatataactacgccagaaaaagaagagatcttactgagtcctatgaggattccaaaagtgagaaaatcacctgttagtagctggcagcagccacctgaacagtatagtaaatttgatcctggaacgctggccgcggaccacgttactgtggaactggagattggaagctccgtgcttatggcttatggaaatgtgctgcgcaactttattagcctgaaggaaaatattttcggcgaggatcagaatttcacagacatggagcaatcgaatgtaaatatgaaggagcccggcgttgcccaagtaaatcccaaggaccaactgctggccaaagaaaaggagctggccaataaatccatttcagagactcaaccgcccgaggaaaagcgcaaacccttcgatcctcgtctttaccgtcctcttgaggtgatggtttccgtgattgtacacgacattcaggcgcacgtaatgaagaattgcaatgaagatgatccgccctgtccggtcgttctaatagaaagattcggcttcgaaatgaataagaagtatcatgaaaccactctgcaagtgttagtaagtccgtcgtatttacttacctcggattgcctgcagcgatcgcagagggagcagcatattaaccagggtcacctcatgctctccgcagtccaggttagaggtcatgccatgttcagtaatgagggctgtgctctggacgaggacactctagaatattcctggctcgtggaggttcagctgggcaaactcaccggaaagcttactctaccacagcttgtaaacgtcgttacaggtctggagacacttatactcttggccattgatccggagaactgtttaaagtcacctaagacagtaagaaactgccatcacggagtgcccagcaatctgtgcccccaaaccaaggaagagaagaaatacaagtgtccgtcatccgaggatataaaatacaaaatgacgcgcgtttcggtggatgctgtggatgtatatctgatagaaagtggcaccgctttgcatgcctggatctctcctattcgtttggcaaattgtaatctacacggccagcgggtaaagtcagggatctctgggctactgccctccattctattgcgtttgtttatgctccacacgacaaactcgacattcaacaccaacaccacgggcagtaatcgttctggcaagctgagacgagctgatcaggattccctaaagtctcaggatgcaggaggatctcattacgcttcacatggaaagaccggaaagcgaagctccaactccttctcacggcgagattctcgggaggaggccacgcggaagcttaggggaagtttctcggaaacgcataccaaacgtacaccagaaacagagataactgaaaattgggtggaggtgggctgcacttcgctggggcctattttgttggagggagcgtcggctctacccattccggatcacgaactgcatctcgtgcagcacaagtaagatcagaatttgtgtcttagtctattgattctaatttcgggttttacttgcagttttctgcgtgagcacgatgccaaattcaagcgactttggttcctttggtcgaataacggaagtgcattgtcctcgggcagtgagatctcgcgttgtggctgtattggtggatgtgcctttttcggaagcaatcgaaatggacaaaaattctttaagccaacggcgcaggatgcccacgataactacaatatagcgcgatacttgtgagtaaaatataaaataacaattaaatatatattaaataccaagaaaaatcatttaatttttatatctttgcaatttcagcattattaacaacaataaggactttggtttcggcgaaagcattctgcaccagggtcaacttgtcttccacaccccgccctacagtcttcattgtgtttcgctgtacgatacagcggattttaatggcaaaggccgcctgtacagaccagcaggagatctgcgaaacggaagtctgaagaagacggatctctgctctctgccagatggcactaagtttaagatcggtgcaagtggtaccactggagttgagaaacctgagcccaactgccgaaataagtctcgagagagcattggatccccgaatacgttggaaaggaggaccaagcgctatccatgtacgagacaaacttccgtggatgtaccctatgcccgcctgctcgatagtccctccaaaaagctacagctgcagcacgaggcgtctgctggcgatgcgggaagtagccatcgacgcggttccgattccaataggctgcgggtttcaccacctaagactagcatttccgactccagactgacgggcgatgtcctcgatgatgaaacagaggtgcgtcacaatattgtaattttgattttaatataaatcttgatgaactttccattgcagataccggatgaaatgtcgcactcggcacctcattcacatccgttggaattcgaaatagccgatattgcgcttcacgtccagggactaggtggagatcagttgccacgcgaagtgcaacgcactatatcgctgacgtcggagaatccctcagagatgttcttctctgccgaagaagatatatccaatgtgctgtctcagcggggatccatgaagcagcgaaacagtgtaaacagtggatccgtggtgctgtccggaaagaagagattctcatcggatctaaggtgcctatataaaagttatacccaaccccaacatattttgactaacaatatatcttcaaaactagcattggagctcaaaacgataatggaagtcacacattacccacatatcgcagcgatctagagatccacgctcccgacggcaacaaaacacttccaaaaaggccgcagagcacaacagaactggtaaagctgaaaaatcaaatactcaaacacctcgattacgtattgtataatgttaggccgatttgctcagtgaattatctacaccaagcgcgtttagctttgctgctttgaggccaattttgtattaaactcagtttatcactaaattccatatcacccatgtaataatcaaggcggcaatattaacccaattcgaaatattattcgattcgagtctatttccgtgcatgcttcgcacatttacttaattataactcttaagcaacaatttctcaatatcgatttacattttaaagcataaaatgagaaactgttgctgattttgttaaaatgtaagccacacctaaaatctattcctttcctcaactcgactcatctctaaaatccgaaatcaattaatgaactaaccaaatcgatataaaaaccaaaacctaaatcaaaaatcacccagaacgaagacgcgagacgcattcacggtcttgccacaccaataagaaaaataacaaatatctcatctcgacctgagtaccgacattttgttcatgatgtgagtagttcttagtaccaacaacaagcaaccaaccaacctcttctaactaacaagtagcctaactaaaccgaaattcgaatgctagtctgttctgaacaacctaaatgtatctgtagaccttctcctttcttaccttataagtttccaaaaattgtcaaacaaattctcgatgatcaacaattgcatgtataatattgttgcgtattagtgcatgtagagtctattgctcccgatcttatctttaattcatatcataagctttgaggctgaggggtgtgggctattaccggtatcaatcaacaaaaaattccacttcgacttatctttgatttgaaattagtattatttgtcagctaccttttaattttgaaaactttactaatcgttttaatgtcaattcgatacaaaaaaaaaaaaaaaaccgacttaaatctttgctgcacttcaacgaaaaattttctcacagttttctgcttgtgtcctttgaactggctattttagttgtagaagccgaatataaattgatttcattttccactcagaatatatcttatacaattttatggtattccttctccaggctgattctcgtggctcatcatctggcaccccatcactgtcttccaactctttcatatcggccatgtcttcacaagaggatgtggcattggttaatctgcaccagcaggtcaaccggccaattatcgactcacctttgctgatggccagctacctaaatcatttgtcgcaggtgaagtgctttaactggaatggatgctcctttcccttgggtccagatgtcttctctactccactcttctcggagaacgaagacggtggattgacctatattggcagcaagatgctgccccactttgatctctactcttgttggcgggagattaaagtggttcctcgatacgaaaacgccactgggagcaacagctcggctacatttatgggtggaccgaagtctcatccctgggaccccagtgtgctcttgaaagaggaggaatcggacaagaccacgaacggatttgatgatggcgagttcatgagtctgcaggctgagggaggagcggtctgtacgtcggtggtggccaggctaaaaggtcaactgaatgtcttccttacaccgcttctactggagggattacaaaggtaagtggaaatgatgatacgataatttcatttcaatttcattaccagcataatatttaaacaagagccatttgctggcaattacaaatcgtaggaacaacaaaatcgcagtttgattatcattttatgggtgcatataaaatatatatataatggaaattatcaagtatagcgttgaatatacatatataattcaacttcgcttgatgcgtaaatgggcgagattggactgcctcaatgccgcatgagcgttgatccggccaccctgatcccgcggaaaagagtccatcagcatctttatatatgtttctttggagttctaattgcatagaaatgtatattctatattgaggtgtgtggttgcccactcacctcgggagagtcatcagtattcttattctcgcgctttttcctcctgtactcggaatccaaatggaattcctccattgttctgggctcctcctcggtgagtttgtccatgtttaacgcctcgctttcccttcgatcctcaagcaatcgacgctcgccactatcattttcactttgtatatagtcgtcttgcatttgaatcaaataacgaggtggatcccgagcattattggcaataaaacttgagcaagaaattgattatgtgatgatgtgatggtaatgaaacaacaaaatcgtagttatcttacctttcgctatcgaagagatgttcctgcttgggcagatcagtgttaagtggcatcagctcatccttgatactcgcctgtttattatcatcttcattgggcatgtgctcctcaaattgcttctctgtttgttctctcttacgaagtgaggtcctggaggactgatgccgatcgttaggatcaagcggatctgcttcattcgctatcggttcgttttgtcgactcctgtcgactccctccacattaggtgccttctgattccgattgaactgctgttcaccttgatgcaaactagctgattgtccagcatcgaagtttgccagatgttct

SEQ ID NO: 37358 - DNA, 6129 bp, DROSOPHILA
atggaggcgttggaagtggaggacaccagcgatgacagcctgcccatgggattcccagaagtgggcacctggaacagcacccataatgtctccttgaacgacatgaatctggatgcgcgcatgtcactcaagaaaagacgcaaagagaatctgaatactcgaggaaccttgcaactgcgacaaccatccacgtccaaccatccatattcagatatgcaggctttgcgaacggtgattcaaggcctctcgacgcgacatggccagattatatcccacatacggagatccagtgggagcagtagctttcccgagttggcatttttcgacgacctcgacgacatggagccggaggatgaggagggagtgatgaatcatcagtatcccatccttcacagccgccactctgatctgttctacatgccaaactgcgtgggtccagcttatcagggtcttatttcttcgttggatcagccttataccaccgactgctatatggccgatgaacagactttggtgaaggaaaacgatagcattcacgatacaattctcgagtctttggtagcacctaccgaaatgtgtgtggtggcttgccccaagttgctgttgacctacatgcgtcgcctgttccagcatccgtatgcccgctttggcagctcgatgaacttcagcatgattggattgcgattcaaggacaaagatgctaacaaagccctaacctctttcgttcacttcgccagctacaattcgcgtgagatcatggataatggttattgggcggactttattaatcccttgactggtcgcgcttactaccgcgccgcccactgtatccggaagcagggcctggaggcccagctccttggccgtggcttaaaccttacctttgccaatggctgcaccatcattggggaggagcagagtgaccagttaaccggtttcatattcacagacacaccctgcaagatatggttgcttgcgtcgctcctgaccacgatcacctgggtgacgtatatcaccttttacaattctcgtgtgattggcatgctgataacgaagatcgccaaccgttggttcatcaagggcgcgtacttcaagatcggttctgttgctctaaatccgctggcaggaaagataatgttccgagacttcgtgtacatcacgtatgactacacagtgcgagcgcaggatggatacttcatattccgctggtggcgctcctatgtacccaaggatgtctcagaagatctttcccactcggacacgcgcctatcggtccagctaaatggctacgagctgcacatatacaacagatcggatttgtacgacacgctggaaaagacgtttggtctggaaccatcgctgcttataccgacagatgcggctagcaatgaggagagaaacaagctgaaggagcatcatatgaacctggagaatgcacggcagagccagaggattcagaatgtgaaaaactcggaggctatgcaggccacaacctggcgggatttaataccagtgataaaaattgacgtttgctccggtcgctttgtgtttggaaaccgattaacgccgactacactatcgatttccgtggaagaggcccattgcacctacagtacaaagccagctgtctgtagattggatcactttatgcactttgtgaaggctaaagtcgaaaatgcgaaagtgctcttctgtccgagtcccaagtatactggtttgattgatgaaccaccgcgatatatgggcgaaggctttgtggtgatgatgtccaatcaaatggatttgtacttctacatggacgagccaggcgttgtgccggaacatcctgtacagattgtcctgcccaacggtgatgttgtggagccttcgcctccggtctggggcataaatgccaggtgtctcagaggcaccgatttcagctacggaccgtgggcagatcggcaaagagatcatttgtacaggtacttttatccttctgactggaaggaggcagaagttacacccacaccccagccaggggaacttcgcagctatcaatccttcgatgtgacattgtgcgtgctaaatgaggcaactattgacatactcttttccaaagaaaaagagacgaatgcaatgcacattaccgtgggacctgcttcgtatgtagagatgacaattccctgggtcactcaaccggatggttacacatcgaagatccagggacagctcttccacgtggaggccaccacatcgctgcagtatcgcagcctggcagagttcgagtccttggagtacaaggtgcgcatacactacccgaccaagtggaacgcaccgcaggattggagcatatctctctccggctgcaagacgagtgctttcatcgtgtacaaacacaagtgcttcttccaggatctcatcgaggattgggctaacaaggccaggccggatatactcagttttgttccgtatacctgtaactttagcatccgcctgcatgagttcgaaatcctaatgctgtgcaacgagtacaattggatcgattgcagtagtgccaaccaggagaacaatcatttggctttctgtggagacgtctttgagatgagtttcgccctgccatttgacgatttcctgcccaagacagttacgctaaagttttggatccacggagagggtttggatttgagcttatacgtaccggaagtgtcctcggtgcgtcctattgttttagccatagatgagaacgcaagactgctgaccagggagggcaagctcatccggcgcccagagttgtactcgaagaagtggcgcaagatttgccagcgctctgccggttggatcgactgttgggcagtgcccattctggcactgtcaattcagtatgtttatcatccagttccaccactaggacctgatcctcaagcggatataactacgccagaaaaagaagagatcttactgagtcctatgaggattccaaaagtgagaaaatcacctgttagtagctggcagcagccacctgaacagtatagtaaatttgatcctggaacgctggccgcggaccacgttactgtggaactggagattggaagctccgtgcttatggcttatggaaatgtgctgcgcaactttattagcctgaaggaaaatattttcggcgaggatcagaatttcacagacatggagcaatcgaatgtaaatatgaaggagcccggcgttgcccaagtaaatcccaaggaccaactgctggccaaagaaaaggagctggccaataaatccatttcagagactcaaccgcccgaggaaaagcgcaaacccttcgatcctcgtctttaccgtcctcttgaggtgatggtttccgtgattgtacacgacattcaggcgcacgtaatgaagaattgcaatgaagatgatccgccctgtccggtcgttctaatagaaagattcggcttcgaaatgaataagaagtatcatgaaaccactctgcaagtgttagtaagtccgtcgtatttacttacctcggattgcctgcagcgatcgcagagggagcagcatattaaccagggtcacctcatgctctccgcagtccaggttagaggtcatgccatgttcagtaatgagggctgtgctctggacgaggacactctagaatattcctggctcgtggaggttcagctgggcaaactcaccggaaagcttactctaccacagcttgtaaacgtcgttacaggtctggagacacttatactcttggccattgatccggagaactgtttaaagtcacctaagacagtaagaaactgccatcacggagtgcccagcaatctgtgcccccaaaccaaggaagagaagaaatacaagtgtccgtcatccgaggatataaaatacaaaatgacgcgcgtttcggtggatgctgtggatgtatatctgatagaaagtggcaccgctttgcatgcctggatctctcctattcgtttggcaaattgtaatctacacggccagcgggtaaagtcagggatctctgggctactgccctccattctattgcgtttgtttatgctccacacgacaaactcgacattcaacaccaacaccacgggcagtaatcgttctggcaagctgagacgagctgatcaggattccctaaagtctcaggatgcaggaggatctcattacgcttcacatggaaagaccggaaagcgaagctccaactccttctcacggcgagattctcgggaggaggccacgcggaagcttaggggaagtttctcggaaacgcataccaaacgtacaccagaaacagagataactgaaaattgggtggaggtgggctgcacttcgctggggcctattttgttggagggagcgtcggctctacccattccggatcacgaactgcatctcgtgcagcacaattttctgcgtgagcacgatgccaaattcaagcgactttggttcctttggtcgaataacggaagtgcattgtcctcgggcagtgagatctcgcgttgtggctgtattggtggatgtgcctttttcggaagcaatcgaaatggacaaaaattctttaagccaacggcgcaggatgcccacgataactacaatatagcgcgatacttcattattaacaacaataaggactttggtttcggcgaaagcattctgcaccagggtcaacttgtcttccacaccccgccctacagtcttcattgtgtttcgctgtacgatacagcggattttaatggcaaaggccgcctgtacagaccagcaggagatctgcgaaacggaagtctgaagaagacggatctctgctctctgccagatggcactaagtttaagatcggtgcaagtggtaccactggagttgagaaacctgagcccaactgccgaaataagtctcgagagagcattggatccccgaatacgttggaaaggaggaccaagcgctatccatgtacgagacaaacttccgtggatgtaccctatgcccgcctgctcgatagtccctccaaaaagctacagctgcagcacgaggcgtctgctggcgatgcgggaagtagccatcgacgcggttccgattccaataggctgcgggtttcaccacctaagactagcatttccgactccagactgacgggcgatgtcctcgatgatgaaacagagataccggatgaaatgtcgcactcggcacctcattcacatccgttggaattcgaaatagccgatattgcgcttcacgtccagggactaggtggagatcagttgccacgcgaagtgcaacgcactatatcgctgacgtcggagaatccctcagagatgttcttctctgccgaagaagatatatccaatgtgctgtctcagcggggatccatgaagcagcgaaacagtgtaaacagtggatccgtggtgctgtccggaaagaagagattctcatcggatctaagcattggagctcaaaacgataatggaagtcacacattacccacatatcgcagcgatctagagatccacgctcccgacggcaacaaaacacttccaaaaaggccgcagagcacaacagaactggctgattctcgtggctcatcatctggcaccccatcactgtcttccaactctttcatatcggccatgtcttcacaagaggatgtggcattggttaatctgcaccagcaggtcaaccggccaattatcgactcacctttgctgatggccagctacctaaatcatttgtcgcaggtgaagtgctttaactggaatggatgctcctttcccttgggtccagatgtcttctctactccactcttctcggagaacgaagacggtggattgacctatattggcagcaagatgctgccccactttgatctctactcttgttggcgggagattaaagtggttcctcgatacgaaaacgccactgggagcaacagctcggctacatttatgggtggaccgaagtctcatccctgggaccccagtgtgctcttgaaagaggaggaatcggacaagaccacgaacggatttgatgatggcgagttcatgagtctgcaggctgagggaggagcggtctgtacgtcggtggtggccaggctaaaaggtcaactgaatgtcttccttacaccgcttctactggagggattacaaaggtaa

SEQ ID NO: 37359 - protein, 2042 aa, DROSOPHILA
MEALEVEDTSDDSLPMGFPEVGTWNSTHNVSLNDMNLDARMSLKKRRKENLNTRGTLQLRQPSTSNHPYSDMQALRTVIQGLSTRHGQIISHIRRSSGSSSFPELAFFDDLDDMEPEDEEGVMNHQYPILHSRHSDLFYMPNCVGPAYQGLISSLDQPYTTDCYMADEQTLVKENDSIHDTILESLVAPTEMCVVACPKLLLTYMRRLFQHPYARFGSSMNFSMIGLRFKDKDANKALTSFVHFASYNSREIMDNGYWADFINPLTGRAYYRAAHCIRKQGLEAQLLGRGLNLTFANGCTIIGEEQSDQLTGFIFTDTPCKIWLLASLLTTITWVTYITFYNSRVIGMLITKIANRWFIKGAYFKIGSVALNPLAGKIMFRDFVYITYDYTVRAQDGYFIFRWWRSYVPKDVSEDLSHSDTRLSVQLNGYELHIYNRSDLYDTLEKTFGLEPSLLIPTDAASNEERNKLKEHHMNLENARQSQRIQNVKNSEAMQATTWRDLIPVIKIDVCSGRFVFGNRLTPTTLSISVEEAHCTYSTKPAVCRLDHFMHFVKAKVENAKVLFCPSPKYTGLIDEPPRYMGEGFVVMMSNQMDLYFYMDEPGVVPEHPVQIVLPNGDVVEPSPPVWGINARCLRGTDFSYGPWADRQRDHLYRYFYPSDWKEAEVTPTPQPGELRSYQSFDVTLCVLNEATIDILFSKEKETNAMHITVGPASYVEMTIPWVTQPDGYTSKIQGQLFHVEATTSLQYRSLAEFESLEYKVRIHYPTKWNAPQDWSISLSGCKTSAFIVYKHKCFFQDLIEDWANKARPDILSFVPYTCNFSIRLHEFEILMLCNEYNWIDCSSANQENNHLAFCGDVFEMSFALPFDDFLPKTVTLKFWIHGEGLDLSLYVPEVSSVRPIVLAIDENARLLTREGKLIRRPELYSKKWRKICQRSAGWIDCWAVPILALSIQYVYHPVPPLGPDPQADITTPEKEEILLSPMRIPKVRKSPVSSWQQPPEQYSKFDPGTLAADHVTVELEIGSSVLMAYGNVLRNFISLKENIFGEDQNFTDMEQSNVNMKEPGVAQVNPKDQLLAKEKELANKSISETQPPEEKRKPFDPRLYRPLEVMVSVIVHDIQAHVMKNCNEDDPPCPVVLIERFGFEMNKKYHETTLQVLVSPSYLLTSDCLQRSQREQHINQGHLMLSAVQVRGHAMFSNEGCALDEDTLEYSWLVEVQLGKLTGKLTLPQLVNVVTGLETLILLAIDPENCLKSPKTVRNCHHGVPSNLCPQTKEEKKYKCPSSEDIKYKMTRVSVDAVDVYLIESGTALHAWISPIRLANCNLHGQRVKSGISGLLPSILLRLFMLHTTNSTFNTNTTGSNRSGKLRRADQDSLKSQDAGGSHYASHGKTGKRSSNSFSRRDSREEATRKLRGSFSETHTKRTPETEITENWVEVGCTSLGPILLEGASALPIPDHELHLVQHNFLREHDAKFKRLWFLWSNNGSALSSGSEISRCGCIGGCAFFGSNRNGQKFFKPTAQDAHDNYNIARYFIINNNKDFGFGESILHQGQLVFHTPPYSLHCVSLYDTADFNGKGRLYRPAGDLRNGSLKKTDLCSLPDGTKFKIGASGTTGVEKPEPNCRNKSRESIGSPNTLERRTKRYPCTRQTSVDVPYARLLDSPSKKLQLQHEASAGDAGSSHRRGSDSNRLRVSPPKTSISDSRLTGDVLDDETEIPDEMSHSAPHSHPLEFEIADIALHVQGLGGDQLPREVQRTISLTSENPSEMFFSAEEDISNVLSQRGSMKQRNSVNSGSVVLSGKKRFSSDLSIGAQNDNGSHTLPTYRSDLEIHAPDGNKTLPKRPQSTTELADSRGSSSGTPSLSSNSFISAMSSQEDVALVNLHQQVNRPIIDSPLLMASYLNHLSQVKCFNWNGCSFPLGPDVFSTPLFSENEDGGLTYIGSKMLPHFDLYSCWREIKVVPRYENATGSNSSATFMGGPKSHPWDPSVLLKEEESDKTTNGFDDGEFMSLQAEGGAVCTSVVARLKGQLNVFLTPLLLEGLQR

SEQ ID NO: 37360 - DNA, 7616 bp, DROSOPHILA
cgcagccggatggattgaaccaacccatatggctggaacaatttcaccagctgtacacgtttggtgttgattggcaaattccccacgaaaacggtggacgcctcttctgcaggattgcggatccgcttaactccttctgtgggatgaaaatgatggaaattgatgaatctatgggaatatggttttttgttaaccttaccttcgtccttgttattggcattggctttggcttttttagacacttttccttttggtttttcatttggagcagtcgttggttccttctccactttttcctttttggtggccttactttcgactttaacctgcgcttctggttccgttttgatctccttgggcgccagtttgttttgctgcttcttcagcttctgtgcctgcttcttggccttctttttttcgatcttggccaggtctttggcggacaattttttgggactttcctggacagcggcctttacttcatcttttggcactttaaccgtcttctttttgggcttcgtctttgatttctttgtcactttaccatcctccacgacgcctggctcttttttaatcggctttaattcagccttttctgattctttcgcttttggtgttttcattcttgcacaaattagcactttatcaataatatgttttttctacacgtgtggtggcccaaaagtgtgcccgcccttgaccgttaaaaataccatgcgttcaaaataaaaatactgaaatgttcaagataaaatatataccgaatataccgtttttattatttaaatcacaaacatttgaaaaaatgtaatgcaaattaaaattaaatttaagaatttttgaattatttcttaaaaaacctatttttggatatttatgttgtctgcatatttagacaacaaaaatatttaataaagttataaaaaatgatataaactaaaattattgaataataattataagttatttcgctttatttaatcattattggtcttgtagaatggtggaggccgccgtcccgacaattcaatcaatgcacctgctctcggtggtaaacttcatccacacgtcctgcatcgccaaggtgaacaacgacaatatcctgaaacgggatcagagcttgagctactggtcgcaggttcactcgaactcgaagcgatccacgacggagaggcatctgcagggacccggggactcgtttctcagcgatgtctatgaggagagtatttccaccaaaacacagggattgattgtcctgcccaaagtcagcatcaccatgctgcagtcctccattgtggaggagattatctcagtagctgccttggataatgtacaagtgagtaaattagccaacaaagctttgattgatgaaattatcacaatctttaccatcttctttataggatctaagctgcgtgtcgctgctcaccttctacatggagggcatctccacgaagttccacatgggcaagacgacgcgtgcctccatgcacaacgtctatatccagcaaacggtccaatcgggcagcagtaacaaaaagggtggcatcatgaagggcacacgtgctctcttggcacatctttcctcacagacgcggccggacaatgtgcaaggagagcccattcttatcgagacatcggagaagcagttggaggaggtggtcataacgctcgatattgggagagcgcatgctcaactgcgacgcctgaagacagagggacagtcttgcacccaggactcgcccatcattgtcactgccattccagaacacaaaagcaaagtgctgtttgaatgcctgaaaatgccggagagcacgggcatcgaaagcattggctacattatgttcgagtgtggtttggagggcgtgggtgtcaagatagtcaagcgatcgcactttgaaaagtccgagaacagcaaggaggagttggccgaaatggcgggagctggtgcaggcggcggagcctccgcgggtggtttcaatctcaatgatttggtgggccaaggagaaggagccgcgggctctggcgatggaggagccacatcaaaagctgaagctgcatggaggttgataacaaagaaaccgcctacacccaaaactccgaaggagaagtttcaacctgcttcagatagcaacatttcggcagaaacctctggagctgaaaagggaaaatccacacccaaacctccagatgaagatgtggaaaagggaacaagcccagcgaatgctcagactggagcacagaaaccatctgcaggcgcgggaaccaacaccaaggataactacgacaaggttttgtccaatgtcaaggagacggacaagacttcctcgtgcgtgattgaactaaaagcggtttggttcaactttgccgctccaccttgcgtgcctattacccgaaagattgatctgacgcgattggactggaatcttttgagcactgcctccccggctatcaccgcatggatgaaccccagtaatcgactggccatgaaaatagtatcattgatgaaggctctgcacacgagacaaacggcagtggctgcttgtcttatggctgaggccatggataacgagaagattcagagaaatcccaagatcaagaaggtaacaaaagaggtataaaggtttttatacagcatttcatcctttatagacctaaccactttttaaatcttttgtattcatttattatatttaaataatctgcagagtcggtacgccaataattacacgttgctgtcgaagacgctgcaggaggatcccagttgccagctgtgctacataatgcagaagttggttctggatgagggcgttcagaggatagagacgatattcaagcaacacgatgttccacatctgaacaccctaagacaggttagtaattccgctaaatattatccattggaattcggttaatttacattttttatagggaatcattgtgctaagccggcagtggaagaatacgctgtacaatccaattctgtttgagcatcagtacaagaacaagctgtcgcgacccatcaacgtgaccttttcgttcccgcagaacgaggaggatgcggagaacgatgagtgcgaaggtgatgttgaaatgggcgcctttgcgggcgtcggcgagaatccggaagagagtgagaatgcattattacttgggcaaacacagcatcatcgaactcacattggtatttttttgattaacgctctccacccgacgcctgtggcgggtggttatttccttttaacatagatttatgtatagttatagactctttctatatttccccctcctgcttgatgcactttttgatcgtttgttaaccaaatttattgattgtgtcagaatgagtgcaagagtgtgttgcttagatctgctatcaactaccttccgtttcctcctgtatctgtaaatacttttgccacacaaatgttattcaccgctttgagtgttcaccatttcatattgtttgatgcttttcgtttgcattttactacagaacaatacaactcttctatcctttctggctatctctatatctatgaaactaaatttaatcctaagtatgttgtacactaaacgatgagtatgtaaagcatatctttcaactacttcctacctactttctatctcttattctcttaagcttttttctattacatattatattttgtttcgttaagtgtacaacttatccagaagagtgctttcttgaagagtgcttgtccaatatacgaaacccctattcctctattaacttttttttcccacaggtgctacttatggtcatgagggtgccaaccatggaacagcttcccagcgatctacttccacttcgccaaatatacatcatcctcggcgcgggtaagttgaaaatgtttgcctgcttattttcatcaaatacatctcgttaatgtcgttcttgtggtctgttcttctctccaaataacatccgtgtgcatcagcttaaataaagtccacagcaaagcctcgaactattcacatggcaattcgtctcgttccagcattcagatgctgcccattatctcggggcaggttccggaattcggtaagtacattttataatactaatcataaggaacactcagtgatttcatgatatgttctcatcagaatacggtgcattgcaagagggttcattgagctctacaaactcggtaaacaagtcctggctgggaaccgagaaccacaaggaggatttgtacttctggatggctaaacagcaggacaacaaaaagaagcacttcactgaaaaggaacacgcacgcccagctcctccgaaaatgactgaacatgcaggacaaacacgcagtggcataatgcaggattccattaagctgctcgatgcccatctgatctttgaaccacttctcacctgcttgggagtgatgccacaacaaatgatcaacaagttctccaacgcagacatttcttcgctggaaaactttggcacaaatctctctttgatcggcacttttgattctattcgggtggacattgtggtcagcgaggcgggtgacaaaaagaactctgcccaaaagccagccaaactgaacaagaaatcaaacggcggcagggcctccataatgatggacacccccttgttcttatgcgagcgagtgggcgtggagttggaagtcttaaaaatgtccgatgggatggtggatcaggcgcgacagaatgttatctatatgtcgcgtcgccagctaaagaagcacaccagtactgtgatcaatttcagtctaaatgtgagattcatctcgcagcaggtgggtggagaatctgtactttaaaatgcacataagctacataaaaatgtttttatggatttcaggtaaatatgccgctgctgaggctgctacatcagatctgcaatatgtatcaaaacgtaaaggatgcccagaacgagtttcacgatcagcctgagctaagcaaaaagagccaaaccaaagacgagtgcagcttgggtaagttaacgatcactgcattcaaactgtatttttaaacctattaatcattctaattttcagcttctgagcccacagacatcgtgccatttaattcgatgtccgagcgctataaccatgctgaaaactattcagatgaacgctatgacaaattcaacgaaacgatgcccacaatgttggcaagaccgcgtcccggaggcttggctccaattattcaactgacaccttctccaaatgccaagaacagaccccagagcttcgcccaaaaacttagatccactgggaaatccgtgaagggcaagttgggctacacgaatttgaatgagtccagttcatcgccactaagggatagtccaacaatgtcgctccacgaacataatatcctcaaaatgtccacggagtcgaaagcttcgttgaatggtgcttgtgccaccagtgtcagtggggattaccagaacacgctgaccaaagctggaatgccaacgatggcgccgatgttagagacacccaactgctggaagaccatctaccacctgttagagttgtatggtacaatgccggagaccaagactgtggtccaaaggagctcgttgaacgaacacaaaagcaagtctgcgggctttgcgcacgacgatgatgacttggccagtgcaccaacacctctgccccaacatagggagatgttgctggtagatgcttcatctcaggaacgaacccgcctgatagttttcggtgtggccaagattcacaagactcgcctgctggccacgctttctggcctcaagttggaatcggagatcaccactcttaatagcacagccacttggaggaaaaaggctcgtcctgtctccttggaatgctcccttactggtcaagtgggacgagccatgattgtgctgctcgaaggagtggctcccagtcaacagtaagcactactttgcctgattttctgattgtgtgattggtattcaaactcgtttgtatttcatttcagaaccgtagtaaaggtaaccgtgggtaagagccagactctctattcaagcctttccaagcgtggaaaggataagaacagtggcctgctgtcgattggtgctgttaacatagacattccgcaacatccggtggccctacatggaatgatgactcgaagctctaagcagttgtcgtccactctacaggagctgcgtgtaaagcgtaactctggtcggtccacgatgcgttcgcataccgccgaggagcctgagtctccgttccatgcccgcaactcagttggagccagcagtggaactggagtggccagcgaaatgcgggagcgcactgtttccggcggagctggtgcccagcagcagccgcaacaggcggctcgccgggcagcacacatggcgcaatccaagacaggcacagcacagcaccagaatggattgcttcagcccctggtcatgcagttcaatgtgctcttgcagagtctgtccatcaatgctgcgctacttccttcgctgcaggcccagtatcgcatgaatcatgttagttccatgggagtaactgggcagagggcaaagtttgttatcgacctacccacgcacacgctcagctttaataccaaaattcaggtgagctttacacatttataaactttttttttttacataatatttgttcagcgtacaaatttaagataagcccttttaaaaggtatataaaagcattttttttttaatattttagtcttgagaaaagagtaagtgtatgcatgggaaagaatattagttaaagatgaccgaaataacgggttaaaaatgcaattaaatgggctgaacttcctttttgagccaggacagagtaaattcgtctccttcgcgagataggattggggaaagagtgtcccagacttgttgatgatagctgttgagcagctttacttccgcatccgatagaagttcctttttaatcattttcgtttgcttcgggcacatggtgatggttttgaatgtgagggcgcctcggttggagaaattgtgtgccacctggcctggcacaatttgaacaatatcctcgacacggatgccaaactctccgtcctggtagaaaccaggctcattggaaataaacatgttcgcctggagaccaggatcgtcgggcatcagtcgaattcctacgcccatgggaccttcgtggacatttaggaagtgacctactccatggccggttccgtgtccgtagtccaaaccgacgtcccacagggccttcctcgctagagtgtcaagaacctgtcccttaaccttagctgggaatacggtggagccgaagctcagttggccctttaaaacgcgagtgtaggcttccttctgaaactcagtgggttcaccgaagtgaagggtcctcgtcacatccgtagtaccatccaagtattgagctccggaatcacacagataaatctctttgtcatttatcttcctgttggtttccttctttgggtgatagtgaataacagagccgttgggtcccgaagcactaattgtggtgaagctaaggcccatgtacttatcctttgtcgaccggaaggactcgagtttatcggcaccagacatttcatcgacttccgcacccttattcacttgatcctcaagccag

SEQ ID NO: 37361 - DNA, 4326 bp, DROSOPHILA
atggtggaggccgccgtcccgacaattcaatcaatgcacctgctctcggtggtaaacttcatccacacgtcctgcatcgccaaggtgaacaacgacaatatcctgaaacgggatcagagcttgagctactggtcgcaggttcactcgaactcgaagcgatccacgacggagaggcatctgcagggacccggggactcgtttctcagcgatgtctatgaggagagtatttccaccaaaacacagggattgattgtcctgcccaaagtcagcatcaccatgctgcagtcctccattgtggaggagattatctcagtagctgccttggataatgtacaagatctaagctgcgtgtcgctgctcaccttctacatggagggcatctccacgaagttccacatgggcaagacgacgcgtgcctccatgcacaacgtctatatccagcaaacggtccaatcgggcagcagtaacaaaaagggtggcatcatgaagggcacacgtgctctcttggcacatctttcctcacagacgcggccggacaatgtgcaaggagagcccattcttatcgagacatcggagaagcagttggaggaggtggtcataacgctcgatattgggagagcgcatgctcaactgcgacgcctgaagacagagggacagtcttgcacccaggactcgcccatcattgtcactgccattccagaacacaaaagcaaagtgctgtttgaatgcctgaaaatgccggagagcacgggcatcgaaagcattggctacattatgttcgagtgtggtttggagggcgtgggtgtcaagatagtcaagcgatcgcactttgaaaagtccgagaacagcaaggaggagttggccgaaatggcgggagctggtgcaggcggcggagcctccgcgggtggtttcaatctcaatgatttggtgggccaaggagaaggagccgcgggctctggcgatggaggagccacatcaaaagctgaagctgcatggaggttgataacaaagaaaccgcctacacccaaaactccgaaggagaagtttcaacctgcttcagatagcaacatttcggcagaaacctctggagctgaaaagggaaaatccacacccaaacctccagatgaagatgtggaaaagggaacaagcccagcgaatgctcagactggagcacagaaaccatctgcaggcgcgggaaccaacaccaaggataactacgacaaggttttgtccaatgtcaaggagacggacaagacttcctcgtgcgtgattgaactaaaagcggtttggttcaactttgccgctccaccttgcgtgcctattacccgaaagattgatctgacgcgattggactggaatcttttgagcactgcctccccggctatcaccgcatggatgaaccccagtaatcgactggccatgaaaatagtatcattgatgaaggctctgcacacgagacaaacggcagtggctgcttgtcttatggctgaggccatggataacgagaagattcagagaaatcccaagatcaagaagagtcggtacgccaataattacacgttgctgtcgaagacgctgcaggaggatcccagttgccagctgtgctacataatgcagaagttggttctggatgagggcgttcagaggatagagacgatattcaagcaacacgatgttccacatctgaacaccctaagacagggaatcattgtgctaagccggcagtggaagaatacgctgtacaatccaattctgtttgagcatcagtacaagaacaagctgtcgcgacccatcaacgtgaccttttcgttcccgcagaacgaggaggatgcggagaacgatgagtgcgaaggtgatgttgaaatgggcgcctttgcgggcgtcggcgagaatccggaagagagtgctacttatggtcatgagggtgccaaccatggaacagcttcccagcgatctacttccacttcgccaaatatacatcatcctcggcgcggcattcagatgctgcccattatctcggggcaggttccggaattcgaatacggtgcattgcaagagggttcattgagctctacaaactcggtaaacaagtcctggctgggaaccgagaaccacaaggaggatttgtacttctggatggctaaacagcaggacaacaaaaagaagcacttcactgaaaaggaacacgcacgcccagctcctccgaaaatgactgaacatgcaggacaaacacgcagtggcataatgcaggattccattaagctgctcgatgcccatctgatctttgaaccacttctcacctgcttgggagtgatgccacaacaaatgatcaacaagttctccaacgcagacatttcttcgctggaaaactttggcacaaatctctctttgatcggcacttttgattctattcgggtggacattgtggtcagcgaggcgggtgacaaaaagaactctgcccaaaagccagccaaactgaacaagaaatcaaacggcggcagggcctccataatgatggacacccccttgttcttatgcgagcgagtgggcgtggagttggaagtcttaaaaatgtccgatgggatggtggatcaggcgcgacagaatgttatctatatgtcgcgtcgccagctaaagaagcacaccagtactgtgatcaatttcagtctaaatgtgagattcatctcgcagcaggtaaatatgccgctgctgaggctgctacatcagatctgcaatatgtatcaaaacgtaaaggatgcccagaacgagtttcacgatcagcctgagctaagcaaaaagagccaaaccaaagacgagtgcagcttggcttctgagcccacagacatcgtgccatttaattcgatgtccgagcgctataaccatgctgaaaactattcagatgaacgctatgacaaattcaacgaaacgatgcccacaatgttggcaagaccgcgtcccggaggcttggctccaattattcaactgacaccttctccaaatgccaagaacagaccccagagcttcgcccaaaaacttagatccactgggaaatccgtgaagggcaagttgggctacacgaatttgaatgagtccagttcatcgccactaagggatagtccaacaatgtcgctccacgaacataatatcctcaaaatgtccacggagtcgaaagcttcgttgaatggtgcttgtgccaccagtgtcagtggggattaccagaacacgctgaccaaagctggaatgccaacgatggcgccgatgttagagacacccaactgctggaagaccatctaccacctgttagagttgtatggtacaatgccggagaccaagactgtggtccaaaggagctcgttgaacgaacacaaaagcaagtctgcgggctttgcgcacgacgatgatgacttggccagtgcaccaacacctctgccccaacatagggagatgttgctggtagatgcttcatctcaggaacgaacccgcctgatagttttcggtgtggccaagattcacaagactcgcctgctggccacgctttctggcctcaagttggaatcggagatcaccactcttaatagcacagccacttggaggaaaaaggctcgtcctgtctccttggaatgctcccttactggtcaagtgggacgagccatgattgtgctgctcgaaggagtggctcccagtcaacaaaccgtagtaaaggtaaccgtgggtaagagccagactctctattcaagcctttccaagcgtggaaaggataagaacagtggcctgctgtcgattggtgctgttaacatagacattccgcaacatccggtggccctacatggaatgatgactcgaagctctaagcagttgtcgtccactctacaggagctgcgtgtaaagcgtaactctggtcggtccacgatgcgttcgcataccgccgaggagcctgagtctccgttccatgcccgcaactcagttggagccagcagtggaactggagtggccagcgaaatgcgggagcgcactgtttccggcggagctggtgcccagcagcagccgcaacaggcggctcgccgggcagcacacatggcgcaatccaagacaggcacagcacagcaccagaatggattgcttcagcccctggtcatgcagttcaatgtgctcttgcagagtctgtccatcaatgctgcgctacttccttcgctgcaggcccagtatcgcatgaatcatgttagttccatgggagtaactgggcagagggcaaagtttgttatcgacctacccacgcacacgctcagctttaataccaaaattcaggtgagctttacacatttataa

SEQ ID NO: 37362 - protein, 1441 aa, DROSOPHILA
MVEAAVPTIQSMHLLSVVNFIHTSCIAKVNNDNILKRDQSLSYWSQVHSNSKRSTTERHLQGPGDSFLSDVYEESISTKTQGLIVLPKVSITMLQSSIVEEIISVAALDNVQDLSCVSLLTFYMEGISTKFHMGKTTRASMHNVYIQQTVQSGSSNKKGGIMKGTRALLAHLSSQTRPDNVQGEPILIETSEKQLEEVVITLDIGRAHAQLRRLKTEGQSCTQDSPIIVTAIPEHKSKVLFECLKMPESTGIESIGYIMFECGLEGVGVKIVKRSHFEKSENSKEELAEMAGAGAGGGASAGGFNLNDLVGQGEGAAGSGDGGATSKAEAAWRLITKKPPTPKTPKEKFQPASDSNISAETSGAEKGKSTPKPPDEDVEKGTSPANAQTGAQKPSAGAGTNTKDNYDKVLSNVKETDKTSSCVIELKAVWFNFAAPPCVPITRKIDLTRLDWNLLSTASPAITAWMNPSNRLAMKIVSLMKALHTRQTAVAACLMAEAMDNEKIQRNPKIKKSRYANNYTLLSKTLQEDPSCQLCYIMQKLVLDEGVQRIETIFKQHDVPHLNTLRQGIIVLSRQWKNTLYNPILFEHQYKNKLSRPINVTFSFPQNEEDAENDECEGDVEMGAFAGVGENPEESATYGHEGANHGTASQRSTSTSPNIHHPRRGIQMLPIISGQVPEFEYGALQEGSLSSTNSVNKSWLGTENHKEDLYFWMAKQQDNKKKHFTEKEHARPAPPKMTEHAGQTRSGIMQDSIKLLDAHLIFEPLLTCLGVMPQQMINKFSNADISSLENFGTNLSLIGTFDSIRVDIVVSEAGDKKNSAQKPAKLNKKSNGGRASIMMDTPLFLCERVGVELEVLKMSDGMVDQARQNVIYMSRRQLKKHTSTVINFSLNVRFISQQVNMPLLRLLHQICNMYQNVKDAQNEFHDQPELSKKSQTKDECSLASEPTDIVPFNSMSERYNHAENYSDERYDKFNETMPTMLARPRPGGLAPIIQLTPSPNAKNRPQSFAQKLRSTGKSVKGKLGYTNLNESSSSPLRDSPTMSLHEHNILKMSTESKASLNGACATSVSGDYQNTLTKAGMPTMAPMLETPNCWKTIYHLLELYGTMPETKTVVQRSSLNEHKSKSAGFAHDDDDLASAPTPLPQHREMLLVDASSQERTRLIVFGVAKIHKTRLLATLSGLKLESEITTLNSTATWRKKARPVSLECSLTGQVGRAMIVLLEGVAPSQQTVVKVTVGKSQTLYSSLSKRGKDKNSGLLSIGAVNIDIPQHPVALHGMMTRSSKQLSSTLQELRVKRNSGRSTMRSHTAEEPESPFHARNSVGASSGTGVASEMRERTVSGGAGAQQQPQQAARRAAHMAQSKTGTAQHQNGLLQPLVMQFNVLLQSLSINAALLPSLQAQYRMNHVSSMGVTGQRAKFVIDLPTHTLSFNTKIQVSFTHL

SEQ ID NO: 37363 - DNA, 2210 bp, DROSOPHILA
gtgacaaaaattgaaatatatatacacagaacataatggggttctaggccgagtagctggctctactgttcatttgcttccaggttaattgttatctacgctgaacagccttctcgcagcttaattggctagacaggcggctcctgttgatgtggctgctgtttcccatgttgctgctgttgatgttgctgcttgtgctgctgccacggctgccattgctcctccgacagctacatccctgcccaactgccggtcggaagctacacagaaatgctattaagactggcagcgcgtagagggaaatgcgtgcaattgatttggaagctaatatgcgtgaccagggcaccgatgagccccacatcgccccaaatggcgccacagttgctctgcttgcgctggacgaggctgctgctgctgctgcagctgcggccgctgaagttgctgctgcagggcgtcggctcttcttcagttgtttgtctagtttgtggatttaaagcggatggagtggtcagaggggataggaaatggagaccggtgcggaaggttggccacaacagtggccaaaactgttgctgatgtactcgaacaaaattggaaatggtatctcaattttgattgagttaactttaatcttgtcatctaccaaaatctaaattcctaatcagattatcatactaacaaacaacacattattcggaatgttaccttatgttggtgaaacaagtgtttttgcattctcgtacagaagaacaaaaattaaattataattgaattgcctaagattgtttaatttaagaaacgtaaaggaaatattgtctttggaagttttttttttttttttttgaatttaataaaaatgcttatattcaatgacaaagaaataatatggtatattgttccttttataagatttaatttactctatttaacgtcatctgcaacagctatttctcggagtgcacagcccttgttgaccaactaaccgccggatgattgatgatcactcaccttcgagctgagccttgtccatggactgacgggacttggacatgaccgtctcccgcgactccagcaccggaatcctctggtgcttgtcgctctccacgctttcctcgttgctctgccagtacacggaggagattttggcgacacactgcagtcggattatggccgggaaatgcaagatggaaagagcagggaaaactttcatcaaatctgtgtacattgataaatgtgtggggggctgtgggaattgggggccatggcggattggccatccttttgacggcgtagtaaaagttttatgctttcattaactccccccgttttcgcccaaataacccgaaaatgacccgcatacatctccgcagcacacacacaagtatgcacaccagcacaccctgcgtcaccacatatgcaaacggactgtgacccacacggtgaccgaaaggtcgttgcacagtggttactcatgtcttcaaataatatttacagatatttttttttatttacggaaatttaaaataaacaagaaaggaaactagcaagcattttatgttttaaaacactttaggtatattccttttaatttcttttcctttgacagctatgtgatatagtggtcccatcctatccgttccgacatatatactacatgcaatataatgggacctgttagagtagtttcatgcagatcgctgcagaactgagggaccagcttgcgttgaaacagacggacaaatggacagacgaacatccagacatgtctatatagactcggcttttgaaactgaccaagaatttactatggtaggcttgttactttatatggtagcagaaatcgttgaaaccgttgaaatcttctaaattgataggtttataactttttaaatgtttattcagatcaatttagtatcaaaggccctgaatttattcacatttgtattaactgctttaagacaccaattaataaataaaaaatttaataagagttgtgactattaataggtgactttatttggaaccactgtgcatactgaacatgtcataagagcacttcgtctgccgcccgcgttcgcatgaaattttgtggcttgttcaacacacatttgcactcgcagtggtttgggtggttggctcggtggagcggatcagcgggatgtgatggccggtggatgagtggctggccaactgggtccgaatggataata

SEQ ID NO: 37364 - DNA, 210 bp, DROSOPHILA
atgaaagttttccctgctctttccatcttgcatttcccggccataatccgactgcagtgtgtcgccaaaatctcctccgtgtactggcagagcaacgaggaaagcgtggagagcgacaagcaccagaggattccggtgctggagtcgcgggagacggtcatgtccaagtcccgtcagtccatggacaaggctcagctcgaaggtgagtga

SEQ ID NO: 37365 - protein, 69 aa, DROSOPHILA
MKVFPALSILHFPAIIRLQCVAKISSVYWQSNEESVESDKHQRIPVLESRETVMSKSRQSMDKAQLEGE

SEQ ID NO: 37366 - DNA, 2834 bp, DROSOPHILA
cgtgtatacaaaaattaaacaaaacaatgaccggtatcgaaagggaaaacatgaccgacacaaaaaagaaaacaaaagaaagaaatagtatgtgtaaacttccgtaattaaaatattttaaaagaatcaaaaacatttacacgcacaggctacaaagccatgttggcttgcataaatgaaaaaaatgggtatggataataaatgaaatattgtaatgtaagttgagctcatacagatctgaaaacaaacaaaagaattgaaatcggcacttgcttgacaattattgtgatgaatgaaaataccataattcttgtttatgaattgaactaactaaatattaattacatattacagaaagtaaacttaaaaccaatccatattatccctaagagtaataattttattaaattaaaaggccaatacaaaatggctgtattttacggaatttcatcgcacacaaagacttttgaaataatttcagcacattgtccttctagctccttattgtctcatcttcctagtatccacccacgcaaaaaaaagcaaggagaagaatggaacccgttaggcgtcattatcgtgcacacttagttatccctttgaatgtcctccgtcccttcatgtgtgcgctagtgcgggttttgtcctttatggcccaaataattgtgcggtctccgggtcgagaaaactatatttttaaagctgcgctggggaaagagagcgttgatggagtcatttgagatcagaggcgattacggttatttggtgtctacattagcttgtatgcatttacgaatatgggtttatttgactttacgattaaaataaagccttatataacttctggaatatgaagtaaaaacattcgcagcatttgggctatacggattggattttgatttccagccaacgaaacattttcttaatttaggcaacactaatctaatgcacaatgagaaatgggatcccatatacatcaattgcatcaatcaatttaagtttataaatttcgcgttttttgaccagtatgttttttcacactcgaacttatgtttttctgtatggcgctcaaattctttaggtcaatattttcgccacggtcaaggaccctagtgtgtttttcttcttctggagctgttttatcaatgacttccggagcagttggtggtagtactgtttccggttctggttctggttccggttccggtcgcggttccactggcggttccggttgcggttccggttgcggttctggttccgcgggaacgtacactatcggcggatcaggagtctggcttataagcttattatagcaatgatgggcgggatggaatccgggctcgggatcctcctttggcagactgtcgtcggaaatcatcgattggtctgtagcccgatcgtattggaagtacggaagtaagtcgtcggagtctgtgccgcagggcggacactcctcttcggcgatctcggagatatgttcatcatccacgcttagttgactctccgatgactctgtgaactcctcgcggatcagacgcctggccaactcgaccgttgagaactcagtgtagtgcagctttcggcgtcgtacgaaggatatgcgtctggctcgctctttgatagtctccaggaattcgaaatcttcggagtcgtccgagctgcaggatggatcatgggcgaagaagtccggcgtcgtgagcttcacctccttatgcagtttttccattagctccttatgagacatgaccttctcgccggtttctctttttattgacgaggccgattcattttccacttcataggggtccgagtgaacgggtactcccaggttcattttatcgaaccttgttcttttagtcgtcatggttataagacaaaatgtgtttgttttttttttttaggttctacttcttatttttgggatatataaaatgtttatacgtttaagttttatttctgcccagactgaactagatgtgttagctttgatgttttaatctatgttaactagcttagccttatatcggaaaaaattcagtaattcattttaatcatgatcattagaaaaataatataatacttccaatgcaaatgccttaatatatttgacgctctcatttgcgtttcgtttttttcttgtaaatttaccccacgacttcgcttaatcaaaccatatcgtggacttcagtctggctaccatggctactacattttttgataacggccgcgatttgcctacgttccataatttgatgtcacatttttcccacaacgcgggttaagtgtttaacctctggtgcgagtgggcacaaaaaaaagggcgatatctcgacaaaagaaatttgtttgcgagccaatttcgattgtgtcaaaaggacggttatttattggaccgcaggcgtcattgtctagccatcgatgggaataaatatgcctgtggcgtctcacaaggatgcataaattgtcaaaacgagatttcgacttgcgatgaatttaattggattgcaaaagtttcttcgcgtatcgcaaaaccgaaaattgagctgttgaaacgtgacgtttccaccaactcaaacggaaccgcagccaatatgcatacaattaaactgtattttcggcatctggttttgggataaaagcgccttttatggacactccatttgacccacattcgaagaaggaattctgccaagaataaaatgtttatttagcattttatgccaaaagagagagcgctaaaattatttacgcagcatcaggcgtgtcatttgcatgtgccacgccccaggcccccagtcacaaaaaattcaaggcgatgaatcccacaaaaatac

SEQ ID NO: 37367 - DNA, 834 bp, DROSOPHILA
atgaacctgggagtacccgttcactcggacccctatgaagtggaaaatgaatcggcctcgtcaataaaaagagaaaccggcgagaaggtcatgtctcataaggagctaatggaaaaactgcataaggaggtgaagctcacgacgccggacttcttcgcccatgatccatcctgcagctcggacgactccgaagatttcgaattcctggagactatcaaagagcgagccagacgcatatccttcgtacgacgccgaaagctgcactacactgagttctcaacggtcgagttggccaggcgtctgatccgcgaggagttcacagagtcatcggagagtcaactaagcgtggatgatgaacatatctccgagatcgccgaagaggagtgtccgccctgcggcacagactccgacgacttacttccgtacttccaatacgatcgggctacagaccaatcgatgatttccgacgacagtctgccaaaggaggatcccgagcccggattccatcccgcccatcattgctataataagcttataagccagactcctgatccgccgatagtgtacgttcccgcggaaccagaaccgcaaccggaaccgcaaccggaaccgccagtggaaccgcgaccggaaccggaaccagaaccagaaccggaaacagtactaccaccaactgctccggaagtcattgataaaacagctccagaagaagaaaaacacactagggtccttgaccgtggcgaaaatattgacctaaagaatttgagcgccatacagaaaaacataagttcgagtgtgaaaaaacatactggtcaaaaaacgcgaaatttataa

SEQ ID NO: 37368 - protein, 277 aa, DROSOPHILA
MNLGVPVHSDPYEVENESASSIKRETGEKVMSHKELMEKLHKEVKLTTPDFFAHDPSCSSDDSEDFEFLETIKERARRISFVRRRKLHYTEFSTVELARRLIREEFTESSESQLSVDDEHISEIAEEECPPCGTDSDDLLPYFQYDRATDQSMISDDSLPKEDPEPGFHPAHHCYNKLISQTPDPPIVYVPAEPEPQPEPQPEPPVEPRPEPEPEPEPETVLPPTAPEVIDKTAPEEEKHTRVLDRGENIDLKNLSAIQKNISSSVKKHTGQKTRNL

SEQ ID NO: 37369 - DNA, 2734 bp, DROSOPHILA
ggtctgaggttttcaggcgttctttgcggttcatctggcaacaactgttgacaaaatgaaatcaataaattttagcgcaaatcaattaaaatacaccagccagattgaattagagtgctgggtgcttttggtcttcttcttgttggccaaacgaaaatatttgtcaatttgcggtattcacaaaattaaatttgacacacacgcaccagcaagatggaatgtcaggatgagttttaggcaattttatctcactttgtgtgaaatttgttataatttatttatacggcttattaaaattattgtaagttcggccatttaattaaaagtcaaactttatttgcaacgagaaaagcggagcaaacatgacagttgaaagtggaatcaaatttatgaaatcgaattatggcatgcatggatttgaagcagttttcgggttaagccccaataagatggataaacccataaatcctcaaaataacaatctaacagaaattgaatggaggtaaataacctttgacatttcaaagaaattacaaggaatcgggacaaaggagcatggttaacttactttttttgaaatagttttctatttaattgagttgtacgttctgcaatcataaattgtgtatgtaaataatagtgtagctttaatcgtagttgacttttcattacttatccaattaaatttcaaaggccaagcattaaaaatagtaggaacacaaattacttcgtgaagacaaacgttgagagataaacaccctcatagcaaaaatcggccaataccaaagttttggcaaaatattttggaagcggctgtctttggtcattcattaatatttggcactgaataccggtaagaaaatcaaataatcaggtagtttgccctgccataattgtcaactgagcatttaagcagaatagaaaagctacttgaaatcgtccggccggaactcaaatgtagatttgaaaaactattcaagtgttaagtgctctgctgaccatgttgaaggacaccgccaccgcatcgaccagcgaacttgcaggggaagtgggtgacgcccattcgactcctggcagctgccctccgcccgccgcgggcgacacgccccccgtcgttagccgaccgctggaccgacgcctaaaccccaacgcacctgtgtttgtgcccgacttcaaggccagccaggtggccaaaaagctatttgatgagtgtaagtacggaaaggaaataatgtttatttaaaacaatatatattgtattttgaagccctttatatatattatgctttgacttgcataggtttttagtattgtgcatttatttatttctttttaatttcctgatggatttataaatttaatacccatgcagtatctacgtacacccggtggagtacggcaacctcggaggacatatgctacgagccccgttacgagtccatctggcgtgaggccagcatccagcagcagcagggtctgcgccatccgggtttcgtttacagcctggatcctggcgaggaggaggttggcgaactggagtttgacgaagtccaggccatgaatatcggagccgagtcctatgatcccaagctaggaagcacatcagttagccaggcaatggaagttcgcgaaactgtgggtgatgtggaggaacctttagatgaggaaaaaaggaatggctttcagaatcgccactccgccagaccggccaaaaagtgctgtctggtcatgtaggtcccacggaatggcaaatttatatatttattttccatttgttttcacacctacatgcaactcagtaaattgcttccttactctctcaatttgtgtatttttttcctataccataggtgcttataagggatttcccttttagtaagtaattacattttttctgaatttaatacgcttccagcgcgaagaattaaattctacaggtattttccaacgtcgttgcaattaagacgcttttcagaactttctaaatgcactcctttcaagcccacttacggcagactggaagaaaggaagctccgtggagaaaggtcgactatacctatgacataatttatagcctacattttagcgccctaaacgggtttgttttactttccacgaaggctcttgcctttctgccttcagctactttgtcctgactttctaatgatgttgaatatgcatgaaaacttttgccgcacgcagaattctcctcgctggatggcagctgaaagcttgattcacctgtctatgggtagcatggcagcaggactgccttcagatttaactaccactgaaaatagtacgggcttaaataactaatttttaaactcaataaaataacatgtggaatttaaaaaacaccttcactttcaaatacgagtggctatgcaaattaaattttcatttaaactagcgtttttttactcgtccaaataaagttcgaacattttcttagactgcacacttttgcattgtctgttagcaaagtggcgacaacttttcatttttttcgtttcttgattattttagttttactcaatttttggataaggaaggaaaactcataaggcgtttgggtgctggagtgtgtgtctagtaatgagaaaactttcgtgtccttgcaatgtctcatttagagctgtccgtaccccgatgtctgatgtcccgagccacggataacgcagctgcccacgacttttgaatgataagcgcggcgaaaaggacacgcagtgca

SEQ ID NO: 37370 - DNA, 573 bp, DROSOPHILA
atgttgaaggacaccgccaccgcatcgaccagcgaacttgcaggggaagtgggtgacgcccattcgactcctggcagctgccctccgcccgccgcgggcgacacgccccccgtcgttagccgaccgctggaccgacgcctaaaccccaacgcacctgtgtttgtgcccgacttcaaggccagccaggtggccaaaaagctatttgatgagttatctacgtacacccggtggagtacggcaacctcggaggacatatgctacgagccccgttacgagtccatctggcgtgaggccagcatccagcagcagcagggtctgcgccatccgggtttcgtttacagcctggatcctggcgaggaggaggttggcgaactggagtttgacgaagtccaggccatgaatatcggagccgagtcctatgatcccaagctaggaagcacatcagttagccaggcaatggaagttcgcgaaactgtgggtgatgtggaggaacctttagatgaggaaaaaaggaatggctttcagaatcgccactccgccagaccggccaaaaagtgctgtctggtcatgtag

SEQ ID NO: 37371 - protein, 190 aa, DROSOPHILA
MLKDTATASTSELAGEVGDAHSTPGSCPPPAAGDTPPVVSRPLDRRLNPNAPVFVPDFKASQVAKKLFDELSTYTRWSTATSEDICYEPRYESIWREASIQQQQGLRHPGFVYSLDPGEEEVGELEFDEVQAMNIGAESYDPKLGSTSVSQAMEVRETVGDVEEPLDEEKRNGFQNRHSARPAKKCCLVM

SEQ ID NO: 37372 - DNA, 2237 bp, DROSOPHILA
catatacatatgcgtctgaggagtagtgtctgtgctggtgtgcgtgagtatttgtttttcccgctttcccacagaaagaactcactttttcacgtttgacgtttggaaaaatgaaaagtgtagcggtatattaaataagtgggcgtgaccccacccacacagctgcaaatgtaacggttagcgtcctggcgcggttacgggtaccgctagaccttcggggactcaccgaaaagccgccaaaatgtcgccaaaggcaaatatggggatatgtgccaggttctgctgtttgtgatttaaaagcttttggctctgtttgggtttgattacccttcttcggggtataattcttttttcgccgagcaaaggtgttttaaataaaaaaaaaattaaatatcgccaaagctaaactaataaaccaaacgggttattttcttttttaatcaaataaattaaatcatttatagatacaaatcctaaaatatgattatttaagagcaatccctagatctctagacgtaaaacaagattaaatggatttttgtgttttgaaaaatggcaaattatgcatgtagggtatggaaattccacttgcaaatgccattttactgggacttttgagtttttggcgcatgtattttagtttcgccttacacgtgagttgtggactgcagtgacgtgcactggatttccccgggatctagtagccggagtccagcagggcaagtacaaattcatatgagagggctgcaaaaggttttttgtgtttgccttctggccattttggtggaaaaatatggccagctggaatcataacagttgaaatatgaaagtgggttagggcatacgaattaaggggataactttggtgcacttgcagttgagaatgcgaatggaaatggcatcatctcgggggaatccattaaaaataatttcaccacactaacattcgtttctatttctttcaaaaacgctaattgcagacattagcagctcgctgacaatgaccgaggtgaagatacccaatcacataatgcgcctgaagagcgccactctgggctgccgttacgccctcgacggggagtccttgtactcggtgaagtggtataaggacgggcacgagatctaccgctatgtgccacgcgataagccccccggacagtccttccccctgcccggagtcaacatcgatgtaagtccaccgcaacaggatattgaaaataaatttcttatttgctgatacaaaaaaaaaaattaaatacactaaaacttaattttattaaggtttttaaagcttttgaacttcactgcaattaaaggcaacattatcgttttattgtaatgcaatatctttatttatttatttatttaagtgccatatgaagacgcttttatcaatcatataaagatactttaaatatttcaaatttaagacttttagattttagtttctagacaactgcttattctgctgaattcgtaaggtcacatttgccacaaaacaatataataacatggaagaagtttttctcccagtgcgtattgaaaacagcaacaggtgttgcttatctaaaaaaaaaggaagcggaaaaatttaatttaaaattttattacactttatggcgctgattttgtggagggaggggctgttgctttgaatttagtgttacgacccgatcataatgattatttcaaaacatgtaattgccacaatggcgagggaagctctttctgcgcttttcgcaagatttccacccgctttcgctcccctgttttcattctgcttgttgctgattacgtcttcgctggaatgaaaattgctgccacgtagttttgccatttaactttaatttaatgtgtatgtaaccttccttagtttcccataaaaatgtgtgtctggttgggttgttttctgccccgccaaccatccattttcagttccccttcctagccaagctaaggtcacgtgttggtctgcttgccttgcgatcgaaaaggttaacggaaatcacttaaagctgtcaatatagcagacaaagttgatatccctttgctggccctcttaacttcgtgcggctctaataataataatttgccaaaagcacttaagtgcgtctactctgtaagacgagcagtcaaagcaaaatgagtctaagaaattgcgagagcactgtggaaaaaatggtattgttatcgaaaaatctttcataattgattaatactataaagataatacgaat

SEQ ID NO: 37373 - DNA, 237 bp, DROSOPHILA
atgaccgaggtgaagatacccaatcacataatgcgcctgaagagcgccactctgggctgccgttacgccctcgacggggagtccttgtactcggtgaagtggtataaggacgggcacgagatctaccgctatgtgccacgcgataagccccccggacagtccttccccctgcccggagtcaacatcgatgtaagtccaccgcaacaggatattgaaaataaatttcttatttgctga

SEQ ID NO: 37374 - protein, 78 aa, DROSOPHILA
MTEVKIPNHIMRLKSATLGCRYALDGESLYSVKWYKDGHEIYRYVPRDKPPGQSFPLPGVNIDVSPPQQDIENKFLIC

SEQ ID NO: 37375 - DNA, 4021 bp, DROSOPHILA
attgcattctacgagtaacgggaatagaaacaaaacacttttaagctcttatagtgcccgagatcaaaaacatcatacggatcaatggacaaggctgctggttgcgatcacgaagatatataagttacagtgctacaagttacataatttttaacgaacctagtagaaactgggataaaaatatacaaaaatcaagttaaataatcctattgtatttcaccaaaatgtttgcacgttttgtccattacctgttttttatttgtgtacgcctcgttgacaatctgaactcaaaatctgaactagatatcagattattgttgttatagacataagctaattaacatgcttgccaactgtcgactcagttttacgaaatggtcgattgggtcgtgttgttgctgaaggcagtccacatatactgctacttgataggattaagtaactttgagttcgattgccgaacaggacgcgtatttaaatcaaggcgatgtactatctacgccttcatggccaacatctttattttgattacaataatttataattttaccgctcatggtgataccaatttactttttcaaagcgcaaataagctgcatgaatatgttatcatcataatgtccggcctcaagatcgtggcgggtaaaattctataaaatttctgttctcaagactgattatatattttttagggctcattacggtgcttaatagatggcttcagcgtggccaaatgatgcagctagttaaagacgttatccgtctatatatgatcaatccgcagttaaagagtatgattcgctggggaattctattgaaagctttcattagttttgcaatagagctccttcaagtgacactctccgtggatgcattggaccgccaaggaacagcggaaatgatgggcttgcttgtaaaattatgcgtttcgttcattatgaatttggccatatcacagcattttttggtaatacttttaattcgggcacaatatcggattatgaacgcaaagctgcgaatggtgatcgaggaaagcaggaggttgagtttcctgcagctccgaaatggagcttttatgacgagatgctgctatctatctgatcagttggaagatataggtgaggttcagagccaactacaatcgatggtgggtcaacttgatgaggtatttggcatgcaagggcttatggcttatagtgagtactacctatccattgtgggtacatcttacatgtcgtatagcatttataaatatggcccgcataatctgaaactatcagctaagacctcgatcattgtctgcattttgataaccctattttaccttgatgccttggtcaactgcaacaatatgctacgtgtgttggaccatcacaaggattttttgggtctattggaggaacgaactgtgtttgcttccagcttggacattcgactggaggaatccgtaagctataatccaatatgttaacaattttttgaaatatacacttactacctttcagtttgaaagtctacagttgcaactagctcgaaacccattaaaaattaatgtaatgggtatgttccctatcacgcgtggctcaactgcggctatgtgtgcttctgttatagtgaattcgatatttctaattcaatttgacatggaattcttttgagtggaatattatttaagacattttgacattgggcttaattctggagctatctttacaattaatcgcgtagtataaaaatatcatgtttgtttgcaaatataaagaatatttccatattatctgacctttatcatataattactctgtttggttcaaccagtctgtccaatcttatcagaatatctctttcgaaatgagtatattacgcttggagttaaattatttccacatcaaggcaaaccacattgtggacactttcagttcgtaaaaataatggacttggaaagttttttgttgggagcggtttactactatggactcttcatcggtctcagtaactttgagttcgactggaacacaggacgtgtatttacaaaaaaatggagtactttgtacgcaattgcgttggattcttgtatatttgcactatatatttatcactggaccggaaacacaaacattgttaatgcaattttcggcagagcaaacatgttgcacgaatatgttgtcgccatattgaccggacttagaattgttactggtagcaaaaaacgaattcaaaaatccgttggataatttaagtgattaattcccgttgtatttgtaggccttttcacactgattctcagatggtaccagcgttgcaagatgatggatttggcgtcaaaagtggtccgaatgtatgtagctaggccgcaggtaaggagaatgtctcgctggggcattctcaccaagtttatttttggttctatcaccgatggcctccaaatggccatggtcttgagtgcaatggggagtgtggactctcaattctacctgggactgggcttgcagtactggatgtttgtcattctcaacatggctatgatgcagcaacacatgataatgcttttcgttcggacacagttccagctcattaatacggaactgcgtcaggtgatcgatgaagccaaggatctgctcttaagtccccggcatcagggagttttcatgaccaagtgttgttcgttggcggatcagatagagaatatagcaagaattcagagccaactgcagacgattatgaaccaaatggaagaagtattcggcattcagggggccatgacctatgggggctactacttgtcctcggttggcacctgttacttggcatatagtatcctcaagcatggctatgagaatttgagcatgacactgagtactgtaatcctggcgtactcttggtgttttttttactaccttgatggtatgctcaatttatcggtcatgctccacgtacaggatgactactgggaaatgctacaaatactcgggaagcggacaatattcgttggcttggatgtccgcctcgaagaagccgtgagtacatgaagttgtagattttgatttttataacaaagatttcttaccgacagtttgagaaccttaatttgcagttgatacgaaatccgttaaaaataacggttgttaagttatatgatgtaactcgcagcaatacaatggccatgttcggaaacctgattacgcattcaatttttttaattcagtatgatattgaacatttttaagttagtcattcatttaattcacaacaatgtaaatgaatgtttacaatatttttcttcgttaaaaaacaaagcttattgaagatattgaatacgttgtattaactgtactgttaacaatatagaagcagacattagttgattatattttcaagtaatggttgctagttgattggtgatatgagtaaagcgaatatattgaggttgggtaattacacggtcataacttccagttctcactccactcactcccactgacagccattatgaatcaaccgggcacataggactcattcagtggttctataatgccagagaagaagggtcacgaaatccctttgagaaattcccgtaaaaagtggctatcccatcttttacgatggtcagtatcctctatttgctggatctcatatatcatttatcgcggcgtggtggttgggcaaatgaagttcgatccgagaaatagaaaaatgatcatacaccctcggaatatttggaccaagcggatttctctgctccttaaaatattggcaatgttatgggattattatttcattcaatatttatgtagcgcgattcttccgatattttcaaacaaatcagaaaggttttttaataatctgatagaggcaattgcagttcaactatcgctttggaataccgctcgcctatattcttggctgaatagcctatcctggaatcgctcatttgtggatcgcgtgaatgacgtaatccggttgaacggtcatttaaaatcaattctcggaccactatccttggatagtatctcgctgttga

SEQ ID NO: 37376 - DNA, 1086 bp, DROSOPHILA
atgaacgcaaagctgcgaatggtgatcgaggaaagcaggaggttgagtttcctgcagctccgaaatggagcttttatgacgagatgctgctatctatctgatcagttggaagatatagctaagacctcgatcattgtctgcattttgataaccctattttaccttgatgccttggtcaactgcaacaatatgctacgtgtgttggaccatcacaaggattttttgggtctattggaggaacgaactgtgtttgcttccagcttggacattcgactggaggaatccttcgtaaaaataatggacttggaaagttttttgttgggagcggtttactactatggactcttcatcggtctcagtaactttgagttcgactggaacacaggacgccttttcacactgattctcagatggtaccagcgttgcaagatgatggatttggcgtcaaaagtggtccgaatgtatgtagctaggccgcaggtaaggagaatgtctcgctggggcattctcaccaagtttatttttggttctatcaccgatggcctccaaatggccatggtcttgagtgcaatggggagtgtggactctcaattctacctgggactgggcttgcagtactggatgtttgtcattctcaacatggctatgatgcagcaacacatgataatgcttttcgttcggacacagttccagctcattaatacggaactgcgtcaggtgatcgatgaagccaaggatctgctcttaagtccccggcatcagggagttttcatgaccaagtgttgttcgttggcggatcagatagagaatatagcaagaattcagagccaactgcagacgattatgaaccaaatggaagaagtattcggcattcagggggccatgacctatgggggctactacttgtcctcggttggcacctgttacttggcatatagtatcctcaagcatggctatgagaatttgagcatgacactgagtactgtaatcctggcgtactcttggatgactactgggaaatgctacaaatactcgggaagcggacaatattcgttggcttggatgtccgcctcgaagaagccgtga

SEQ ID NO: 37377 - protein, 361 aa, DROSOPHILA
MNAKLRMVIEESRRLSFLQLRNGAFMTRCCYLSDQLEDIAKTSIIVCILITLFYLDALVNCNNMLRVLDHHKDFLGLLEERTVFASSLDIRLEESFVKIMDLESFLLGAVYYYGLFIGLSNFEFDWNTGRLFTLILRWYQRCKMMDLASKVVRMYVARPQVRRMSRWGILTKFIFGSITDGLQMAMVLSAMGSVDSQFYLGLGLQYWMFVILNMAMMQQHMIMLFVRTQFQLINTELRQVIDEAKDLLLSPRHQGVFMTKCCSLADQIENIARIQSQLQTIMNQMEEVFGIQGAMTYGGYYLSSVGTCYLAYSILKHGYENLSMTLSTVILAYSWMTTGKCYKYSGSGQYSLAWMSASKKP

SEQ ID NO: 37378 - DNA, 3904 bp, DROSOPHILA
tttaatttaaaattaagtgctttttggtttgtttttttgtgattccttatcggtagcattcattacgtttatctaattacaattttacattgtttaatgcatgctcaacgaacaacgaaattttatagacaaatcatctaatcaaagaagacatttaggttgtttcggttgaattcgagtgacagttatacactgcgtaacgaaagtatagcgcgttgaaattattttatcatacactaaacatacggtcagatatcaaaaatttaatttaattggtatataagtttatattaacaatttatttgtttccatattattcagacatgccaaatgaagttcacatactttcgtaacgcactgtatacttcacaaaatattcaccatgtgttttgcttaaaattccccttcatcatcgcttagctaaaacaatcttaacgatatttttcctacatattaatttatggttactcatatttttatattctgttaaactcgtattttgccttgaccaacttttatggaaggattttccattcacttttgctctgttcctttcgtgtgatatttaaattctgttttgtgtgtgaatgagcttaaccattaataacatacaatacagatacataaatatatatattaaacattaactatttacagttggatttttcattcgacacaggctttaacattcctaagagagttaaaacattagcacgctttttcatatacaatttttctcattctcagacaagtaaatgtaatttattctctagatagggtttgtttcaaattaaattcatgaaagcttttgttaacggcataaagaaattagctgcatttctttcgttttgcttgaattactttttttttttttttttttgttcatttcctgtttttgattctcagtgagtttctttattttctatgcaaagcgaagacggaaaaatcggtgaaaagtgtgtgttgtggagggaaatagccgccttgtggcttaatgcagctaccgtgcagtcaatgcaattttctccagctgcgttgcggattttccgtgactcgtcctgcgattttcctccttgcggccagccagcaactctctcgcctgctgagtttctttcgttatcccaatccctccaggcgctgtccgatccatggatattttatctgtatctatatctctcgtgattccctgcgccagggttgccatcaccatcaccgccagcgccaccggaaggaggacgagtggcgtgattggtgtggagggcgctgaagccgtggaactggctgcatttggttggacgaacaagagcgataagattttggtcacaaataattcccggtaagacgtaccttggacgggatcggcgcgtgagttgctggcgtagaccgtttcccgggactcgagcaccggcgccttctgcggccggtcgccctccacggactcctcgttgcacctccagtacacggtcgacaattcggctatgcactgcaagatccaacagatttgaggttagctagctgagagtacgaaacactatcgaacttgcgtaactccaaaacagtcaaaatcaatctaacgaacttttggttttaccttcgaacggaaactaatatttaatgcacacgggacataaaaataatattttttggtagaaaaaccttttaaaaactaaaattaaagttttagtatttcactgtaatcaagaaaatatatatataaaaatagaataaattataatacgacttttttaactgtgcacatcgaaaatgtaatatcaccatttgtaagtttacataatctacccgaaccaaattctacattgtttttgagactgttttgaggcacaagagtccgacagttgagtttagttaagttgttcaactcacctttagtttcatgttgcctttgcgaaagtgtttctgttccacccggaattgaaggcccagcacagaagtttctagaccatctcgtcccgatacaattgtgtcgtatttgcggagtttctgctgctcaactggctctccattcacttgccaggatagtttcacagcaggcttggaacgtcctgcggtgcaattaacccgaacatagtctccgatttggtaacgcggtcgtccaccgctgattttcggtgatccttcgtccggaagatctaaaaatcgaatggaaatatgagaaaaacttcagttttatagctgccaacgaaacggaaatttcatttacggccgcagacctttggcggtgactgtggctagcgagagattgtaactgaattttgcaataaacctaagccaccacagaaacaacaagggaacagggaccgctgcaaagggacaacaaactcaacggagcgcagccggaaattcaataaaagttccagccgttgatgcactgacggactttggataaaattgcaaacgggaaaacaaaaagccaaatgcaatgaaatcaaggaaaccaataaacactgtctagccaaagtgtcaacactctgcaaaagtgatgaaaaataattatgggtacatttcaaatttactggatagtaaaaatttaattatttgtaaaacatacggtttaaattcaaacaacatgaagaaataatttgatgattttagaaatattattattacttaatattattactgagacagcacagtttcccgctactttttatcaccgtacacccaaaacaaatcaaagtctgaccgagcagttaaaatggccctaaaaagatccctgagaatctctatggatctccgggctctgcaaaacggaaacggaaatggtttcgacttgttgttgtttgccaaaggggccccgaaaaaggcatctgtgggcgagttcctgaatgccgtggtgtggctgccgatggtgggcggtgagttgtgagttgtgagccgtggcatatgcccagcccgttctgctgccgaagcttttaaaaactttgattgaaagccaaacagagccagccgggatgggaccgcagtatgagcagaagcagcaacaaaacatccgaaagccagaaacaaaagcacaacaaaagccctcgtttagaacaaagacagagtccacgttaaacaataaaagggagacagccattgcaaaaaaagggggtggtgcgagggtgagggggcgtgttgacacgcccacgcaaaagttttataattgaacaaacgaaatgtcaacgccagttcaaagcgctccccattgcaagtgtagtgatgagtgggtgtagtacactggcaaaaaattgtacacacaaaatgagaagccaacctaaatttaatgtttacatctatcagaaaagtttgaaagttgatgctcgcattatcttcttaacaactaattaggtaaccatctaccgtttctgagatataatttatttatagaatttatttatagaatatatatgatggtttttcataggagtgtatttcaaacattgccattgctgttaattaactatagttttatacatagatgtgtcgccgatataacaattcttggtaaacaaagcagtgaaaactattttctgtgcaaaatgtgggtcgatggatgataataacgcgcaccttaaagttccggcttcacttgacgttttgtttgcgcattcagttttgcggcggcgtcttgataacatttttggcattgccctgcaggaattttggccaagacaagagccacaggagccagagacagacaacctccaaaattgagttaaaccgttaagctttggcaagttttgcccggggtgaaagtgggagtccggatgaagttcagtaagcttatttggcattagaagcatgaaatcaaatgaagcctgtcaaatgcactgcaaatgcttttgactaagtaaacacaattccgattgaataaagctgattgggccaggctgctggaatcagt

SEQ ID NO: 37379 - DNA, 912 bp, DROSOPHILA
atgccacggctcacaactcacaactcaccgcccaccatcggcagccacaccacggcattcaggaactcgcccacagatgcctttttcggggcccctttggcaaacaacaacaagtcgaaaccatttccgtttccgttttgcagagcccggagatccatagagattctcagggatctttttagggccattttaactgctcggtcagactttgatttgttttgggtgtacgatcttccggacgaaggatcaccgaaaatcagcggtggacgaccgcgttaccaaatcggagactatgttcgggttaattgcaccgcaggacgttccaagcctgctgtgaaactatcctggcaagtgaatggagagccagttgagcagcagaaactccgcaaatacgacacaattgtatcgggacgagatggtctagaaacttctgtgctgggccttcaattccgggtggaacagaaacactttcgcaaaggcaacatgaaactaaagtgcatagccgaattgtcgaccgtgtactggaggtgcaacgaggagtccgtggagggcgaccggccgcagaaggcgccggtgctcgagtcccgggaaacggtctacgccagcaactcacgcgccgatcccgtccaagccagttccacggcttcagcgccctccacaccaatcacgccactcgtcctccttccggtggcgctggcggtgatggtgatggcaaccctggcgcagggaatcacgagagatatagatacagataaaatatccatggatcggacagcgcctggagggattgggataacgaaagaaactcagcaggcgagagagttgctggctggccgcaaggaggaaaatcgcaggacgagtcacggaaaatccgcaacgcagctggagaaaattgcattgactgcacggtag

SEQ ID NO: 37380 - protein, 303 aa, DROSOPHILA
MPRLTTHNSPPTIGSHTTAFRNSPTDAFFGAPLANNNKSKPFPFPFCRARRSIEILRDLFRAILTARSDFDLFWVYDLPDEGSPKISGGRPRYQIGDYVRVNCTAGRSKPAVKLSWQVNGEPVEQQKLRKYDTIVSGRDGLETSVLGLQFRVEQKHFRKGNMKLKCIAELSTVYWRCNEESVEGDRPQKAPVLESRETVYASNSRADPVQASSTASAPSTPITPLVLLPVALAVMVMATLAQGITRDIDTDKISMDRTAPGGIGITKETQQARELLAGRKEENRRTSHGKSATQLEKIALTAR

SEQ ID NO: 37381 - DNA, 2192 bp, DROSOPHILA
ttctaattgttttagcactcccgtcggctggaaaagcggggaaaattagaaggaaattggagtgcagcagctattgttaatggatatttggcccgtctgcggccgggcaagttcaatttttcggtaaagtgttaattacaccaggcaacgacaaattttgaaagattcctccgtgccagctgacaaatcatttgttgcggcctggacattccgggggtaagtcatttgatgtccagagactgcggttttagccaccccagacctgcgacatttgacaaatgtggaccagacacggccagagaaatttggtgagaattaagccacagggaacagcggggcaaaattattggggaaatggggtgaaaatgctctcgatgaggaagcaatgaaaattctcgacttgctctcggcggcccaatttaattgctgttggcgaagtggatgctgatgagcttgacgcttatttcttgttgccagagtgctaatgctgtttatgttgctgattttcctgcaacagttgttactgccatgttcgttgttagtgactgccacctaatgcatagagaaatatttctgcagctttggcaaataaaagtgcctgtctataaccttataaatattttcaagaaccaaattaattgtagtttatcttccgatttaacttttatgctggtgaacattcatatttcataaaaaattcataataactcagtttctttttgtgttattataattttagttgttaataaattcgtttaaccaattcctgagtttgttcatataatagtgaacaaatattgcagatagttgctcaatatttacgtccgtcacagctcattcatccataaccatccagtgacagatacttatataagatacatagcgcatttgatcacacttgcagcatggctattcactcaacagcaggcaggcagcttggagtggccttaaatcgtagtcacgttgccagcattgtgataattgcgtctaataacttttgatggctgtaattaatccccagtggcgacccgcctctgacctccgttcccaatccatcacgccaccaaaggatgtcaacgatgcggaggaggagcagcagcaggagcagcacatcatcatctcgggcgattctgtcagccatgaaattgacacgtctttggtattaagtggcacattgaatagtccaaattaatacccgtgcttcatggttgttatacgcgttgttcaaccgtgttgttcaatagcaggtccggtcaatacacttagttagcgtcagcaagtgaaaaccacgaatgggattatacttcggtttctttagaagagagctaataccctagactgagttcattgaataattcaatgtacattcacatagacagtcctaagctacagatacttaaaatcaaaataacattttaagcaattgtatatatatttgccaacccacaccgttatacctgagttatttacacagaagaaacgctagaaatagtccataaaatggtttatctttcagcgatatcttttccatgcgatttcgaaagaacaaaagatcttcaaagactcctggctattctttcgccattgtcttgtaatttctgcactttccaaagcaattaaatcgagggcgcaaccctctcgagggggcggggcacaacagacgactaggtgggtgggtggttccttcatctgggctagagaaatgaacataaagtgagcaaatgtgccataaattaaaactaaatgccgaccgacgctgtcaaaggcagaaaaacgtgaagacgagcggcgactgcagtcgcagttaagattaacgcacacacgcatccgccacgcccacagaggggcgttgacacccacacacatacggttagatatacacccatacagaggaagtctcatagatgtcaagcattggtcgcaatgatttacggtttcgcataggggaaaattgcgcatacgacgcgttgccgccactaagaatttgtttgtccatttttttcgcttttactctctgctgctgttcgctcataaattctacgcaggaaaagtatttcaatgcaaacgagagttgacgtttcaaaaaagaattcgcttcctagaataccctttaagcttatctagaaattgttgtttttataaggcacaagagataatattttgcataccatctagttttacatttcattcag

SEQ ID NO: 37382 - DNA, 192 bp, DROSOPHILA
atggctgtaattaatccccagtggcgacccgcctctgacctccgttcccaatccatcacgccaccaaaggatgtcaacgatgcggaggaggagcagcagcaggagcagcacatcatcatctcgggcgattctgtcagccatgaaattgacacgtctttggtattaagtggcacattgaatagtccaaattaa

SEQ ID NO: 37383 - protein, 63 aa, DROSOPHILA
MAVINPQWRPASDLRSQSITPPKDVNDAEEEQQQEQHIIISGDSVSHEIDTSLVLSGTLNSPN

SEQ ID NO: 37384 - DNA, 2922 bp, DROSOPHILA
ggcaaaaagttgaggccgtgctataccaaagtagtttagccatgggattttggcacttcttgtagccaggaaatgtttacatatgcgcataaagatgcagctacatattccacacttttcttttttttttaacatttcgtgaactaaacttttccgacatccatggaagatacccaagtgtcggaggccagaataaaactttgtttcatttgttatgctcgtaaattgtggactgtgaggccatggaaatctcattttcgctaagtaggcagttgacattgcaggaaagcatatctagtacgatatgtttgagaacaaaagagaacaccatagacgacacgactttcaaatacctttcaaataagtttttaaattcacccggacatgaccagatcaactcagttagtggtccagatccagaaaatatcccaacacttaaaaagtcattacccatgaattgcttcaataatgtattagttgtgttttatttaatgctatattttaataagcaattttagaagctaatgaaatatgtatccataaaattcaattaatattccgtgactatcagaaaacgtggctcaattaatcagtagcattaatttaaaacggcttaatgttttcatttggtaaatttattttaacagaatcaattagtaagccttttcatgcatgctggtcacaaatgtataaaaatgagggagcttttgaagctgagttcaaaagaaaagtttaagtggaaagacaaagtcgaaaatggcgcaactttttagtatatgcctactaatagcaacagtggtcaatgttcacggattttcgagtaaatatttaaaaataaaaagcccgcattggattattttttgttattcaaacagaatacggacgtgactgccgggatattttatgtgctcctggtcagaagtgtattatatccagagatccctgttcaggatcaaataaacttgaaaatactcaatgcgggaagtatcccacttgtgtaatgcacaaccattactcctctacttcaggttcgtattttatccccattcaagaacgagtatcttcatcataacgatgatcacatatatttaatgttattaataagttattgtgatgtaaattttcttgaaggtgaaaccctggagcgtggaaaacgtcaggctaaccagcaaggatatggaatgggtggcagtggaatgggacggcccaatggaatgaataacggaggaaacggtggtaatggaatgggtggtcaatatggaaacggaatgggtggacagaacagaaatggaatgggtggtcagtatgggaacggaatgggtggacagaatggaaatggtatgggtggcaatggaatgagaggaaacggaatgggtccaggtggaatgggcggtcgaggagggaacggcaatggaatgggacaaggaggaatgggtggtaatggaatgggttccggtggtatgggcggaaatggaatgggtggaaacggtatgggtggaaacggtatgggtggaaacggtatgggtggtaatggaatgggtccaggtgggatgggaggaaacggaatgggtggtaatggactgggtccaggtgggatgggaggaaacggaatgggtcctggaggaatgggtggtaatggaatgggaggacagggcggctataacggtcgatggggacaaaacggaatgggtggaccaaatggaatgggaggtcgcaatggaatgggtaggccaaatggaatgggtggaccacccggtgggcaaaatggaatgggtggaccacctggtggtccaaacggaatgggaccaggcaactggcaaggcaataacaattggggaaatggaaataatgggaatggtagtaaccgatatgggggcaatagctacagcactacacctacaacaacaacggatggctggtaaccagaaacatgcaccgaggagaatgggatatacatatattcctatggtgtacttttatttagttttattgtattccttttcaatgtaataaattgagttatgcaattagcggaatttaaatttttaattatacatggtaattcaaagaaaatattgtcgcaggcacacacattatttctcattacaccaacacataagccatttaaattgacatttttaagattccattgtatttagctttaaaaacccagtttttaaatgtttaacaggcttgcttcttttcacccctaaacgctttaaataatcattgattccaatttgtagataatttgtgcgaaaatattaaaatattcatgcgtgcttgaaagataattatgtattaaacatgaaagaggagtgacgaagctggggttaaattttccacagctgcggtattttaagcaaacaagtcacgccaatcctttaggaagggggacagctggctttctaatagattgccttatcctttaattgattacgaataaaaacaaacagagaaagacagaaagtagtaggggaaaacaggactaaaaggacatttttccggttcttatcctgactacgtgctcgctctttgcctgcgtgcatttccatatttgtttaggcgaagtaggaaaaaaaaggtgacctgcgtggccgtgacctctagctcgtgacacccccattctaaatccttacccactccgaagtcctttcagttttttgtttgaccaggtgcaccaaaaaaaaaaacaacaaatttaaaactacataaatctttattagcttttccagctagtttggtggaaaaagagaaaatttgagaggcaatcaattaaacagtgtcacttgctggccacatttgcaacactatatttacatgacagagacagggagaaaagaaaactaaagggagagccaaaatccagctcctaatgatgatacgccgtatctaaaaaaaaaaatccggaccactttctgc

SEQ ID NO: 37385 - DNA, 819 bp, DROSOPHILA
atgcacaaccattactcctctacttcaggtgaaaccctggagcgtggaaaacgtcaggctaaccagcaaggatatggaatgggtggcagtggaatgggacggcccaatggaatgaataacggaggaaacggtggtaatggaatgggtggtcaatatggaaacggaatgggtggacagaacagaaatggaatgggtggtcagtatgggaacggaatgggtggacagaatggaaatggtatgggtggcaatggaatgagaggaaacggaatgggtccaggtggaatgggcggtcgaggagggaacggcaatggaatgggacaaggaggaatgggtggtaatggaatgggttccggtggtatgggcggaaatggaatgggtggaaacggtatgggtggaaacggtatgggtggaaacggtatgggtggtaatggaatgggtccaggtgggatgggaggaaacggaatgggtggtaatggactgggtccaggtgggatgggaggaaacggaatgggtcctggaggaatgggtggtaatggaatgggaggacagggcggctataacggtcgatggggacaaaacggaatgggtggaccaaatggaatgggaggtcgcaatggaatgggtaggccaaatggaatgggtggaccacccggtgggcaaaatggaatgggtggaccacctggtggtccaaacggaatgggaccaggcaactggcaaggcaataacaattggggaaatggaaataatgggaatggtagtaaccgatatgggggcaatagctacagcactacacctacaacaacaacggatggctggtaa

SEQ ID NO: 37386 - protein, 272 aa, DROSOPHILA
MHNHYSSTSGETLERGKRQANQQGYGMGGSGMGRPNGMNNGGNGGNGMGGQYGNGMGGQNRNGMGGQYGNGMGGQNGNGMGGNGMRGNGMGPGGMGGRGGNGNGMGQGGMGGNGMGSGGMGGNGMGGNGMGGNGMGGNGMGGNGMGPGGMGGNGMGGNGLGPGGMGGNGMGPGGMGGNGMGGQGGYNGRWGQNGMGGPNGMGGRNGMGRPNGMGGPPGGQNGMGGPPGGPNGMGPGNWQGNNNWGNGNNGNGSNRYGGNSYSTTPTTTTDGW

SEQ ID NO: 37387 - DNA, 4515 bp, DROSOPHILA
tttgagtgtaaacatagtgtaaaaaataaaatcaagaacgtggaagaagaagcttttattgggttttcataagactaaggaattaattggtaattatatgattaatcgccgccctccttcttctccttgatggcgtcctgaaatcagagaaacatggatattaaagaaatgtttcgaggacgttttgtgcaggtaatactttgaaacgctcttcgaagagagataattctgctagaagatcggttatggcgttcatgaatgcttcctgcggagaataatcggccgtagtctggatgcggatgacgaacttgtgctccagaggatgcggaaccttgtagccggcaaacagaacattgggatccttcagcagttggctgcaggcaagaatgcaaatttaatgtgtaatcagacgggcttgttggccaacatacttgcggatcatgttgcccagcgtgtgatcctctttgtttatggtgaatatagccgcattggtcactttggtgtccagttccttgatgattctgcagccgcgccataacaaacataaaaacgggttaaaggtggtcattcggagtagtctgttttctttactcactttttctcgccttcatagagcagaaatgactcaaaggtaggtggtgcgttcattttgatgtcttacttttcgttagttactgcaaaacttataaattgtttattaaaatcagcagcacgctcagcaaaattctccggtacagtgttgactaacgcccaagtgcaacacaagctaaagtagctatatctagcaaaaagtagctagaacgcctagctaatttattttagtattttataaatcatttttaatgtgagcatctattaaataaaataaaacttgtactttgaatttgaaaataatttaatttgcttatgttttttggtcattaaataaatagcttaatcacttcttgcaaccaacactggcagccgatacctatcgcatagacaagctgttgtgggccatccctaggtttcggtggttgaattatttgcaaatttttatccaatcgcgccaaacgctgcgcattccgccactttcgagaaactgacacgaagccaagctaaaaatacattattaaacagctgacatgagcgagtcgaatgccacagatggtgtccacgaggttgaggagtccaatccgctggagcagtcgaccattacgatgctagatgtcctggaacaggaaaaggagctggaggacgagtacgccgcagtgctgggcgcctccgatgagaagtcgtgcacttacgccaagggccccatcggccgacaggctctgtactcgtgcctcacttgttgccccgaggcgcgcgaggatctggacaaggccgcaggagtctgcttggcctgctcctatcgctgtcacgagcaccacgaactggtggagctctatactaagcggaatttccgctgcgattgtcccacccagcgtctgggcaagtgctccctgaacccacaagtcgagggcgttcaaccacgtaacgtgggcaatctgtataaccagaacttccaggggctgtactgcaagtgcaagcgaccctatcccgatcccgatcgcaccgttgaggaggttatgctgcagtgcgccatctgcgaggactggttccacttgccgcacatgaaagcgcccggcgccagcgacaagtggctggatgtctgcagcgaaatgatttgcgatggctgcatggatgccaaacccttcctaaaggactacactggattagccctgcagcctgtgctagaagatgcgaaggaggacaagccggaggctgacgatagccagctgaagaacgagttggaccgcagcatctgcgatatcatgaaagttcctgaaggtgaatctcagccagacgaaggcgaacccagccagaagcgcgccaaactggacgattgtcgtcggcccaaaccaaccaaggagcatcagggtgagtaaattaatatagatatacatgcgtatgctcaaaaaaaaaacatatttatgcaaaagcaaccttaatacatgaaaagcaagtcaaagttcttcttgccatcgcccaagtaaaggaaaccatgcttgtgggagttgattttgtgaaagaatgtcatgcccaaccaaaggcacgacttgattattaccaaaccctcgttccgttgcatattcagggcaaaagcctgacacagtggtattacgcagtcaatggtgtccagaaagtcaatagcatagttatagtcgctcctcttggccaaattgactttgagatcattgcggggcaggcgatagagctggtaatatgattggttgtcgatctgcaagtcattcagtccacgaaacatctggttgggtataacacgaccatcggtcatcttgtaaaaggctccgcgtgggcaaatggcacactcctctgttataataaacacaatggctgccagccgttcctcctccttaagcttgaccacttcagggcggctgataccagccacctgattgcctacgatgtcaaaagtggggtcctgtgtgcgtacaatatcagaaaaaccaccaccacatttacgtactatcaactcaccagcttaacgtaggtcatcaggctgggatctcctataaatggctcccttgccaatatagtcgcctgaaatatcttggggctctgtacgaacggcagcaactgccattggaactggtccagactgtagaaatacttgcgatccttgagacagtcattagtgtagccaaaggcaatgtagtaatcgttcttggtggccgtaatgcgaccccaaagatacatgcccgtaaaacgattgtcattttgtaaagcgatcagcgagttttcaatcaagatgcgctgctccggcgacagcttcatgccgcagtacattaggcagtcgaggccctcggtgaagaactccaaattcatgacgaaagtatcttagcaatttatatgtgaagtgttgaaataaaatatggatttaagtgctgagagtatttgaaagaaaactcagaaccgtaaaaaaaaatatgttagcggaatggatttttaattacatggcatgcataaatcagcacaaactctttgaactgccaatttcccccatttattcatctctaccctttctctttcaaggagctgctttctggacaaatgactggcgaaaatcactctgtcagtgctccgaatgcctgtcgctttacaaggaacttgccgtggagtttctgctggatgtcgaggattcggctaagacgtacgaggagcgcggcatgaagcgggctgaagagaattccagttatgagcaaggaatccgggcactggcctccattgaccggacacagcaaatcgatgcgattaccgaatacaatcgcatgaaggacaagctaaaggaatacctgcaggcattcgccgccagcaagaaggtagtgaccgaggaggatatcaatcggttctttgccggcatgcgcaatgagaacaatgccaacctgggtcagccctatttctgtcgctaaacagttagcactctatattactctagtattacccacattcccccatgaaagcgaaacatacatacatacatcatgtaaattctaaagttatattttatttaaacaataatcattttcaattcacttttgtcaataacgaaaagtcgtaacaaggcatcgggcaatgagattcgcatttccctcattaaatttatgtacattgcggtaaaatagaattatataagacaggttttgtgttgaagttcattttggattgagacctttttacatgtagctctaattggttaatttccgatatattttatgaaatatatgtacactagtatttagcaaagtttgttgttcatttgaatggctgaattcccaagctattgagttctgcctcaatgtcctggataagttcgctggtgtcaatgggcgccatgcctatgctgctggaaattagatcactaaacgattgggtgggttcatctgctggaggttgctgctcctgtggctgctgttgctgttggtactgcgactgttctggatgggattgggccagatatggaatggactctggctgcaattgcggcaggaactgctgagtctgttgatatacctgtttaatgccaaaatttccttgtggcggtatgcttatggcactcattttctgacttaaaaagtcattgttattgttattaattagtacattgttgttattattgattggtgtcatagagccaccactgaaatgggtaggactacagccgtttaccggaaagtttgaattctccggcagatacatatggttattcctctgtccgatttgaaacggcggaatgctatccactgtactgcaattggacgaaggcgatgcgaaattcccattaaatgtgaagtttgtggcatctggcaaataaagatgagtttgattttgccccatttgcatcggcggaatactatccactgtactgcagttggatcgaggcgaagcgaaattgcgttccactgatggaca

SEQ ID NO: 37388 - DNA, 1339 bp, DROSOPHILA
ccctaggtttcggtggttgaattatttgcaaatttttatccaatcgcgccaaacgctgcgcattccgccactttcgagaaactgacacgaagccaagctaaaaatacattattaaacagctgacatgagcgagtcgaatgccacagatggtgtccacgaggttgaggagtccaatccgctggagcagtcgaccattacgatgctagatgtcctggaacaggaaaaggagctggaggacgagtacgccgcagtgctgggcgcctccgatgagaagtcgtgcacttacgccaagggccccatcggccgacaggctctgtactcgtgcctcacttgttgccccgaggcgcgcgaggatctggacaaggccgcaggagtctgcttggcctgctcctatcgctgtcacgagcaccacgaactggtggagctctatactaagcggaatttccgctgcgattgtcccacccagcgtctgggcaagtgctccctgaacccacaagtcgagggcgttcaaccacgtaacgtgggcaatctgtataaccagaacttccaggggctgtactgcaagtgcaagcgaccctatcccgatcccgatcgcaccgttgaggaggttatgctgcagtgcgccatctgcgaggactggttccacttgccgcacatgaaagcgcccggcgccagcgacaagtggctggatgtctgcagcgaaatgatttgcgatggctgcatggatgccaaacccttcctaaaggactacactggattagccctgcagcctgtgctagaagatgcgaaggaggacaagccggaggctgacgatagccagctgaagaacgagttggaccgcagcatctgcgatatcatgaaagttcctgaaggtgaatctcagccagacgaaggcgaacccagccagaagcgcgccaaactggacgattgtcgtcggcccaaaccaaccaaggagcatcagggagctgctttctggacaaatgactggcgaaaatcactctgtcagtgctccgaatgcctgtcgctttacaaggaacttgccgtggagtttctgctggatgtcgaggattcggctaagacgtacgaggagcgcggcatgaagcgggctgaagagaattccagttatgagcaaggaatccgggcactggcctccattgaccggacacagcaaatcgatgcgattaccgaatacaatcgcatgaaggacaagctaaaggaatacctgcaggcattcgccgccagcaagaaggtagtgaccgaggaggatatcaatcggttctttgccggcatgcgcaatgagaacaatgccaacctgggtcagccctatttctgtcgctaa

SEQ ID NO: 37389 - protein, 404 aa, DROSOPHILA
MSESNATDGVHEVEESNPLEQSTITMLDVLEQEKELEDEYAAVLGASDEKSCTYAKGPIGRQALYSCLTCCPEAREDLDKAAGVCLACSYRCHEHHELVELYTKRNFRCDCPTQRLGKCSLNPQVEGVQPRNVGNLYNQNFQGLYCKCKRPYPDPDRTVEEVMLQCAICEDWFHLPHMKAPGASDKWLDVCSEMICDGCMDAKPFLKDYTGLALQPVLEDAKEDKPEADDSQLKNELDRSICDIMKVPEGESQPDEGEPSQKRAKLDDCRRPKPTKEHQGAAFWTNDWRKSLCQCSECLSLYKELAVEFLLDVEDSAKTYEERGMKRAEENSSYEQGIRALASIDRTQQIDAITEYNRMKDKLKEYLQAFAASKKVVTEEDINRFFAGMRNENNANLGQPYFCR

SEQ ID NO: 37390 - DNA, 2676 bp, DROSOPHILA
aaattaacccgaattaacgtcaagcggaagtcaaacaaaaggatatagtcgtgcgatccgctcgctgatcggtggcattaacgtctaacttaacccgtgaaaagtcgactggcgactgaacgtgaaaaacttcaattgaagcgctccgatcgcagttacatacatgcatacatacgtacttaagtgtaacatacagacatacacatgtacatgtacttgctatgtatgtatgcttctctgccgacgtcggtgaatgtgaccctttcgagttccactttgaccatggccaacatttgaaagggtatgctcgaccattgggtcggcttaattataaatatgtacgtaggtaacaattataagtgtttgtacaccaacggaatgagaaagagttggataattacagttgccaggcattagttgcaaattccagatgtggaaagtgcatgtctgcaaaataataaatactgactaacaggtttgaattggtaggaatttcaatcatcaacggaaatgttatacaaattttaacttacatgtgtgcataacacattctttaaaaacaataagaatacttacatagtaaatatacatacgtgcaaagggatgaacataggaacatagatatttaaaaaagtgatgtacgaatgtgcatcagatcattggtaagtaccccatttcgtatgagttcaataattgattaaaccaattacaggatatcaacagttggttagcattctccacatccatgtggacaagtttcgcgcttcgctgctcgcttgtgtcagaatgccggctactactatcgccgtcacatggccatagtatttggctattccaaaaccatcgccccaccatcatagtcgtacccataaacagcgaggcttcccagaactccccgatggcttttgttattctagtcttttattgtcgtggcactcgcaatcccggagaggtgtcgttaacaatgcagagatgtacatacgtacatatgcacatgacgtcacacttggcctggggcaccctggaagtcagtctgatcggtctcctcctctgcctgctgcaggagctgaagacactggcgcaccttcagcctggcatgggctatatcgcgctgcatgcgctccttgggtgcccttaaacccgccatcgtggtcggcacattggtgcgcatttcccccaggacattgagtagatcggagtacttgtccactatgttggcgttctcatcgagacctgcaaagtgtggggtcttaaccactactattgttacatttatcaatttgcttacctatagatgtgccaaacagatcggagtcgatgccaaaaccacctcctcctccgtttgccgccgacattatttgcaactgggcctgcatgtacttggtgtactccagtttggccatcacctccttgtactcgttggcgtaggcaagtgcggcgctgtttgtctgctgcctgttgcgcagcatcatcgctgcattcgcagtggagctactgccagcagaagcggctccactcaccctcgttatctccacttgtggcacatgcgtcttgattgctagctcctggttggtgtccattgctggctcctcgtccgccttggggcgcgatggcacggccgtgacggttatgtcgctgtacctggagcggaaggattcaatgtccaggtagtccattttggcgattgaatctctaacgacgatcgatggttgataatgaaagggatttatttgacaggcctacttagtagctaatatttcagtgctgcaaatttcttagggctggaaaaccatttcttctattttgattttcctccctggccaaatctactcgtactcccatttccttaacatgagccccaagcaagtggcatacccaaccctcacttggtttttgcctttgcccccaaagctaaaaacctttctttttgctctttcttttgggctatcgcatgaccaagtgggtaattacgggaagcagaacaaaaaaacacgtttgtaaacagttcattctgctggcgttgtccattcgcccgttcttcccgcgggttccactgcttcagcgaccggaagccgctcaagcgtgcttcccgttctgcgcaggcgcattctccttggtcaccccaattttttgccatgactcatggggtatggcgtattcaaataagagaggtggagatctgatcgtaatggttgttttacttgttttacatgcaaattttgaccagaacattgtccagaatttcggttttaacaatcttcagctgttgtgctaataacaatttagtgttctagactctgcttaatggctagttaattgctgctctggtgctgcgagcgaatgatcgcctccaggctgcgttccgtgtgctctccgcactcgaagcgatggtagtcgacgatctcgcagttgtgctcctgcaaagcctcgcccaccgtcttgtccgcatcgagcagatactcctggtgaatcaggcacgtctcatcgtccttgttctccgccggcttgtccttgtcatattcgccgatctttgtcggcttcatgcccacgatttgctggcaaatgctcttgtgaaactcaaagtccagcagggggtgcgtggatcggtaggctacgatcgctccgtacttgcccacctgggtgatgccttccgtggtgcccacattggtgggtgcg

SEQ ID NO: 37391 - DNA, 621 bp, DROSOPHILA
atggactacctggacattgaatccttccgctccaggtacagcgacataaccgtcacggccgtgccatcgcgccccaaggcggacgaggagccagcaatggacaccaaccaggagctagcaatcaagacgcatgtgccacaagtggagataacgagggtgagtggagccgcttctgctggcagtagctccactgcgaatgcagcgatgatgctgcgcaacaggcagcagacaaacagcgccgcacttgcctacgccaacgagtacaaggaggtgatggccaaactggagtacaccaagtacatgcaggcccagttgcaaataatgtcggcggcaaacggaggaggaggtggttttggcatcgactccgatctgtttggcacatctataggtctcgatgagaacgccaacatagtggacaagtactccgatctactcaatgtcctgggggaaatgcgcaccaatgtgccgaccacgatggcgggtttaagggcacccaaggagcgcatgcagcgcgatatagcccatgccaggctgaaggtgcgccagtgtcttcagctcctgcagcaggcagaggaggagaccgatcagactgacttccagggtgccccaggccaagtgtga

SEQ ID NO: 37392 - protein, 206 aa, DROSOPHILA
MDYLDIESFRSRYSDITVTAVPSRPKADEEPAMDTNQELAIKTHVPQVEITRVSGAASAGSSSTANAAMMLRNRQQTNSAALAYANEYKEVMAKLEYTKYMQAQLQIMSAANGGGGGFGIDSDLFGTSIGLDENANIVDKYSDLLNVLGEMRTNVPTTMAGLRAPKERMQRDIAHARLKVRQCLQLLQQAEEETDQTDFQGAPGQV

SEQ ID NO: 37393 - DNA, 4420 bp, DROSOPHILA
tttctgacccccgacgaacgtacgggtgggataaaggactcccgttctggccagagcaaaagttcggatcccggttcgtcttcgagatccggtccgagttcggcatccagtccgagttcggcttccggtctgtttagaggctcaagattgaactcgactaccgagcgcatttccctagacgtttccttttcttggtctaaatcgtttgttgttgtgtttgtatcgttggttattatactactagtacccaaggaagtggtgggtattacattctcagaaactaattcagtaaccggctttaattcaactgaaggggagtctctagttttcgcttcaccaggagatggggtggttaagctttctaattttaatggagatgaatccagtggttttaaattctcttcttctggttgcttatcgtgcgattcagatgctgatgaaatcctcgtcctcaattccattgtcgacagaattttatgaaatgataccttcggcgagtctatatcagtccctgtaatttcagaaaactctgaagctggcaattcaaatttttcttcctcgtcattatctatcggaagttttgatacatcaacgttagaatttttttcttcctcactgggaagcattactctatagcccctgccgacaaatgatcccaattttgaggcatgcgaaacatcgagagtgcttctaagactgaacaaatcacttggtgtcgtcgttggaagtggcattggattgaatatttgagatcttagaaatatgtcgctgtcagatggtatttcacccgccaggggattatcaaagttttgtaaatttcttgtaatattgtcttctttgcgttttcttaatatgtttaacaactgttttttttcaaattctgatcctggctgtgaggtagcattttcggtatgaaagttttccatctcgcgtatattgtccatgtgatgaatgtaattatgagagacagtagggcagagctcgattagttgtgatggcctcacggctggaggattttcagacttgtcaaatatgcctgcgaacacgtcgtcaaatagatcattatagttttcgttaacaatacgctcattttcttgaagccaacgatcgccaggaactgcctgtcgtatgatctttcttatgatggcatgagcttcgcgccaggaagttttttgtggggtttcactttcgctgtcagtggacatcagatacaaatcgttgtcgattaggcgatctatgagatcactcgttaaagtacatcctatatcaaacggatctagttcattccacacctttgggaaaatcacatcctccaatacgtactgggcgatcagggaattctcgtagcgctgcagaatattgttcatattcggtgaaatcatgtcattcaacattattcgtagtggcacataggtaagggggttttggatcaacttaaagctctctagccatcgcaatatatccgcatcgatctttttggccaattcactcactgtctcgccagcaaggccatcggccatgccgtacatatcagagctcagaatgttggcaaaatacttattggagatctcattgttgaccacattgcaatgttggaaaagctcctcgtacaacaatctcaattcgttctccttctgtcgcagaccggcttcggcggcctcgcgtctccagcgttccttttgggccataatcgagaagaagtgaagccttcgcagctccgaaagtcgggtcatctcctccgagaggaactgcatcacccaacccacgtaggtgccctcataaatgttcaacatgtgctccatttcttcgcgcttcctgtcgttcttcaaatgcgatagtgtggtctctgagactttgttcgtccccggctttgcgtgtggtgaaaaggatccgtaagctcgcgatttacgatattcctcatcagaatcgctcctttcgtacaagtcagttagataggccagggttatttgggatgccgctctacccaattcgggttttcttcgccgtactagacattttggttcttctctctccgcattggcctgtgttcttaggcctttcagagattcgaagagcttttgtagattgtcttccttgcagaagttccgctcatattccttgtcatactttttgggcttggaccaatccttaagctttctaaacggacatttgaagtcggtattgttgattcgcttctctaagtcatcgattctcatatcgaaggctttttgtgctgttttggacacaaagttgcgacgcgccggatccacgccgtatcttaaaagcggagcgtagaactccgagctgggtgatcccaacgcgtacatgggactttgcttctcccaccttcgcggattcttcgtaagttggaactccattcggcgcattccccgttggaactcgatctcgttttttcgcaaacccgcctgacgtcgcttctcgattcgctcgcaggctgtttcgattcgagtctttgaagcggtgtgcatctccttctcccgcttatcaaacattttaatcacgatctggagacgcatcatctggcactcttgaatgtcctcctcacgctgtatccactgctcccattcaatggcctccaaaatctccttgagctctgtttttatcgccactttcctggcgtcttgaagtaggtttttgaagtgaatctttagggcatcactaaaggcccatcgtttcctggcgcgttccagaatctcaacttcatggagtcccggtcgatttgctactgggaatatagatggcagggaaaacagttccaaggtttcaacgctgtttgcttcaaaaatctccggcaaataagccattgtctgcgcagaggattctctaacaaatacgtatagttatattaaattataaattagtatttagttcacttggagtttacctgtaaagcgtctgcgtgatcttattcttaaacggtcgtgcgtccttgttcttagcaaagaaatcacatttgtgccttaaatcctttttcgtcactaccctggggctcatcttgacctcatgggtgttcactgtagtatcttgttcggtaagaaatcggtatcccggagctttgaactgacactcgctgtcggtgcgaggcaattttccaacattgcgctgtgctgggtcattctcacctagaaaaaggatcatcaaattattgaaagtaatacttgtgttataccttttcaatccaatttcaatttcttaacattaaatacctcctgtgatccgcagatctaccgagctgttgatcagacaagatgataggccacgttcagtaagattttcagatttggaagtgctctttttccgtttgatattatcctctttttgtctcggtgattgtaacctgtcctcctgaagaatcctaaacttaacatgcctatcgagtcgtgtattgtgtttggacattgtgtttttttttatatttttatattttgtataagtgtagtttttatgtgggttttgatgagtattgtgtcagcaaatgggtttcatatttaattaattttgaattctaatttcagtgggctactaagttaacttattcatattaagtattagtatgattgtttattaaatacttgtgtattattaaaaaattaacttttcaccaacaggtttggttgtaatgtctcctgctgttgaggccgtttacaagtccgtcctaatagccaaaatacctgcaatgtgggctggaaaatcgtacccaagtctaaagccattgggcagttatgtgaccgattttttgcgccgccttgagtttttgcaggtaagtgatatggaaagtacgcagcaatacaaaataaaaaaacatgtttttaacttttattgtagcactggtttgatcatggagctccttccaccttttggctatctggattttttttcactcaggcctttttaaccggtgcccagcagaactatgcgcgaaagtatgtcatatccatagatcttctggccttcgattacgaagttctcacggtggaagagccgcaaaggcagggattatcgggacccgaggatggcgtctttgtgtatggcattttcctagagggtgcacgatgggatcgcactggaaagtatctagccgagtcccggccaagggaactgtttgatacgatgccattgatttggctaaaaccgctcaagcgcgtcgatctgccggagcgtcataactatctgtgtcccatgtacaagactgccgaacgtcgaggagtattgtccaccactggtcatagtaccaactttgtggtggccatgttgctactctgcaatccgaatactccagtctcacattggattattcgcggcacggctttgttgtgccagctgagtttctagggattgtacattactttcgattgaactaaatatattttttaaggtctgcttgaggctcattaagtaa

SEQ ID NO: 37394 - DNA, 2004 bp, DROSOPHILA
atgtccaaacacaatacacgactcgataggcatgttaagtttaggattcttcaggaggacaggttacaatcaccgagacaaaaagaggataatatcaaacggaaaaagagcacttccaaatctgaaaatcttactgaacgtggcctatcatcttgtctgatcaacagctcggtagatctgcggatcacaggaggtgagaatgacccagcacagcgcaatgttggaaaattgcctcgcaccgacagcgagtgtcagttcaaagctccgggataccgatttcttaccgaacaagatactacagtgaacacccatgaggtcaagatgagccccagggtagtgacgaaaaaggatttaaggcacaaatgtgatttctttgctaagaacaaggacgcacgaccgtttaagaataagatcacgcagacgctttacagagaatcctctgcgcagacaatggcttatttgccggagatttttgaagcaaacagcgttgaaaccttggaactgttttccctgccatctatattcccagtagcaaatcgaccgggactccatgaagttgagattctggaacgcgccaggaaacgatgggcctttagtgatgccctaaagattcacttcaaaaacctacttcaagacgccaggaaagtggcgataaaaacagagctcaaggagattttggaggccattgaatgggagcagtggatacagcgtgaggaggacattcaagagtgccagatgatgcgtctccagatcgtgattaaaatgtttgataagcgggagaaggagatgcacaccgcttcaaagactcgaatcgaaacagcctgcgagcgaatcgagaagcgacgtcaggcgggtttgcgaaaaaacgagatcgagttccaacggggaatgcgccgaatggagttccaacttacgaagaatccgcgaaggtgggagaagcaaagtcccatgtacgcgttgggatcacccagctcggagttctacgctccgcttttaagatacggcgtggatccggcgcgtcgcaactttgtgtccaaaacagcacaaaaagccttcgatatgagaatcgatgacttagagaagcgaatcaacaataccgacttcaaatgtccgtttagaaagcttaaggattggtccaagcccaaaaagtatgacaaggaatatgagcggaacttctgcaaggaagacaatctacaaaagctcttcgaatctctgaaaggcctaagaacacaggccaatgcggagagagaagaaccaaaatgtctagtacggcgaagaaaacccgaattgggtagagcggcatcccaaataaccctggcctatctaactgacttgtacgaaaggagcgattctgatgaggaatatcgtaaatcgcgagcttacggatccttttcaccacacgcaaagccggggacgaacaaagtctcagagaccacactatcgcatttgaagaacgacaggaagcgcgaagaaatggagcacatgttgaacatttatgagggcacctacgtgggttgggtgatgcagttcctctcggaggagatgacccgactttcggagctgcgaaggcttcacttcttctcgattatggcccaaaaggaacgctggagacgcgaggccgccgaagccggtctgcgacagaaggagaacgaattgagattgttgtacgaggagcttttccaacattgcaatgtggtcaacaatgagatctccaataagtattttgccaacattctgagctctgatatgtacggcatggccgatggccttgctggcgagacagtgagtgaattggccaaaaagatcgatgcggatatattgcgatggctagagagctttaagttgatccaaaacccccttacctatgtgccactacgaataatgttgaatgacatgatttcaccgaatatgaacaatattctgcagcgctacgagaattccctgatcgcccagtacgtattggaggatgcatatttgacaagtctgaaaatcctccagccgtga

SEQ ID NO: 37395 - protein, 667 aa, DROSOPHILA
MSKHNTRLDRHVKFRILQEDRLQSPRQKEDNIKRKKSTSKSENLTERGLSSCLINSSVDLRITGGENDPAQRNVGKLPRTDSECQFKAPGYRFLTEQDTTVNTHEVKMSPRVVTKKDLRHKCDFFAKNKDARPFKNKITQTLYRESSAQTMAYLPEIFEANSVETLELFSLPSIFPVANRPGLHEVEILERARKRWAFSDALKIHFKNLLQDARKVAIKTELKEILEAIEWEQWIQREEDIQECQMMRLQIVIKMFDKREKEMHTASKTRIETACERIEKRRQAGLRKNEIEFQRGMRRMEFQLTKNPRRWEKQSPMYALGSPSSEFYAPLLRYGVDPARRNFVSKTAQKAFDMRIDDLEKRINNTDFKCPFRKLKDWSKPKKYDKEYERNFCKEDNLQKLFESLKGLRTQANAEREEPKCLVRRRKPELGRAASQITLAYLTDLYERSDSDEEYRKSRAYGSFSPHAKPGTNKVSETTLSHLKNDRKREEMEHMLNIYEGTYVGWVMQFLSEEMTRLSELRRLHFFSIMAQKERWRREAAEAGLRQKENELRLLYEELFQHCNVVNNEISNKYFANILSSDMYGMADGLAGETVSELAKKIDADILRWLESFKLIQNPLTYVPLRIMLNDMISPNMNNILQRYENSLIAQYVLEDAYLTSLKILQP

SEQ ID NO: 37396 - DNA, 5293 bp, DROSOPHILA
tattaaaaaattaacttttcaccaacaggtttggttgtaatgtctcctgctgttgaggccgtttacaagtccgtcctaatagccaaaatacctgcaatgtgggctggaaaatcgtacccaagtctaaagccattgggcagttatgtgaccgattttttgcgccgccttgagtttttgcaggtaagtgatatggaaagtacgcagcaatacaaaataaaaaaacatgtttttaacttttattgtagcactggtttgatcatggagctccttccaccttttggctatctggattttttttcactcaggcctttttaaccggtgcccagcagaactatgcgcgaaagtatgtcatatccatagatcttctggccttcgattacgaagttctcacggtggaagagccgcaaaggcagggattatcgggacccgaggatggcgtctttgtgtatggcattttcctagagggtgcacgatgggatcgcactggaaagtatctagccgagtcccggccaagggaactgtttgatacgatgccattgatttggctaaaaccgctcaagcgcgtcgatctgccggagcgtcataactatctgtgtcccatgtacaagactgccgaacgtcgaggagtattgtccaccactggtcatagtaccaactttgtggtggccatgttgctactctgcaatccgaatactccagtctcacattggattattcgcggcacggctttgttgtgccagctgagtttctagggattgtacattactttcgattgaactaaatatattttttaaggtctgcttgaggctcattaagtaagaaatattttgaagaggtgtcacttgaaaatcacttccccaaaaacatgcgagctaaataaatatattttaccactattattatttggtattattttcaataataatttttttttatgtatgcgtatgaaagtaacgaaaagctccgttgcccaggaaattgaaagatggaatttgaaaatttatctgaatttaaagacctgcgattctttggtggagtaaaccacgacctcttcggccatatcggtatgctcttcctcaaattcttcgccaattatggattctaagtcgtcagattcccttcccgaattttcagatacattctcttgttctggttctgcatcttcaactttttcctggtctacgttgatgaattcattgaaattgtccgatctaacttcttcgtctttactttcaaaggcctcctcttcggctgaaggcgaacgctgaataatcgaggaacctcgcagatcttttagattattgtcgtactcggtaatatcaacagtacttatgatggaacataattcaggctctggcaccggagacacactgttaaggagttccgcattttggagcacttcgtttttgatatagtcgtcaaataattcgtattcatttgcagacatcttcactttctccccagttctctccaactttttggttatcttatcttctttaatttttttaatgagcgataggaattgcattcgtagaatattagcattctccaatgactccgattgggacgactccaacttttccaaaggaactctacttggaatctcgtgagggaggaaggcatacgatttacttgcacaaaggtgcaaaagttcggtgccccgaactggttccggattttcgatgccaaataggatctgggcaaacacatcgtcaaacaggctgctaaaggtttcggtgacaatcctctcgttttcctccttccagcgtctacccggaacagcttggcgaatgagctttcgtatgatggcatgggactctgtccaggaggctccatgtccagaatcgctttcgctgtccgatgagaacaaaaacagatcgttgtcaataaggcgatcgatcagatcactggtcaaagtgctggcaatatcgaatggctcgagttcctgccacaaattgtagaagatcacgtcctctacaatgtactggacaatcagggatgtctcgtagcgccgtagcgtagcgcccatatccggtgagaccatgtcctgcagcatgagacgaagtggggtgaaattgagtggattctggatcagtttgaaggactccagccacctctctatgtccgcatcgatttgcttagccagctcggtaatagtttcggctgtctcctcctccaccatgttgcccacatcggtggtcaatatggtgtcggcatatttctcagcaatctcactgtgcactgaatttgtaaactgaaacatctcctcgtagagcattctcatgcagttctccttctgcctcaatcccgcttccgctgcttcacggcgccagcgctccttttgtgccaggatgcaaaagaagtgcagcttgcgctgctccttcaatcgttgcatttcatctgccaggaactgcatcattgtgccaacataactgccttcgtatgagcatatcagtgtctccaaatattcgcgcctaatgacagagcccctaactaacttctcagctctttgtggggccatttttttgattgttgtcttggtgctacgtaatccctcggaaagttccacaaagcgtgatttgcgagcttgccaattgtagttgcgatatgaatcggtggaactggaactagatgtgcgatgctcaattcgcaatcgtgtcttcaggcactgcggtggctcctttgccatgtcggcctgcgttctcaatgtcttcaaggactcgtacagcctttggagattgccatcattgcagaagttgcgttcatactctctatcgtactccttgggcttggaccactccttcagcttgctgaaggggcactgcacattgcgcatgttcacccgcttttccagttcatcgatcctcatgtcgaatgctttgcgtccagtgttggattcaaagcatcttcgggctggatcaacaccataccttatcagtgggccgtagaactcggagcacggtgatccaagtgcctgcatggggctctgtttctcccactttcgagcggttttagccaactgaatgttgttgcgtcgcattccccgctggtattcaatttcgttcttgcgcagaccatcctgccgacgcttttctatttgctgtacggacttttcaattcgagccttggaggcgttgtgcatttccttctctcttttgtcaaacatcttgatcacgatttccaggcgcatcatctggcactgctgtatgtcctcctcgcgctgtatccactgctcccattcgaaggcttccagaatctccttgtactgcgttttgatagacacttccctcgcctcacaaagaagtcgtttaaagttatccttcagtgccttactgaatttccatcgtcgacgggcccgctccaaaaactccacctcatgcaatcccggtggcttgtcgcctggcagcaatttggccagtgtataaagctcaaaagtttccgacttgtccttgttcagtatttcaggtaaaaaggccaaagtctgcgcagaagattccctaaatacgacaagttgatattatatgggttcagtgatctttcctttctttgtgctacctatagagggtttgtgtcgcctcatccttgaatggtcgattgtccacatatttcggaaagaagtcgcacttgttcttcaactcctttcttataggctttgcgttcagcttgacttcctgagtggtaaaatccgaatggggtttctgcagaaaaaagattccgggctcgttgaacttgcactcgctgtcggttcgtggtaatttgccaacatctcgcgccgctggattatttgtacctggacattttttaaatataatcgtttttactaaaaaaaaggcaatcttattcaggataaacccaccagccgataatcgagagtcttggcattttgtgcatgacgtcttcaaatggcttttgctgtcggttcgatggagtttttccgccgtaatctctgttgggttgttggctcctggaaaaacggatgtctaataaacgaccactttatatccgggtgtacccaccgctggctaatcgggtatccgaggacctggtgatcaaacaggacgttaggccctgaccaatattctgctcgttatccttgtttctggtcgactccccaatactcctctgtttgccatgggtaaatgtgacacgttttttttgctttaaagtgtcctcttttttaaccgtaggtggctttagtactgtcgtcgaactaatgggcatgagctccctattttcgcgtatgaactgtagtattctttccctgcgcaatcgtttttcctttgccgagggcatttttaccttatgttgtgtttgaatatctctttaatatctttttgtatttttttttttgtgtgcctagggtttttgttagaagagtgcttagttttttagttatataagtagcttactatgttaaactaaccagcttgtccttatgcccgagccctattggattgtcggtaagtcggtcaatctggagcaaatattattcgccaggcaaccaatttgctgctagggagccactttgtttgttggccaatcgataggcggctcataagaactagttgtaaaatcggaaatcaaatcaaatcgcaatctataagatgtacatatggcccgatatttattaaaaatatacataacgtagatggttgtaagacaaattacaaaaaaatatgagcctatcttattataagctaaagttccttattttcctttgtttttcttctgtaaaattctgaatattttcatgatatccattagttattcctgggatgaactttgactcttacaatctggtaaccatggccaaggatcgtcttcggcgtcggaatctgttccaataaacttcgatgccaaagaattttgtggacttcctttgtagatttcatctgagaagaaacccttaactgtgctactactattttttctttcaaggcttaacaattgtcttttaattatcttcgtactgggatcgtaactgaaatcagattcagtttgtggtagttgttgccaaacacctttttccaatcgaaaattggcgctgctggtaaggttttcatgcgaatatgctcgatgcaccacaactggctcaattcttgatggcgcttcaaatttttgcaaaatttcatcaaatacactgtccagcagatcaatatagttttcataaactattcgttcggcttcttccttccaacgtctgccaggcaccgattgtcgaataagttttcgaattatggcatgagcttcgtaccagccagttttctgtggcgtttcgctttcactatccgat

SEQ ID NO: 37397 - DNA, 3009 bp, DROSOPHILA
atgccctcggcaaaggaaaaacgattgcgcagggaaagaatactacagttcatacgcgaaaatagggagctcatgcccattagttcgacgacagtactaaagccacctacggttaaaaaagaggacactttaaagcaaaaaaaacgtgtcacatttacccatggcaaacagaggagtattggggagtcgaccagaaacaaggataacgagcagaatattggtcagggcctaacgtcctgtttgatcaccaggtcctcggatacccgattagccagcggtacaaataatccagcggcgcgagatgttggcaaattaccacgaaccgacagcgagtgcaagttcaacgagcccggaatcttttttctgcagaaaccccattcggattttaccactcaggaagtcaagctgaacgcaaagcctataagaaaggagttgaagaacaagtgcgacttctttccgaaatatgtggacaatcgaccattcaaggatgaggcgacacaaaccctctatagggaatcttctgcgcagactttggcctttttacctgaaatactgaacaaggacaagtcggaaacttttgagctttatacactggccaaattgctgccaggcgacaagccaccgggattgcatgaggtggagtttttggagcgggcccgtcgacgatggaaattcagtaaggcactgaaggataactttaaacgacttctttgtgaggcgagggaagtgtctatcaaaacgcagtacaaggagattctggaagccttcgaatgggagcagtggatacagcgcgaggaggacatacagcagtgccagatgatgcgcctggaaatcgtgatcaagatgtttgacaaaagagagaaggaaatgcacaacgcctccaaggctcgaattgaaaagtccgtacagcaaatagaaaagcgtcggcaggatggtctgcgcaagaacgaaattgaataccagcggggaatgcgacgcaacaacattcagttggctaaaaccgctcgaaagtgggagaaacagagccccatgcaggcacttggatcaccgtgctccgagttctacggcccactgataaggtatggtgttgatccagcccgaagatgctttgaatccaacactggacgcaaagcattcgacatgaggatcgatgaactggaaaagcgggtgaacatgcgcaatgtgcagtgccccttcagcaagctgaaggagtggtccaagcccaaggagtacgatagagagtatgaacgcaacttctgcaatgatggcaatctccaaaggctgtacgagtccttgaagacattgagaacgcaggccgacatggcaaaggagccaccgcagtgcctgaagacacgattgcgaattgagcatcgcacatctagttccagttccaccgattcatatcgcaactacaattggcaagctcgcaaatcacgctttgtggaactttccgagggattacgtagcaccaagacaacaatcaaaaaaatggccccacaaagagctgagaagttagttaggggctctgtcattaggcgcgaatatttggagacactgatatgctcatacgaaggcagttatgttggcacaatgatgcagttcctggcagatgaaatgcaacgattgaaggagcagcgcaagctgcacttcttttgcatcctggcacaaaaggagcgctggcgccgtgaagcagcggaagcgggattgaggcagaaggagaactgcatgagaatgctctacgaggagatgtttcagtttacaaattcagtgcacagtgagattgctgagaaatatgccgacaccatattgaccaccgatgtgggcaacatggtggaggaggagacagccgaaactattaccgagctggctaagcaaatcgatgcggacatagagaggtggctggagtccttcaaactgatccagaatccactcaatttcaccccacttcgtctcatgctgcaggacatggtctcaccggatatgggcgctacgctacggcgctacgagacatccctgattgtccagtacattgtagaggacgtgatcttctacaatttgtggcaggaactcgagccattcgatattgccagcactttgaccagtgatctgatcgatcgccttattgacaacgatctgtttttgttctcatcggacagcgaaagcgattctggacatggagcctcctggacagagtcccatgccatcatacgaaagctcattcgccaagctgttccgggtagacgctggaaggaggaaaacgagaggattgtcaccgaaacctttagcagcctgtttgacgatgtgtttgcccagatcctatttggcatcgaaaatccggaaccagttcggggcaccgaacttttgcacctttgtgcaagtaaatcgtatgccttcctccctcacgagattccaagtagagttcctttggaaaagttggagtcgtcccaatcggagtcattggagaatgctaatattctacgaatgcaattcctatcgctcattaaaaaaattaaagaagataagataaccaaaaagttggagagaactggggagaaagtgaagatgtctgcaaatgaatacgaattatttgacgactatatcaaaaacgaagtgctccaaaatgcggaactccttaacagtgtgtctccggtgccagagcctgaattatgttccatcataagtactgttgatattaccgagtacgacaataatctaaaagatctgcgaggttcctcgattattcagcgttcgccttcagccgaagaggaggcctttgaaagtaaagacgaagaagttagatcggacaatttcaatgaattcatcaacgtagaccaggaaaaagttgaagatgcagaaccagaacaagagaatgtatctgaaaattcgggaagggaatctgacgacttagaatccataattggcgaagaatttgaggaagagcataccgatatggccgaagaggtcgtggtttactccaccaaagaatcgcaggtctttaaattcagataa

SEQ ID NO: 37398 - protein, 1002 aa, DROSOPHILA
MPSAKEKRLRRERILQFIRENRELMPISSTTVLKPPTVKKEDTLKQKKRVTFTHGKQRSIGESTRNKDNEQNIGQGLTSCLITRSSDTRLASGTNNPAARDVGKLPRTDSECKFNEPGIFFLQKPHSDFTTQEVKLNAKPIRKELKNKCDFFPKYVDNRPFKDEATQTLYRESSAQTLAFLPEILNKDKSETFELYTLAKLLPGDKPPGLHEVEFLERARRRWKFSKALKDNFKRLLCEAREVSIKTQYKEILEAFEWEQWIQREEDIQQCQMMRLEIVIKMFDKREKEMHNASKARIEKSVQQIEKRRQDGLRKNEIEYQRGMRRNNIQLAKTARKWEKQSPMQALGSPCSEFYGPLIRYGVDPARRCFESNTGRKAFDMRIDELEKRVNMRNVQCPFSKLKEWSKPKEYDREYERNFCNDGNLQRLYESLKTLRTQADMAKEPPQCLKTRLRIEHRTSSSSSTDSYRNYNWQARKSRFVELSEGLRSTKTTIKKMAPQRAEKLVRGSVIRREYLETLICSYEGSYVGTMMQFLADEMQRLKEQRKLHFFCILAQKERWRREAAEAGLRQKENCMRMLYEEMFQFTNSVHSEIAEKYADTILTTDVGNMVEEETAETITELAKQIDADIERWLESFKLIQNPLNFTPLRLMLQDMVSPDMGATLRRYETSLIVQYIVEDVIFYNLWQELEPFDIASTLTSDLIDRLIDNDLFLFSSDSESDSGHGASWTESHAIIRKLIRQAVPGRRWKEENERIVTETFSSLFDDVFAQILFGIENPEPVRGTELLHLCASKSYAFLPHEIPSRVPLEKLESSQSESLENANILRMQFLSLIKKIKEDKITKKLERTGEKVKMSANEYELFDDYIKNEVLQNAELLNSVSPVPEPELCSIISTVDITEYDNNLKDLRGSSIIQRSPSAEEEAFESKDEEVRSDNFNEFINVDQEKVEDAEPEQENVSENSGRESDDLESIIGEEFEEEHTDMAEEVVVYSTKESQVFKFR

SEQ ID NO: 37399 - DNA, 2837 bp, DROSOPHILA
cttgtttctggtcgactccccaatactcctctgtttgccatgggtaaatgtgacacgttttttttgctttaaagtgtcctcttttttaaccgtaggtggctttagtactgtcgtcgaactaatgggcatgagctccctattttcgcgtatgaactgtagtattctttccctgcgcaatcgtttttcctttgccgagggcatttttaccttatgttgtgtttgaatatctctttaatatctttttgtatttttttttttgtgtgcctagggtttttgttagaagagtgcttagttttttagttatataagtagcttactatgttaaactaaccagcttgtccttatgcccgagccctattggattgtcggtaagtcggtcaatctggagcaaatattattcgccaggcaaccaatttgctgctagggagccactttgtttgttggccaatcgataggcggctcataagaactagttgtaaaatcggaaatcaaatcaaatcgcaatctataagatgtacatatggcccgatatttattaaaaatatacataacgtagatggttgtaagacaaattacaaaaaaatatgagcctatcttattataagctaaagttccttattttcctttgtttttcttctgtaaaattctgaatattttcatgatatccattagttattcctgggatgaactttgactcttacaatctggtaaccatggccaaggatcgtcttcggcgtcggaatctgttccaataaacttcgatgccaaagaattttgtggacttcctttgtagatttcatctgagaagaaacccttaactgtgctactactattttttctttcaaggcttaacaattgtcttttaattatcttcgtactgggatcgtaactgaaatcagattcagtttgtggtagttgttgccaaacacctttttccaatcgaaaattggcgctgctggtaaggttttcatgcgaatatgctcgatgcaccacaactggctcaattcttgatggcgcttcaaatttttgcaaaatttcatcaaatacactgtccagcagatcaatatagttttcataaactattcgttcggcttcttccttccaacgtctgccaggcaccgattgtcgaataagttttcgaattatggcatgagcttcgtaccagccagttttctgtggcgtttcgctttcactatccgatgagaacaaatacagatcgttgtcgatgagtcgatcgataagatcgctagtcagtgtgctggatatatcaaagggttcgagtgccttccaaattccatcaaagaccacatcttccactatgtactgcacaatcatggtagcctcataacgctgcagagcagcattcagatccggacagaccatgtcgtgcagcatcaatcgaagtggaatatagttgaggggattttgtatcagcttgaaactctcgagccatcgttcgatgtccatatcaatttgcttggccatttccgtgaccgcttccgccgcctcgttggcagccatataacccagatcgtcggtcagaatgctgtgcacatactgatcactgacatcggtgctaaccgcatttgtatactggaacatctcctcgtagagcagcctaatgctgttctccttctgcctcaggcccgcctcggctgcttcaagttgccagcgttttttactcgccaatagggagaagaagtgcagacggcgttgctccttcaggcgattcatttcgtcggtgaggaactgcatcatgtaaccaatcatactgccttcgtaggccaaaatcatgcttttcaggtcgtttttctgcacatccctggcaagtttttgggcgtactcggaacttagctgatttttctgttcttgaacagctttctgttgtgtgggtcttgacgttgatcgtgcggtgtacgcatttctctcatagagattggtatagcttttaggttgtaccagtgacatcctggaccgtaggtttggtgtatgtttaaatagtaatttaagacaatcgggcttgggctgctgccctccatcggtgactcttagtgtcctcagcaaatggtagagctcatccagatgctcctcattgcagaaacgattctctatttcagcgatccgttgcttgggctgcgaccattgcttcaatttggcgaatggacactcaattatttgcatattaatttgcttttcaagctcgtcgattctcatgttaaatgcgcgtgtattagtgaccgagttgaagtttcgacggtttggatccactccgtatctcatgggtggcgcatagaaatcggagcaaggcgatcccagggagtacatgggtttctgcttctgccactttatcgaggtcttggccaactgtttgctaatgcggcgcataccacgctgatactcgatttcattcttacgcaatgcctcctttcgccgcttctcgatcagttcgcatccttgttcaatacgcgtcttggaggcggcatgcatttccctctccctcttatcgaacatcttgatcacgatctctagccgcatcatctggcactcctggatcctctcctctcgctccatccagtgctcccattcgaaagcttccgtcatggtcttgtactgattaaagtcaagcttctggccatgacgtcgttgctggttaatcttcaacttcagtgcatccaagaatttatgacgcctacgagcccgctcgaaaacttccacttcgtacagacccggaggcttatcgcccggcagaaccgagggcagtatgaacagttctagggtacgggcttcatcatcatcatagatttctggcaaataggccaaggtctgcgccgaggatt

SEQ ID NO: 37400 - DNA, 1455 bp, DROSOPHILA
atgacggaagctttcgaatgggagcactggatggagcgagaggagaggatccaggagtgccagatgatgcggctagagatcgtgatcaagatgttcgataagagggagagggaaatgcatgccgcctccaagacgcgtattgaacaaggatgcgaactgatcgagaagcggcgaaaggaggcattgcgtaagaatgaaatcgagtatcagcgtggtatgcgccgcattagcaaacagttggccaagacctcgataaagtggcagaagcagaaacccatgtactccctgggatcgccttgctccgatttctatgcgccacccatgagatacggagtggatccaaaccgtcgaaacttcaactcggtcactaatacacgcgcatttaacatgagaatcgacgagcttgaaaagcaaattaatatgcaaataattgagtgtccattcgccaaattgaagcaatggtcgcagcccaagcaacggatcgctgaaatagagaatcgtttctgcaatgaggagcatctggatgagctctaccatttgctgaggacactaagagtcaccgatggagggcagcagcccaagcccgattgtcttaaattactatttaaacatacaccaaacctacggtccaggatgtcactggtacaacctaaaagctataccaatctctatgagagaaatgcgtacaccgcacgatcaacgtcaagacccacacaacagaaagctgttcaagaacagaaaaatcagctaagttccgagtacgcccaaaaacttgccagggatgtgcagaaaaacgacctgaaaagcatgattttggcctacgaaggcagtatgattggttacatgatgcagttcctcaccgacgaaatgaatcgcctgaaggagcaacgccgtctgcacttcttctccctattggcgagtaaaaaacgctggcaacttgaagcagccgaggcgggcctgaggcagaaggagaacagcattaggctgctctacgaggagatgttccagtatacaaatgcggttagcaccgatgtcagtgatcagtatgtgcacagcattctgaccgacgatctgggttatatggctgccaacgaggcggcggaagcggtcacggaaatggccaagcaaattgatatggacatcgaacgatggctcgagagtttcaagctgatacaaaatcccctcaactatattccacttcgattgatgctgcacgacatggtctgtccggatctgaatgctgctctgcagcgttatgaggctaccatgattgtgcagtacatagtggaagatgtggtctttgatggaatttggaaggcactcgaaccctttgatatatccagcacactgactagcgatcttatcgatcgactcatcgacaacgatctgtatttgttctcatcggatagtgaaagcgaaacgccacagaaaactggctgcgccatcaagaattga

SEQ ID NO: 37401 - protein, 484 aa, DROSOPHILA
MTEAFEWEHWMEREERIQECQMMRLEIVIKMFDKREREMHAASKTRIEQGCELIEKRRKEALRKNEIEYQRGMRRISKQLAKTSIKWQKQKPMYSLGSPCSDFYAPPMRYGVDPNRRNFNSVTNTRAFNMRIDELEKQINMQIIECPFAKLKQWSQPKQRIAEIENRFCNEEHLDELYHLLRTLRVTDGGQQPKPDCLKLLFKHTPNLRSRMSLVQPKSYTNLYERNAYTARSTSRPTQQKAVQEQKNQLSSEYAQKLARDVQKNDLKSMILAYEGSMIGYMMQFLTDEMNRLKEQRRLHFFSLLASKKRWQLEAAEAGLRQKENSIRLLYEEMFQYTNAVSTDVSDQYVHSILTDDLGYMAANEAAEAVTEMAKQIDMDIERWLESFKLIQNPLNYIPLRLMLHDMVCPDLNAALQRYEATMIVQYIVEDVVFDGIWKALEPFDISSTLTSDLIDRLIDNDLYLFSSDSESETPQKTGCAIKN

SEQ ID NO: 37402 - DNA, 2213 bp, DROSOPHILA
gagatgcaatgaagccgaaatgcagcactcaacttgagctcctgtcgctccttcaaagatccctgcaacgaggcgaaaatcttaactggcaactcccccggcgaaaatgagcaggaaatgtgcaaagggggtggggggtggggttcgaaggtccttcggtgcctcctgcaattttcatttgcatcttctggcgctgccataactgccgcctgtacgcagttacacatcacactttagttccgccaagtggattttcctccggcgcagagtttgtcttttcattagtttcggggtttattgttatctttggtgcctgcctagaaacgaaattcacttggctgcagattttgcagattaaccaaaaaatgagcgggataatgaagcctgacctttcggtggtcttttgtcttttacattaactttaattttactttagatttgggcttaaagggctattttaagctatgactgctttgtttgctgaattaaaatgaataatacaattcaagatcttgcaagtgtgttggtttattattgtaatatttactaggtattatttaacacattttttatagtcctcgtccttggtcgactgccttcgttgtgccgcaaattggttagcatccgccgatgtgattccttgtgcggatccctcagtttgagggcgaaacaaactggggtgagaatgtcgtccacatggggaaccttcgatgcactgggcatccgccttagtccagtccatacactttgacgggccgtggaatcatcggttggttgcggagcaatagcaacctcaaaggatccatcttcgggcgggcctttgtcgttgatccttagctggagcttaacccttggctgaatggccctcagagcctccgccagcgaagaatggaggtgcagggctcgcttgcgataagtttgacgataacggcagtggtcaatgtagagcaccggctggagtggatccagtggccttttgtcgggcatctctgggaggcagatggacacaggtaaacaggtggaaatcttgggcggaccacagaccacggacttcagcgagcagcaggcatggcaggatgtgggagacaatcccggtcgaggagctgaatctggggttcagaggtttgacacaattctcctgggcagcttcaagcctccagcttatcggcgaccagataacctggccgatggaggatatggggcgccctcataaatcaaataaaagagcgtatctgacaaataaatcttcgaggacgaagcaggctcgcaaaaagaacatgcaaatgcgcatgaaatatgcaaaagccgcaagccttaaaataaatacaaaaattaaatcaaccaacagagctatacagtggtctttagatagaggtaacaagacacgaaatgagatatacaaagtacataagagttatttccgatcaaaagtgaaagctatattcatacagaatgacaaaaagtgggcattcatctatgtacgagtatcatgcaatttgcgagaatgtgtttcaagagaaagtgcattctatggcaaatgcaatgtgatgagtaattaatttgaaaagtggacaaaaaatccgtaattttctagtaattactgtacgtctagtatattgtccagtttttgctgacattttgacctgcggcgacgtgaaaaaaagaaaataaagaagattttttctgcaaaatttaccaggctaaagagtaaagagcagagcatgccaaacgcacaggcacggccaaatagaatacagcgcacaaaaaggaagccaaatgaaaaaaggaaaatgtatattttaataaaccgaacacaaagcagcgtaggaaaagtcgagcgcctcatttcccagcaccacccactgagccacagccaccgagtgtcgagccagcggcaaggttagccagttcattcattcggtcttattcacagttattgaaagtagagcagcgccgctgcttctcgaataatatggaaataaataaatgtaagtcccggccacatgataataaccaagggttagaggtcggaacgtgagccaccgacccacagccgatgacagttgacagacgacgaacacgacgactacgacttgaatccaaattcgaatcccgccgcaaatccctgggaaaatatattcaccatgtcttggggtttggggtcttggatacggctcttctgctccctctgattggatcaacatacttagttt

SEQ ID NO: 37403 - DNA, 213 bp, DROSOPHILA
atggacacaggtaaacaggtggaaatcttgggcggaccacagaccacggacttcagcgagcagcaggcatggcaggatgtgggagacaatcccggtcgaggagctgaatctggggttcagaggtttgacacaattctcctgggcagcttcaagcctccagcttatcggcgaccagataacctggccgatggaggatatggggcgccctcataa

SEQ ID NO: 37404 - protein, 70 aa, DROSOPHILA
MDTGKQVEILGGPQTTDFSEQQAWQDVGDNPGRGAESGVQRFDTILLGSFKPPAYRRPDNLADGGYGAPS

SEQ ID NO: 37405 - DNA, 2441 bp, DROSOPHILA
ccgaaaatgctgaacttttcgagaacattataatttttgtttaaaaataaatttgttttttttaagagttttttaaatatataagtaatgtacgcttagtacatttctatggacacacatatttttgatgccactgtagctgcgtatccttcggcgactgtgtgtgcttcctagttaaatgagtatgcgtgtgctgctagtgtgtatgtgtatgtgtgtgtgagtgcatacaatgcgtatgctgaaaacttaagtcacgaaagcagacgctctggcaaaggcgatccgtcaggctgcgaaatactttggcaacgaaaatattatacaactactacaagggtagggatttattgtgcttttttcccttgaaatgcaccgcccctgctaccttttaatgtcctttccccttgccatccgttcacagcagacctctatcgcccactgtgtgctcaccgagatgcaatgaagccgaaatgcagcactcaacttgagctcctgtcgctccttcaaagatccctgcaacgaggcgaaaatcttaactggcaactcccccggcgaaaatgagcaggaaatgtgcaaagggggtggggggtggggttcgaaggtccttcggtgcctcctgcaattttcatttgcatcttctggcgctgccataactgccgcctgtacgcagttacacatcacactttagttccgccaagtggattttcctccggcgcagagtttgtcttttcattagtttcggggtttattgttatctttggtgcctgcctagaaacgaaattcacttggctgcagattttgcagattaaccaaaaaatgagcgggataatgaagcctgacctttcggtggtcttttgtcttttacattaactttaattttactttagatttgggcttaaagggctattttaagctatgactgctttgtttgctgaattaaaatgaataatacaattcaagatcttgcaagtgtgttggtttattattgtaatatttactaggtattatttaacacattttttatagtcctcgtccttggtcgactgccttcgttgtgccgcaaattggttagcatccgccgatgtgattccttgtgcggatccctcagtttgagggcgaaacaaactggggtgagaatgtcgtccacatggggaaccttcgatgcactgggcatccgccttagtccagtccatacactttgacgggccgtggaatcatcggttggttgcggagcaatagcaacctcaaaggatccatcttcgggcgggcctttgtcgttgatccttagctggagcttaacccttggctgaatggccctcagagcctccgccagcgaagaatggaggtgcagggctcgcttgcgataagtttgacgataacggcagtggtcaatgtagagcaccggctggagtggatccagtggccttttgtcgggcatctctgggaggcagatggacacaggtaaacaggtggaaatcttgggcggaccacagaccacggacttcagcgagcagcaggcatggcaggatgtgggagacaatcccggtcgaggagctgaatctggggttcagaggtttgacacaattctcctgggcagcttcaagcctccagcttatcggcgaccagataacctggccgatggaggatatggggcgccctcataaatcaaataaaagagcgtatctgacaaataaatcttcgaggacgaagcaggctcgcaaaaagaacatgcaaatgcgcatgaaatatgcaaaagccgcaagccttaaaataaatacaaaaattaaatcaaccaacagagctatacagtggtctttagatagaggtaacaagacacgaaatgagatatacaaagtacataagagttatttccgatcaaaagtgaaagctatattcatacagaatgacaaaaagtgggcattcatctatgtacgagtatcatgcaatttgcgagaatgtgtttcaagagaaagtgcattctatggcaaatgcaatgtgatgagtaattaatttgaaaagtggacaaaaaatccgtaattttctagtaattactgtacgtctagtatattgtccagtttttgctgacattttgacctgcggcgacgtgaaaaaaagaaaataaagaagattttttctgcaaaatttaccaggctaaagagtaaagagcagagcatgccaaacgcacaggcacggccaaatagaatacagcgcacaaaaaggaagccaaatgaaaaaaggaaaatgtatattttaataaaccgaacacaaagcagcgtaggaaaagtcgagcgcctcatttcccagcaccacccactgagccacagccaccgagtgtcgagccagcggcaaggttagccagttcattcattcggtcttattcacagttattgaaagtagagcagcgccgctgcttctcgaataatatggaaataaataaa

SEQ ID NO: 37406 - DNA, 441 bp, DROSOPHILA
atgcccgacaaaaggccactggatccactccagccggtgctctacattgaccactgccgttatcgtcaaacttatcgcaagcgagccctgcacctccattcttcgctggcggaggctctgagggccattcagccaagggttaagctccagctaaggatcaacgacaaaggcccgcccgaagatggatcctttgaggttgctattgctccgcaaccaaccgatgattccacggcccgtcaaagtgtatggactggactaaggcggatgcccagtgcatcgaaggttccccatgtggacgacattctcaccccagtttgtttcgccctcaaactgagggatccgcacaaggaatcacatcggcggatgctaaccaatttgcggcacaacgaaggcagtcgaccaaggacgaggactataaaaaatgtgttaaataatacctag

SEQ ID NO: 37407 - protein, 146 aa, DROSOPHILA
MPDKRPLDPLQPVLYIDHCRYRQTYRKRALHLHSSLAEALRAIQPRVKLQLRINDKGPPEDGSFEVAIAPQPTDDSTARQSVWTGLRRMPSASKVPHVDDILTPVCFALKLRDPHKESHRRMLTNLRHNEGSRPRTRTIKNVLNNT

SEQ ID NO: 37408 - DNA, 16969 bp, DROSOPHILA
agaggggataattcatagccctggatgaggcctgcataaaatgttgctgccctggaactaagttctctcaaggaaccaaactgagctagtaaagtatccctaatttgtccactctgcttaagggcctcatctatttgggtactgccttgtttgatttcgtttaagctttccaaaagctgctcgttcttcagaatgtcgccctctgatttcgatagttgctccagtagtttatcttgcatttccattcgctgcttcagaagatgtccttctttttgtagcaactctatcctttgctgctccaactcgccattttttaagacaatggctttggacattaattgatcggctaagccagctgctgtgacagtgaatttcagaacattaagttgacttctttgctcttctggcaaatccaaacgatgcgatttgcttatcaaaaccaactggaaactctcgtgaagatccaccaactttgagcctatggcaagttgccgcttattgaacctcacaaaaacatgaccctgcagaagttgtagaacaggaggtcgtagttgttcgcaatcagtgaccaaaagagtctttccaaaacgaacagcaagctctagctgatagggcagcctgtcgtttccgtgtgtggtcaactcgcatggtcttccacttcctttgagatgggccattaaccacgcggcagctgtttgtgtgggatccagaagcaatggaattggacaggctccatagggcagagaaagcatttccctgagtagggcagcgctctcaatgatttgggcatcccgcgccaatccctgactctcccaaataatctgttgctgctccgtgagcagtgatccccggagatcgaaatcggagggtaaatgaaaatctgccgccagacgtttgagggaggagctgtgagtaagagaacataataacatctaaaagttaaaggagataaaagctcgccgttaacttaccatctctgttccaggcctaagcccgcacagtaattgatagctatggctattaatagagtctttgcgtccagtgttttgtgggcctttttgagctccgtcaactgaaggctccaggtggtgtattctgcactaagtttttccaccaacagctctgcagcctgcaaggttccacttgcctcttggagtttcagctccagaactgctgcttcttgtgtgtacgtctgcaatttggccgacaactgcttgactcgcttatccacatcatccagtccgctggccaactcttgcatttcatcctcagctgcattgagatttttctgcaattcattctgttccctttcgaggggcttgatgctctggatcaccctggaataacgtacactagcctgtacccaagcagccaaaggagcagctgctgcagaagcgcgcttggcgtttttggcctcgtatgaatcgcctttggccaggagcagcctttcaacagcttcacaattttcgggactaatccgagctggatccaaagatcggatgtcctccttaacacctctcttggcgagaaaagtcttcatgctgttccatgaagtatctcggatgcccattagtcggaggacgccctccaaaatatcccttacagcttccggtggagctctcagggatctgatttctgataaggcttccgatttgatttggcccactgcgttactggcctcagccaaaattggttctacttctgccagttcctgttggatttccttttgtcgaatctttaattgctcgctgctcttttgtgtttgttgtttgagttccaacatgctggacttctgttcattggcatttcgcatcgtgaaggaaatcatctctagtgcttcgttggctagttgtcgcttttcacccaaagcctgttcctgagctgctgcatttgatttgagggtatcaaccaaggcgtgggcagaggccaatttatcaactcccatttgcaatttgcccaatctctgatcgatttcattggctgcattgttatacatgtggaagtacgtacggataagttggtaatatctttgcgacgtttcctctgaaggcagttcatctgatatatctgcaaagtgactgcaagtcggtaccttgccacgtccacttcctccgccagcaatcgactcatttagcaactcaataaattgtttgggcagaatggcaatagtttctcgggattctcctctcacatagagcaaatccatctgacgatgcaaagcaggaaaattgttgaagtagtcctgcaccttggcactattgggatccaagactataataatgtggagatagtcacgggcaccttaaaagggattatattgcaatcacatctagaacagggtatttcaattgaagtgctgaagaatgtacttacgctttagaaagtatgttcccatggattcctggtatccctcgagctgtgccgcctgttttagagtgctcgccaccgtctccagatcatcgccaaaaagctctaggatctcacttccttcgagtagagcttcgatgggtttcaatatatcgggaacataacttagccaacattgctctatcagcagataactcatttgctgctccagggcagccgtctgcattgccactttaaggtcattgtagaagtcggtgagatcgtaggacggtcctccttgcagagtaaccaccttggcctcctgaaaagttgcggctgtgaatatggcatccagatgacgtccaccagattgccccaaaatgagcatgtgggcatcggttcgtgatagaacccgtgttattcgagctacgtgacttaaaagttcctccgtaatgggtgccgtgatgctgtagttttcggtatctaacggagttaaaacacaatggttttctgtagctcagccattcataatgcaattttagttagaagctttaatatttaacagaacaaatgttgtatttctaagctctcttattagacatacttgacgttgaattgctgctaaattactttttgtatagaactgattctcagacgaattgcgatgattctgtactttcagtggatgacccctgaggaggaggcgcgtcaaaagttcatcatgagggagcgggaccgcgagcggaaacggatcaagcgcatgaatcccgagtacaggcagatggaacgagagcgggatcggttccgcaagctgacacccaggcccagtgtagttatccccgattaacccaaactatcacccatttcctcctcttgtcttgaaaccgtggaattaccagcaggcaactccaactgatgcgtgagcagaacttaggctaacaatctctagataacaagcaaggatatcaaataatttgtactcactgcaaatagtaacctgccgttgaacctcttccatccattcgtcatgggttagacagtgtagatgaccccgcgactttggagatttaggcacgaaaaagaccttctgaatgaattcagtgaattagcttgattttcatttggcgaaatccaactgtgacttacctccttgccatagtatttgcgcatcgtttgcttaagtatgccctcgaattgctggacatgctcttcgctaatcaatctgtcgcgaaacatgcctaatagctcgcagtacagagcctgaaagcggacagaagttttcaatctcattagccttaaactgagaaaaatgttttatgtgaagaaatgttcggactataaatgttctagtttaagtttgatagatacaagtagtaagatttcagatttaaaagccttaatcaacttctaggagtttacaaaataatgtattttaatgaattagttttttctgtttttctcactacaaaacatacctcattaaaatcactggcaggataaaagacaagggcatccagcagcttcatgatgcatttggggctgaactggtagtgtgcctgtctgcctcccacgttggtgaacgtcgcttgcagctaaaagagggcaaagtcaattagcaggtcctgcgatgatgaattcccaaatggatagaaagtgggggtgcaaaccttctcaaagcagtccattagactctcgctgacgtgctgcaaattgaccccggaccttcctcgattttccgatcccctgaagtgctcttccaaaagaggttccaatcgccgctggacgatttctagcatgtcctggctggtgggtcgggaaactcgcacaaactgattgatggcaaagtagcgcggtgcgattttgccggtgtttccgccaatagaggcgcataattgcagaccgcttacaccaatccattcaaggttttcggcgtaaaagcctcctcgttgagctagttggaatagcagttccacaacttcgcaagctccccaggaatcctgctggcagaggtccaagttcttcatgaagagcaccagtctcgcttgctttggtcggtactctcttcccttgattccactcactgtgacgcagtgcgtcttcaatgtgtgcaaaatatacctaggagtcagttgagtagagcaattgatggtggccaactgatagccagagttctccagcacggctctttgaaggagcagggttttgcccgacccacttggaccaatgagcataaagggcggtaatcgagtgccctgagttttcagcagggtttctaaaatgtccaaataggatttcatgtacgatgttattattagctgcgatcctttttctggtgtctctattgcatccaccgcatattgctctaacgaatttctgctgctttcatagtgagtcaattcagcgtagttaggattggccacataaagattcgcgtgttttagaatcagttgggcaaactcccgctgtcgatcgttgggcatgtaaccgaaaagtgctcgaagagtggctgctccatattcctctaaagactgagtaccatgaagttgaagtagcagggagcgcagaaggtgggcccgatttataccaggcagatgactgcagaaaatgctaatttgtaactcaagaatttttaatatgaactgagcaactcacgtcaataaaagttggctttcgatccagttcacagcatattggaagttgccgtccacgtaactttgcaataggtcgccatagggttcttttgacagctcatgtttaagaatcccatcagccggatagtagtcgtaactatcatatatcggcaaagaaattacaaacagttcttcataagttaaaaatcaaaacccacctcatattgacaatacccattcttgaaatcgttgctggtgacgcatgcctcacatcatctgtttcgaaaataaagttaacattgctcccgaactgaatcctccaacccgatggcaaagttagtagcctgcgggacaaaaattttaattcaagaagttagtttcatgtggattgccctggtttcaagacaaaatgagaggagatcatactatcgcataagaccacgcttagccacacaagaacactgcccgagattcagattcagactcagatcgagacacgaccccttctgctgactgccgtttgccaaccaaccactctctctgtaatttcagctgatgacccccgaggaggaggcccgccacaagttcatcatgcgggagcgggatcgcgagaggaagcggatcaagcgcctcaatcccgagtaccggcgaatggaacgcgagcgcgatcgattccgcaagaaggcacgacgtgctaacgtagcatttttccaatattctatattatctataaacataatcccacactcgaacactcgattcacacgacacacacacacacactcacatggcttgagagattagggggtaggggcttagaagatcccaggaccgttgacacttcttgaaccctccaaaccagacaaactcccacagtttctgtgacctaaaacactatgctttaatatgttttcccccattctgtttctgtatgcgcctacagttgacccccgatgaggagctgcgactgaaaatgatccaaagggagcgggatcgagaaaggaaacgaatcaagcgaatgaatccggagtacagaaggctggagcaggaacgtgacagggataggaaaaaggctcgtagggccaacgaggccttcaggcagctggaaaagctaagggataagatccgaaaggatcgaaagaagggcttgcttgtcacggatccgacgcagctgccgccggaattcgcagccatgataccgccagtgcctgtggttaagcccgaagtaggtgtgtcaccagccccgcccccaggccagcagcaacccacgccacagctgcagcaacagcagcagcaacagttgcagcaacaccagcaggtgccacagcaacagcagcagcatcagcagcctccgcccacgcatctgcaggagcagcagttgagtcaccagctcgcgcatcagcggaaccgaatgatgtctagccaactcacccaactggccacgccccccgcccatgcctcgcacctacagcagctgaataagttgcagcaactctacccgccacgcagctttggccaccccgctttacctatcgctggtgtgacgctgatgccgcagctttgtcatcccatcctgcatcagaacctcagcgctactctgtatgcaggtccaccgaatggcatcaagcaggagtatggacaggatatctccgcctcggctatggctgctgcgcaggcggcggcactggcctcgctgaggaatccgcaacagcagcagcaacaggatgattcagaaatggtcattagtctcgaaccggagatagttctccagacaggtcccgatgtaaatcccgcccagccacctccgcagcaacagcatcttttcagcgcccatcagcaccagcagcagcaacagcagcagcagcagcagcaacatcatctgcagcagcaacagcactgcaacatgttccagcatatggcccctcaggcgcacatgcaacacatgcgctcactgccgcctccgccgccgcccccctcgctgaccttgccacccctgccgcccccgccacctacaactcaccagcaacaacagcaacctgcgccgccacagcaactgcaacatgctccgcagtgagcgattctcgcctgtagttctaagctcaaccctctagccagctaaacgcatccgaaagtttgagggcacacacacctggagttgtgatcgaattagctatgtgatttacaattccatttgcctaaatgtattacgttgccataattgctcgagtacgaaatggtatttgtaattacaaatctaacaagcattcaagcagagagctatgtggtgctgaaaatgcaatagaaactattcttattatacccgttactcgtagagtaaaaaggtatactagaatcgtttaaaagtatgtaacaggcgttttcgaccatataaagtatatatattattgatcaggatcaattgccgagttatctgaccatgtccgtctgtccgcattaacgtcgagatctgaggaactataaaagctaaaaagttgagattcagcacacacattctagggatatttttggatatttttccataatttttcattagtcttgtaaatgtctatcgatttgacaaaaaacctttttcccacgcccactctaacggcgccgaacctttcacgcccacacttttaaacaatttgtaatttttttctcattttatccctcccaatacctaacgatatcctagaaaaattatatttcgcgttcgcattcacactagctgagtaatgggtatctgatagtcgggaaactcgactatttcattctctcttgttttttttttaagaaatttttacttccaaagtgaaacttgttaggttattttttagtgtagaaagggaattatttttctcaaaacaattcagttttatcaataggacacagcaaatcttccctactttttgttcgaattatatgcaaaaacaattgccattttaaatcctatttacattgtcgtcaaaaatagtttattttgtatctttggactaaaaacacattgtgataaaatgcaccatgagctttagagcaggtgccaaaacataaaattttcctgtaattcctcattcattttaggttggtagattattggttttcctacaacgactcttattcctattttgtcacaactccaatagatgtgtgccaagacctcatacgcacacactcgcactgaaacacacccatgtttattttaaagtatgttaagtagacgccattttaaaaatgccgatacgtattatgttgcgttacgcaatccgcattacgtttcttaagtgcttaagggcttccccgtcataactttttatgtcgtcatcgtttcaagcatttctctgttttttagatatgtacgtatattgtttagctaagtgataggagacacaatacttgcaagtttaggatgatacgatctacaatacgaattaacgataactgtatacctatatgatataatgatatagtatggccagccgcaaaataattattacgaatttatgcgcagaaaagagcaaaatataaacagcaagcgattgctgaaaatggaattcagttgtttatgaagtgacttcatggatataggatatttttcaagtctaaattatgcgtatgcctagaatctatttcctcaaacagttgtgtgaatgttgaaaaagtggggattaaatgcacttacttgttatcgtccaacaccgagttcagtgcctctatccattcgggatcgatgctgccgtcgcaaacgatccatgagtggacttgagatgactcctgattgaccgccaccgctgtgtgggtcagtactccgtcctgccactgacgagtatcggcatccaggcgtcccagcaattgaattcgactcattgactttggactgatggtgtgcacttttagctgggttccacacagagcctgtttaaggagggatatgatggtagacttgccacatcctggcggtcccaccaacaccactcccatccgtttttgcagctgctcgtgcagttgcaaggctttttcaatttgcctttcgcttcgacagagccccaattgcgcaaaggcggcggatagagattgatggagctgagtttctggcgccggcgagctgccaatctcggggaaaacattccgtagcagcatctcaaatctattgacatcgtggggggctagcttggacattgtggatgaacgcagacaacgaactaccaccgacatctcgaagttagcgctggactggttgttatcctcgctggttaattgatccctcaaaccttctccgcataccatgagcaccgtcttcagctcgcgcagtccccagtcgtaatgccgctgggcagacagcatcttgccgctcagttcaaacaactccacgatgcgagatgcgatggcggatgcctccgtaaagccctcgacgaacagcataacccgggcgatttcacctggttccggctgctgcataacaatgggtcggaaaagagcctggatgtttccgggcagcttttggcgaccaccatactcagctccggcgggattaagagtaacgaagatcccacagtgctggttcagttgtatctgagaaagggtaaagataaatatttttaataatgctaacatggtaggtaaatatggtgtggttacgtctataaatatgacatgattaccgacttttaacagatagcagctttaactttatttatattttataaattaagtataaggaagatctatgtttttagaaactatgaaactacccactcaaacaagagccaaaccaaccaaccaatcaagccataattcctgtcacaccaatttcaacttcgacccttccataactcatcctgctcacctgccgctcgccaatctggacgctgttggcccgctccttcagggcactctggatgggctggataagcatggagatggacgacagagtggcctcctgcagccggttgaactcgtcaaagcagccccacgccccgcagcgcgccaggccggtgaggatgaggctcatcgactcggtgtccacattctgcaaacaatccatggcataatgatgtatagcaggggaattaccatgcactcggcaaaaatgtgggtgtacatttttcttttggtaaaaaacttacattgcggtaagttttttttttcaatatttcaaatttaaagcaagctttaacacaagccgcttgccattattttaaaagttaaaacatacactcgtaaatctctggtgtagccccactcacctcgtcgcaattgaaaaccaacaccaagcggcccagcatggccccgagggccttgacgcactccgtctttcctgtgccagccgggccaaagggattaccgcccaggcccatgtgcatcgcctgcgtgaggatgagatagcagcggtgggtgagccgtgtgtggacgagcttactggcctgccccaggaactcgtaggcgtattcaaattcggcataaaccatgcggacgcaaacttgtcgattggcattaacttcgcccgatgtgccgcccttttttcccaggtaatatctgagttgacacagccaatgccaatcgctggtgtgcaccacattgtgtttctggagctgctctgttacaccggagtagtgcaccaagtccagaagaagggctctaagtttgaggctgatcagcgttccgttttcggacttgtttttcagggcagcgaggtgggtgatttcgtcctttaactgctgctttagttttcccaaggacatgcttccaatggcctgctccgcttgacgggtgaagtgaagggctctggctgtggccaacacctggctggcatactttttcaggattttctcgtcgagattatcacttccgccggtggtgccggtgtagcactcgtaaatttgatctctcagagtatcctgaaccacagtcaccagttgattcaaccaccgctgcaaataataaatttaagtacatatacttaaatattaaattattatcgtttttggccaagcgactcacctcgatgtcgcccttcatctcgacgggctgacttaacttgagctcatcgccctcagcactgtgcacggatgtaatactgtactgattgacatcggaggatgtggctggattagggcccacctggcggatgctgagactgtggcaaccggggaacagtttacggatgtgccgctggatgacctccgcatccttgctggcctgtccgaggagctcgagtagatcatcatcgccgagaaagtagaaccggggaaaggagttgcgtttatcctgcgtagaggattatgcattatgatggatgagctatttgtgggattgcgtaagccactcactgttatatagctcatcaagttctgctggcacctggccagttgggtctccagtgcattgacaatggtggtgatgttgtttatcttcgtcaacgaagtgacgcgcggatccatctcgatttctcgcataacgaaacgaaagtccttgtcgatgcgtttgaatagtgcctgctcatgttgcagggttccagatccaaagactggttccaaataaacccaactagaacacataggaatttgatagcatgattatttaaaggatcatgacgtgacttaccgtctctgagaatgatttaagctacttagcagggcatccagcgtgtttaggcgactctcccagagttcagcctgatccgagaagctttcaaaggcagctgagttattggctgattgcaaaagggactgattgtcccctatcttgttgagaacctcttggtagtccttaatcaaagagacactctgaccggaggcatctgtcctagtgatcaatttcaattgggccgtgactgaccactgatcgagttcaatcagagcctgcctgacaatctgttcactcgacgcctgtcggactatactactgatctcttgagcagccgattgaaggacatcaaagtcctgtaggatgtcctggaggagtatagaatgcagtggtttggtttccttgtgattgaggagctgaaatatcctagcccagtggcgttcgctcaaggattcggattgcagttgctgcaaaataggtagggccgattgaagctgctccacctgttgccggattctcttcgagggcaaatcaatcgaggcatgaaccgatccctcccatttgccaataaattcgttcaggacataaggacgtcgcctgtagattgcccattcctcatgaagaactggctgcagttcagtgagaaaactgtcgtagacctgccactgtttcgattgcttctccatttgctcttcgatttctgtgaagggggtaagcatctctgctggaaattccatgttaaatttggaacactcctccaacagttgggtcttcttctcctgcaattgttgccaatggagtctgcgctccttgaaaacgtccagagtggagtgctcgttggcctccagttcggatattgtggactcccatctaagtaggaatttctcagcctcgttcttaagattttgaagttgtgtctcggcctggtttttgatcatatccacttgtcgctggaggatcaccgcatgattctcgagcagaggctgcaactgttcccattgcagcaggattcccgacagagctgtgaccctttccttgcaccagccccccagacaggaatcctttgctcgcaccgcctccaacgttttctcgatctgcggcaatttactcattatcttctcgtacttcattcccgattgactaatgctaccctcatccatgggcacattttgcaggaactgcagggcactctgtaggaattcctggattaaactcacatccgtcaaaatggcagttcgcaggctattcgccagagactcccaataccgtctgcttatatattctatatccgatctcaagggcaggacattgatcactatgcaatcgatggattcctctgcctgctgaagcttcgccaactgttgactgaaatgtttgcaggatctgaagttacgatcccagtccccggcctcgtttaagtgaatcccacagagctgatccacatccacacatcccaaggcaatccagggcaaccaaatggtcttgaagtcctgcaacttgtcgaacaattcagcagccctttggtaaagtggtccaaaatggtggcggtttacagtgaccatggatttgaaaagctcttggctgtgttcagatagtccgtggaaattacaaggtctctctatgaagcgcctgagctgactaaagtacaactcccgaatttcctcttccggtggactgaagaccagttctctctgtcgcaagacgagctttacatgtatgtctggtagcttgttgttcatgtcgagcaaccccaagatgtactgatattccaaaactttgtacaactggtgatcccagtgcagcttgaaggcatccaagtgggtgtatccttgacgctccaaagtggccaccagttcacggagatgacgcagttcgtccttccaaatttggttttgtgtaaacagatcggtggacataagtttcaaaacctataaaaaaaaacggtattaagagaggatgttttatgttattataaacctaccgatctcttggcctgttcgtgatatcccactagaagcgtattatccgaggacagtttagaaacggcagcctgtagaatatccacatatcgctgaacggaggactcgtcctgccaggcgaccgtttcgctttggaccaaacgttgcagctccagggcattcttcaacataatgggccgttggcaggggatcatccgatcgccgatcgtgttatgaaaagttgcgatctgctgcaatcggcgagcatagcacatatatttggctgcatgagtggcagctgctcgcagttcgaggggaacattgtagcctagattctcaaattcgcgcacatcttggcagaaagtcaccagcttgggattgaaggttactcgcatcagttgacgaccctctttttcaaacttcaccacggcctgatcgtcacgaagtctaaaatgatagtgaatcaattctggcttctggaccattcgcgattaaccaaattgagggacccaccttagctcaccgcttttgacagcagtggagcactgtcctgaccagatctcgaagttagtacgtaacagggattcggtttcctccttgatttcctgcactgccttgttgatcttgtcaaaaccctcccgtccacttatcaaatggctaaccttctcgatctcctggatctgatgttgaaccaccttcaaccagcggcactcgttacatatcactgacagatgaccagtatccggttccatatttgaatccaccatcgccttgcgtagatcctgcaaaaggatgtgcagcgattgcaaaaactgctcccgttcgatggtcaacagttccaggacagcaggtctctggataagagtttcgtatttggagaagatgaagatcacctgccgtggattactcaggtggttatgcaactgtctcttgagcgcagcggcaattcgctcgtcaattggctgaaggacctgttcaaagtgctggagagccttgtgccatttattctgccccaacgaggatgtgtcaaagatattaaattctaaaaaacataagattataatacggaatcgaaatgtttaattaaaacctacccgtgaaaggtgcctgttcctgaaacatttcctgcagctcggtatcttcgagcaaggtggcaatctgtttgtaaagctgtttgatgctccggatctcgctaagacgctctttaaattgttgtcctcgcttgggcacatgcgaatctccaagccacgggtgctttacgtagtttggccaaaataggcgagtgagggaatcgcagagctggatccacgcgtccacagtgtcgatgctctgactcataagattgttaacatgactggaattcaggctccatacgtcttcggccagcaattgtgtaaggcagacctccaatagtcgcttgccaatgatgtccaagaggtctgccatccgctgctggggatagttgtaaggaagccgccacaattcgtccagattggtgtgggcatggtcgagaaactcctcaatagtgccacttggattggccccgtcaatggtgctgcaatggcactcttgaacacatttcattgggaccttagattcattattacctgatttgtttttccatattttccaaaacaccaataaacacttgcgcagcctcgcggtctaatcgagaacttgacttttggccaagtttctgctgccaatatttgatctcgtttcgcagactcgttatgcctggagagacaaaaaacaaatcaatttaaggtctttttctcctaatttcttcacctaaattgcttgctttaagaaacctaccgctctgtggtaatcccaagctggaacccaagttctggtgcaagttctccagaatgccgctcaactcgggcccatattcgctgcgctgaagaaatatttaaatattagagagtaaggctgaggtcacgatgaacataaagctattggaaaaaagaaattggatgggaggccagggcaaagtataattgacaaaatgaaattgcatactgaattgaattatgcccaaatgcgattaagattgtagagagcgaaatggagagcaggccaagttaagccgagtgagggaattagccaggcagaatattacaccagactgcactataaaacactggcgaacacacatcatcattgcatccagactctagacttacccgggctgagttggcagagggcgagaatacccgagaaacggaattgtaaatggacttgaccatgcccccttctagtgttaaaatgcccagcaggggctcactgccatcctccttgcgatgatgccccacctgcggcaccttgtagaagagcaggcagagttcctcattgggaatgcgatggtggaatcggattctgccatcggatctgctatgcaccgccgagataaccgtcagctcctcctgttccaaaaactccagaatcatggccgtctgctcatccagttccgagcccggtaaacgggcggaaaagtattcgactgaggaaatgcgatagtaaagaaatagattctatgccagttgaagtggtttaaacactccattgctcaccggaagtatttattataaattttgtgcgctgggtcattttaaattgggttttcagtcttcagcgcgttctgttaactttcagttttcaccgaaactctttcactttttccaaagcctaactatttgttattcttttcggttgccctaggcaactcgttcaatgttgcccaggggtggtgagttttacactgcagaaagattcacacgtaaaatattaaaatactattacaacaatagtaagaaaagaatgcacgctaaatgtatttttaagaacgaactatatttgcatttctgtaaatacattattgatgaaaataattggccgagtccaactttgccatgcctgtctgtccgtacctctgtccgtatgaacttcgaaaggccacatttctagttctagtgtctagtgtctagttttcttcagtgcactggtttctgttactaaggatgttgttgtgtttttctcctcgcacctgttgtttttctttggccatgcgacacgtgctgcagttgtcatgggtcttttgtggggaggggaaggggatgttaggtgctttgcactagctcctgcctagttctcatgcatcccctggcattacctcaatccactcggggcggctgctaatgaaacggagcacaggactggccggctgcactaaaaatgcctcagtaggtttatatcatttgaatgcccattaattgaattgtgcgggcgtgctcaaatgccatttcccagacaaccaggacgaaaatggggatggactcacaactcaggacatgtccagattcgacaggagtcaaccctgggactgtggaaacctgcgacagctcaacattcggtattagaatcagtttgaggtgggagtatgtcacaaca

SEQ ID NO: 37409 - DNA, 8236 bp, DROSOPHILA
atgattctggagtttttggaacaggaggagctgacggttatctcggcggtgcatagcagatccgatggcagaatccgattccaccatcgcattcccaatgaggaactctgcctgctcttctacaaggtgccgcaggtggggcatcatcgcaaggaggatggcagtgagcccctgctgggcattttaacactagaagggggcatggtcaagtccatttacaattccgtttctcgggtattctcgccctctgccaactcagcccggcgcagcgaatatgggcccgagttgagcggcattctggagaacttgcaccagaacttgggttccagcttgggattaccacagagcggcataacgagtctgcgaaacgagatcaaatattggcagcagaaacttggccaaaagtcaagttctcgattagaccgcgaggctgcgcaagtgtttattggtgttttggaaaatatggaaaaacaaatcagcaccattgacggggccaatccaagtggcactattgaggagtttctcgaccatgcccacaccaatctggacgaattgtggcggcttccttacaactatccccagcagcggatggcagacctcttggacatcattggcaagcgactattggaggtctgccttacacaattgctggccgaagacgtatggagcctgaattccagtcatgttaacaatcttatgagtcagagcatcgacactgtggacgcgtggatccagctctgcgattccctcactcgcctattttggccaaactacgtaaagcacccgtggcttggagattcgcatgtgcccaagcgaggacaacaatttaaagagcgtcttagcgagatccggagcatcaaacagctttacaaacagattgccaccttgctcgaagataccgagctgcaggaaatgtttcaggaacaggcacctttcacggaatttaatatctttgacacatcctcgttggggcagaataaatggcacaaggctctccagcactttgaacaggtccttcagccaattgacgagcgaattgccgctgcgctcaagagacagttgcataaccacctgagtaatccacggcaggtgatcttcatcttctccaaatacgaaactcttatccagagacctgctgtcctggaactgttgaccatcgaacgggagcagtttttgcaatcgctgcacatccttttgcaggatctacgcaaggcgatggtggattcaaatatggaaccggatactggtcatctgtcagtgatatgtaacgagtgccgctggttgaaggtggttcaacatcagatccaggagatcgagaaggttagccatttgataagtggacgggagggttttgacaagatcaacaaggcagtgcaggaaatcaaggaggaaaccgaatccctgttacgtactaacttcgagatctggtcaggacagtgctccactgctgtcaaaagcggtgagctaagacttcgtgacgatcaggccgtggtgaagtttgaaaaagagggtcgtcaactgatgcgagtaaccttcaatcccaagctggtgactttctgccaagatgtgcgcgaatttgagaatctaggctacaatgttcccctcgaactgcgagcagctgccactcatgcagccaaatatatgtgctatgctcgccgattgcagcagatcgcaacttttcataacacgatcggcgatcggatgatcccctgccaacggcccattatgttgaagaatgccctggagctgcaacgtttggtccaaagcgaaacggtcgcctggcaggacgagtcctccgttcagcgatatgtggatattctacaggctgccgtttctaaactgtcctcggataatacgcttctagtgggatatcacgaacaggccaagagatcggttttgaaacttatgtccaccgatctgtttacacaaaaccaaatttggaaggacgaactgcgtcatctccgtgaactggtggccactttggagcgtcaaggatacacccacttggatgccttcaagctgcactgggatcaccagttgtacaaagttttggaatatcagtacatcttggggttgctcgacatgaacaacaagctaccagacatacatgtaaagctcgtcttgcgacagagagaactggtcttcagtccaccggaagaggaaattcgggagttgtactttagtcagctcaggcgcttcatagagagaccttgtaatttccacggactatctgaacacagccaagagcttttcaaatccatggtcactgtaaaccgccaccattttggaccactttaccaaagggctgctgaattgttcgacaagttgcaggacttcaagaccatttggttgccctggattgccttgggatgtgtggatgtggatcagctctgtgggattcacttaaacgaggccggggactgggatcgtaacttcagatcctgcaaacatttcagtcaacagttggcgaagcttcagcaggcagaggaatccatcgattgcatagtgatcaatgtcctgcccttgagatcggatatagaatatataagcagacggtattgggagtctctggcgaatagcctgcgaactgccattttgacggatgtgagtttaatccaggaattcctacagagtgccctgcagttcctgcaaaatgtgcccatggatgagggtagcattagtcaatcgggaatgaagtacgagaagataatgagtaaattgccgcagatcgagaaaacgttggaggcggtgcgagcaaaggattcctgtctggggggctggtgcaaggaaagggtcacagctctgtcgggaatcctgctgcaatgggaacagttgcagcctctgctcgagaatcatgcggtgatcctccagcgacaagtggatatgatcaaaaaccaggccgagacacaacttcaaaatcttaagaacgaggctgagaaattcctacttagatgggagtccacaatatccgaactggaggccaacgagcactccactctggacgttttcaaggagcgcagactccattggcaacaattgcaggagaagaagacccaactgttggaggagtgttccaaatttaacatggaatttccagcagagatgcttacccccttcacagaaatcgaagagcaaatggagaagcaatcgaaacagtggcaggtctacgacagttttctcactgaactgcagccagttcttcatgaggaatgggcaatctacaggcgacgtccttatgtcctgaacgaatttattggcaaatgggagggatcggttcatgcctcgattgatttgccctcgaagagaatccggcaacaggtggagcagcttcaatcggccctacctattttgcagcaactgcaatccgaatccttgagcgaacgccactgggctaggatatttcagctcctcaatcacaaggaaaccaaaccactgcattctatactcctccaggacatcctacaggactttgatgtccttcaatcggctgctcaagagatcagtagtatagtccgacaggcgtcgagtgaacagattgtcaggcaggctctgattgaactcgatcagtggtcagtcacggcccaattgaaattgatcactaggacagatgcctccggtcagagtgtctctttgattaaggactaccaagaggttctcaacaagataggggacaatcagtcccttttgcaatcagccaataactcagctgcctttgaaagcttctcggatcaggctgaactctgggagagtcgcctaaacacgctggatgccctgctaagtagcttaaatcattctcagagacgttgggtttatttggaaccagtctttggatctggaaccctgcaacatgagcaggcactattcaaacgcatcgacaaggactttcgtttcgttatgcgagaaatcgagatggatccgcgcgtcacttcgttgacgaagataaacaacatcaccaccattgtcaatgcactggagacccaactggccaggtgccagcagaacttgatgagctatataacagataaacgcaactcctttccccggttctactttctcggcgatgatgatctactcgagctcctcggacaggccagcaaggatgcggaggtcatccagcggcacatccgtaaactgttccccggttgccacagtctcagcatccgccaggtgggccctaatccagccacatcctccgatgtcaatcagtacagtattacatccgtgcacagtgctgagggcgatgagctcaagttaagtcagcccgtcgagatgaagggcgacatcgaggatactctgagagatcaaatttacgagtgctacaccggcaccaccggcggaagtgataatctcgacgagaaaatcctgaaaaagtatgccagccaggtgttggccacagccagagcccttcacttcacccgtcaagcggagcaggccattggaagcatgtccttgggaaaactaaagcagcagttaaaggacgaaatcacccacctcgctgccctgaaaaacaagtccgaaaacggaacgctgatcagcctcaaacttagagcccttcttctggacttggtgcactactccggtgtaacagagcagctccagaaacacaatgtggtgcacaccagcgattggcattggctgtgtcaactcagatattacctgggaaaaaagggcggcacatcgggcgaagttaatgccaatcgacaagtttgcgtccgcatggtttatgccgaatttgaatacgcctacgagttcctggggcaggccagtaagctcgtccacacacggctcacccaccgctgctatctcatcctcacgcaggcgatgcacatgggcctgggcggtaatccctttggcccggctggcacaggaaagacggagtgcgtcaaggccctcggggccatgctgggccgcttggtgttggttttcaattgcgacgagaatgtggacaccgagtcgatgagcctcatcctcaccggcctggcgcgctgcggggcgtggggctgctttgacgagttcaaccggctgcaggaggccactctgtcgtccatctccatgcttatccagcccatccagagtgccctgaaggagcgggccaacagcgtccagattggcgagcggcagcagatacaactgaaccagcactgtgggatcttcgttactcttaatcccgccggagctgagtatggtggtcgccaaaagctgcccggaaacatccaggctcttttccgacccattgttatgcagcagccggaaccaggtgaaatcgcccgggttatgctgttcgtcgagggctttacggaggcatccgccatcgcatctcgcatcgtggagttgtttgaactgagcggcaagatgctgtctgcccagcggcattacgactggggactgcgcgagctgaagacggtgctcatggtatgcggagaaggtttgagggatcaattaaccagcgaggataacaaccagtccagcgctaacttcgagatgtcggtggtagttcgttgtctgcgttcatccacaatgtccaagctagccccccacgatgtcaatagatttgagatgctgctacggaatgttttccccgagattggcagctcgccggcgccagaaactcagctccatcaatctctatccgccgcctttgcgcaattggggctctgtcgaagcgaaaggcaaattgaaaaagccttgcaactgcacgagcagctgcaaaaacggatgggagtggtgttggtgggaccgccaggatgtggcaagtctaccatcatatccctccttaaacaggctctgtgtggaacccagctaaaagtgcacaccatcagtccaaagtcaatgagtcgaattcaattgctgggacgcctggatgccgatactcgtcagtggcaggacggagtactgacccacacagcggtggcggtcaatcaggagtcatctcaagtccactcatggatcgtttgcgacggcagcatcgatcccgaatggatagaggcactgaactcggtgttggacgataacaaaaaccctgctgaaaactcagggcactcgattaccgccctttatgctcattggtccaagtgggtcgggcaaaaccctgctccttcaaagagccgtgctggagaactctggctatcagttggccaccatcaattgctctactcaactgactcctaggtatattttgcacacattgaagacgcactgcgtcacagtgagtggaatcaagggaagagagtaccgaccaaagcaagcgagactggtgctcttcatgaagaacttggacctctgccagcaggattcctggggagcttgcgaagttgtggaactgctattccaactagctcaacgaggaggcttttacgccgaaaaccttgaatggattggtgtaagccattgtgttttaactccgttagataccgaaaactacagcatcacggcacccattacggaggaacttttaagtcacgtagctcgaataacacgggttctatcacgaaccgatgcccacatgctcattttggggcaatctggtggacgtcatctggatgccatattcacagccgcaacttttcaggaggccaaggtggttactctgcaaggaggaccgtcctacgatctcaccgacttctacaatgaccttaaagtggcaatgcagacggctgccctggagcagcaaatgagttatctgctgatagagcaatgttggctaagttatgttcccgatatattgaaacccatcgaagctctactcgaaggaagtgagatcctagagctttttggcgatgatctggagacggtggcgagcactctaaaacaggcggcacagctcgagggataccaggaatccatgggaacatactttctaaagcgtaagtacattcttcagcacttcaattgaaataccctgttctagatgtgattgcaatataatcccttttaaggtgcccgtgactatctccacattattatagtcttggatcccaatagtgccaaggtgcaggactacttcaacaattttcctgctttgcatcgtcagatggatttgctctatgtgagaggagaatcccgagaaactattgccattctgcccaaacaatttattgagttgctaaatgagtcgattgctggcggaggaagtggacgtggcaaggtaccgacttgcagtcactttgcagatatatcagatgaactgccttcagaggaaacgtcgcaaagatattaccaacttatccgtacgtacttccacatgtataacaatgcagccaatgaaatcgatcagagattgggcaaattgcaaatgggagttgataaattggcctctgcccacgccttggttgataccctcaaatcaaatgcagcagctcaggaacaggctttgggtgaaaagcgacaactagccaacgaagcactagagatgatttccttcacgatgcgaaatgccaatgaacagaagtccagcatgttggaactcaaacaacaaacacaaaagagcagcgagcaattaaagattcgacaaaaggaaatccaacaggaactggcagaagtagaaccaattttggctgaggccagtaacgcagtgggccaaatcaaatcggaagccttatcagaaatcagatccctgagagctccaccggaagctgtaagggatattttggagggcgtcctccgactaatgggcatccgagatacttcatggaacagcatgaagacttttctcgccaagagaggtgttaaggaggacatccgatctttggatccagctcggattagtcccgaaaattgtgaagctgttgaaaggctgctcctggccaaaggcgattcatacgaggccaaaaacgccaagcgcgcttctgcagcagctgctcctttggctgcttgggtacaggctagtgtacgttattccagggtgatccagagcatcaagcccctcgaaagggaacagaatgaattgcagaaaaatctcaatgcagctgaggatgaaatgcaagagttggccagcggactggatgatgtggataagcgagtcaagcagttgtcggccaaattgcagacgtacacacaagaagcagcagttctggagctgaaactccaagaggcaagtggaaccttgcaggctgcagagctgttggtggaaaaacttagtgcagaatacaccacctggagccttcagttgacggagctcaaaaaggcccacaaaacactggacgcaaagactctattaatagccatagctatcaattac

SEQ ID NO: 37410 - protein, 2055 aa, DROSOPHILA
MILEFLEQEELTVISAVHSRSDGRIRFHHRIPNEELCLLFYKVPQVGHHRKEDGSEPLLGILTLEGGMVKSIYNSVSRVFSPSANSARRSEYGPELSGILENLHQNLGSSLGLPQSGITSLRNEIKYWQQKLGQKSSSRLDREAAQVFIGVLENMEKQISTIDGANPSGTIEEFLDHAHTNLDELWRLPYNYPQQRMADLLDIIGKRLLEVCLTQLLAEDVWSLNSSHVNNLMSQSIDTVDAWIQLCDSLTRLFWPNYVKHPWLGDSHVPKRGQQFKERLSEIRSIKQLYKQIATLLEDTELQEMFQEQAPFTEFNIFDTSSLGQNKWHKALQHFEQVLQPIDERIAAALKRQLHNHLSNPRQVIFIFSKYETLIQRPAVLELLTIEREQFLQSLHILLQDLRKAMVDSNMEPDTGHLSVICNECRWLKVVQHQIQEIEKVSHLISGREGFDKINKAVQEIKEETESLLRTNFEIWSGQCSTAVKSGELRLRDDQAVVKFEKEGRQLMRVTFNPKLVTFCQDVREFENLGYNVPLELRAAATHAAKYMCYARRLQQIATFHNTIGDRMIPCQRPIMLKNALELQRLVQSETVAWQDESSVQRYVDILQAAVSKLSSDNTLLVGYHEQAKRSVLKLMSTDLFTQNQIWKDELRHLRELVATLERQGYTHLDAFKLHWDHQLYKVLEYQYILGLLDMNNKLPDIHVKLVLRQRELVFSPPEEEIRELYFSQLRRFIERPCNFHGLSEHSQELFKSMVTVNRHHFGPLYQRAAELFDKLQDFKTIWLPWIALGCVDVDQLCGIHLNEAGDWDRNFRSCKHFSQQLAKLQQAEESIDCIVINVLPLRSDIEYISRRYWESLANSLRTAILTDVSLIQEFLQSALQFLQNVPMDEGSISQSGMKYEKIMSKLPQIEKTLEAVRAKDSCLGGWCKERVTALSGILLQWEQLQPLLENHAVILQRQVDMIKNQAETQLQNLKNEAEKFLLRWESTISELEANEHSTLDVFKERRLHWQQLQEKKTQLLEECSKFNMEFPAEMLTPFTEIEEQMEKQSKQWQVYDSFLTELQPVLHEEWAIYRRRPYVLNEFIGKWEGSVHASIDLPSKRIRQQVEQLQSALPILQQLQSESLSERHWARIFQLLNHKETKPLHSILLQDILQDFDVLQSAAQEISSIVRQASSEQIVRQALIELDQWSVTAQLKLITRTDASGQSVSLIKDYQEVLNKIGDNQSLLQSANNSAAFESFSDQAELWESRLNTLDALLSSLNHSQRRWVYLEPVFGSGTLQHEQALFKRIDKDFRFVMREIEMDPRVTSLTKINNITTIVNALETQLARCQQNLMSYITDKRNSFPRFYFLGDDDLLELLGQASKDAEVIQRHIRKLFPGCHSLSIRQVGPNPATSSDVNQYSITSVHSAEGDELKLSQPVEMKGDIEDTLRDQIYECYTGTTGGSDNLDEKILKKYASQVLATARALHFTRQAEQAIGSMSLGKLKQQLKDEITHLAALKNKSENGTLISLKLRALLLDLVHYSGVTEQLQKHNVVHTSDWHWLCQLRYYLGKKGGTSGEVNANRQVCVRMVYAEFEYAYEFLGQASKLVHTRLTHRCYLILTQAMHMGLGGNPFGPAGTGKTECVKALGAMLGRLVLVFNCDENVDTESMSLILTGLARCGAWGCFDEFNRLQEATLSSISMLIQPIQSALKERANSVQIGERQQIQLNQHCGIFVTLNPAGAEYGGRQKLPGNIQALFRPIVMQQPEPGEIARVMLFVEGFTEASAIASRIVELFELSGKMLSAQRHYDWGLRELKTVLMVCGEGLRDQLTSEDNNQSSANFEMSVVVRCLRSSTMSKLAPHDVNRFEMLLRNVFPEIGSSPAPETQLHQSLSAAFAQLGLCRSERQIEKALQLHEQLQKRMGVVLVGPPGCGKSTIISLLKQALCGTQLKVHTISPKSMSRIQLLGRLDADTRQWQDGVLTHTAVAVNQESSQVHSWIVCDGSIDPEWIEALNSVLDDNKNPAENSGHSITALYAHWSKWVGQNPAPSKSRAGELWLSVGHHQLLYSTDS

SEQ ID NO: 37411 - DNA, 2833 bp, DROSOPHILA
agaagtagtggggaaaaaggcaaagctgcaaaaatgaaccaggagtcctttggagatgtgctgaacacacaaccttgttgtgtgttgctaatatcttcaaacatcttgagctaaacccatttagctcatcatctcctgggcatcgaaccgtcatattgtaacattatatttcaaaaaaattaataataataataaataaataaaatgaatatctataaataataaaaacaataataatatatattaacctcaaattaccagctcttttctattttagcacaaaataactgtggataaaaaatacagataaaattaattcattttcttatgatctatctaaaatgaagtcaaataaatttaaaccagcattcttgatttaaatgtcaacaaaataacacataagcgtacatacgcattttcttcattcaaatttcaagcacgaaacgtgttgttctggtcaaacatttgtttaaatttctcatttttctcttccatttccggtgagtttcgaaagagaaaatgtgggagatgtatttataaaataagatttgcagacttctttcgagtgctgaaaatggtttacttaagtcgtccttggactccggccataaaccctttctacattggcccctatccgagatgcgcagtatgtccgtgcaacttcgacatttacaaaggatacacccccggtggctggcacagtcgttgctatagcagctattgacgagacgagtacctgtataaaatgcaagaataacggcgggaacaaatatagttgaactttgaaactgcacaccaattagcctcgcacacatctatgtagagaaataataaaattgattcatcgtcaccaaactgttgaatattgctggggaaataatataaatattccaatcgaaatggcttagatttcaaattagaactcctgggaattttagtttatcaggtcgcaaattgtgtgaaaatagttttctaaattcaaaattcaagtctcttggtcatgtcctcgtctgtggatcacgtggtacaccacgtactggccccaatggcaatcaacgtcctcgatcgcgtggtgccagtaatccgccaattggtgatcatcatgcatcaggcatttctggttgatcaccatgtgtcggagcccgtgatcgatgtatccggcatgattcagcccgttcgtaaaatagtcttgattgtaaacgattcaacgccggagcaccatgtcgaccaggagcaggtggtcagttcggatgacattaactacctgataaatgaaatttcgcgaagtatccgaaacttggcccgttcgacctataataccatctcggcgatggctggagagtagccctagaattatttgtcatcgtggtcgatcgaaaaatccgacatcgaccctcctgatcctccagaagatcctgctcctttgcccaagatatggaaatggttcacacggccatcggagttgcgggcatagtggccctgtttatggtagtttcccgttcgttaactgaagtgggtggcagggtgttaaaccaaacccgtgatccgatcgctgaccttgtgaggcgcggtggtccagtggcggatcagctgtccgccgtcgagggcgaaactcctctagtagagggcgatcgcatggatggcgcctgctccgtggtacaaagtattggaggcaaggcatgtgcctttgtaggaccattgcttcctaagtttggcagtgaacataattccgagggctcctccaaggaagacgaaaaggataaaaaggactcggaaccggtagtagtaaaacctgaaacaccgccagcggcagaattaaccgaagaggagtaggatctagtcagcaactatgtcgaatagaaagcaaaaaaaaggaaatttttagttttctctagttggccttggaaataaacttcactcatcttgtgggctttgtgggattcgaaacctagagagctcattcattttgaacagcttggactgaacacatctctttcgtaaaataaaacacaaaaaaaaacaatatgaaaaattgaacaaaaattctaaattcgtagccaaggattaacttcaacgtatttcttcagcaggaaaaaaaatcccaggtacgttctagttcgttaaaattgaataaaaaagttatacaatttaaaaattgtaaaattgctttgttccctatagtaatttttaaatatttggtaatgttttgttaataacaaaccccgttttgaatggttgcagccgtaccttttgagcccctcctgcagattttagaagagattccagtgtcctttaccaaatccaaactttcaagatggttctgatgctttgctgcagcttcgatcccttctacgttggaccctgcccacccggctgcctggctcctttgatgggaggaactccctattgcggatgtggtccctgtggaggttgctgtagtccttgctgtggtccatgtggtccttgtggtggctgcagctcgtgtccttgcggctggtgaagcgcccgctatcataggcattaatacggcagcaagcggtaacaagtcaatttaaagatcaaccttctggaaaagactgctggagaaatatgttgctgttcgaattcctttttgccttggccggggctaaaccaactaagctctcgtatacataaagaatttttattataagctgttcagtaataaaatgaattaaagtacaaaaggaactgctttgtgatatatctcaacaccgaatagatccaacctggcaagtggattacgtcaatgtaaacgtggatggccagcctccagttaaggatgcaaatgttgtcctaggtcttgcctagaaca

SEQ ID NO: 37412 - DNA, 765 bp, DROSOPHILA
atgtcctcgtctgtggatcacgtggtacaccacgtactggccccaatggcaatcaacgtcctcgatcgcgtggtgccagtaatccgccaattggtgatcatcatgcatcaggcatttctggttgatcaccatgtgtcggagcccgtgatcgatgtatccggcatgattcagcccgttcgtaaaatagtcttgattgtaaacgattcaacgccggagcaccatgtcgaccaggagcaggtggtcagttcggatgacattaactacctgataaatgaaatttcgcgaagtatccgaaacttggcccgttcgacctataataccatctcggcgatggctggagaaagatcctgctcctttgcccaagatatggaaatggttcacacggccatcggagttgcgggcatagtggccctgtttatggtagtttcccgttcgttaactgaagtgggtggcagggtgttaaaccaaacccgtgatccgatcgctgaccttgtgaggcgcggtggtccagtggcggatcagctgtccgccgtcgagggcgaaactcctctagtagagggcgatcgcatggatggcgcctgctccgtggtacaaagtattggaggcaaggcatgtgcctttgtaggaccattgcttcctaagtttggcagtgaacataattccgagggctcctccaaggaagacgaaaaggataaaaaggactcggaaccggtagtagtaaaacctgaaacaccgccagcggcagaattaaccgaagaggagtag

SEQ ID NO: 37413 - protein, 254 aa, DROSOPHILA
MSSSVDHVVHHVLAPMAINVLDRVVPVIRQLVIIMHQAFLVDHHVSEPVIDVSGMIQPVRKIVLIVNDSTPEHHVDQEQVVSSDDINYLINEISRSIRNLARSTYNTISAMAGERSCSFAQDMEMVHTAIGVAGIVALFMVVSRSLTEVGGRVLNQTRDPIADLVRRGGPVADQLSAVEGETPLVEGDRMDGACSVVQSIGGKACAFVGPLLPKFGSEHNSEGSSKEDEKDKKDSEPVVVKPETPPAAELTEEE

SEQ ID NO: 37414 - DNA, 2698 bp, DROSOPHILA
gcccgctatcataggcattaatacggcagcaagcggtaacaagtcaatttaaagatcaaccttctggaaaagactgctggagaaatatgttgctgttcgaattcctttttgccttggccggggctaaaccaactaagctctcgtatacataaagaatttttattataagctgttcagtaataaaatgaattaaagtacaaaaggaactgctttgtgatatatctcaacaccgaatagatccaacctggcaagtggattacgtcaatgtaaacgtggatggccagcctccagttaaggatgcaaatgttgtcctaggtcttgcctagaacagctgtttggggcatcaggtttattgcgcagtcgcgattcgaacgcgcaactcgaacaaaaacatagaatgtagagcattgtgtcaggtcaaaggttgttggggtagggatggaacacccccttctattattcaatctttgaatgaaaatgaaactgaatctccaatgcctcctgatgccatgttgtgttttggataagcgcgatttacagggccgtgtctgaggtgtccctgagtttttctgaggtggtgattccacttcatttacattcatgtgtgtgtgtgagctggccatttcactcttattttggcatcacttgctttgtttttccgcggaatttattgcggtaggtcggaattttcattgcttgccttccatttttccggggtttcctgcaagtatgcgagtgtgtccttgcgccatgttttatggccaaagttgtctgtcttgtatttgagttttagtttctcagctgaaagttttcgattgcattgtgtttcttgagtatgttgcctgggataagattttgtttgcgttgttataatggagcaacagtttctttaggtgtgaatattgtgttacggtctttcgaaagtatatgccacaagtctatttgtggtatttaaaaccgtggtatttttagtttagtatgctttctgccatatcacgtcttacaagaaaatacgatggaattcgggctcatccactccgcacaatgggcataccctgccagtgtcgacagctctcttaatgcacgctttgcagaaaacgtggccacaattggtggacactggtagcttctcgcggacatcttccaggcacacagggcagttgtagggcaagacagatttcttggactcctcgtcatctgatttgatccgtttgttgggaggagaatcctcgtttgaatctgaggattctgtatgtcccattggtgttgatgattcggtggagctcatactgctatcgaagctaatgctggtcgatgagctttcactatcactggaactagacgactctgagtcgctggaatactccaactgcacaacaaagttaaagctattaaaacctatggattccggatcgagatgaacgaacaagaacttaccaggaatggggttctgtcgatagatctgctgctgcttgaggagtccgagtctccgtaatactcatttggattccgctcctattaaatgatgttgtaatgtaaccaatggattctgggtgggacctggctagaacaataacttacagaggaaccgctgagtaagcgggatcttaatccggagggcgcgagtacgggagtgggcccggtgttatggattcgctgtgatactccagaattattcgaggtcctgaagttttccatttgaagtcccacctattccataaagtgtattatcaatagatttcagagctgggtgaacatgaacttaccaggtaactgaggcgagagctcaaatgtgaacggtttctggaaaagggtaaggaaataaccctagtgttctgctcccattcagtagaagagtctgagtcgctggaatcacccatttgaaatcgcacctgtttttgcagttttaatactaccaatgaattctgccttggaacttacaactttttacaaattcagttgaacccgtttccttgctttttatttgcaaatttacaagaaagctgtttgaacatatgtcaaaaaatcttgaaagttccaggacacaataccagtattttaagtgccaaaggtcacactgcgataaaaagtaccatttcaacgcgccaacaatcattgtccgatttccatgatttccaaattggatatttgcttaggattgtcaccctaagaagtactatttataccaggtactcgtggagtaaaagggtacactagattcgttgaaacaaatagaaggaatttccatttaattaagatacaaaaccgagtagatctggctatgttcgcctgtcttgccggccgtatgaaagaatcataggaactataaaagcaagaaggttgtgattaagcggacagattctagagacatagacgcagcacagattttttggccctgttgccacgcccactctaacgacaaaccgcccaaatcaaatttgtttataattttattagtcttgttaattcttatcgattagacacaaaactttttgccatgcccactctaacgcccagactttagaacaatttttaaatgttttcacattcatcgatatcccagaaaaatgatcgaatttcgcgttcgtattcccactagctgagtaaggggcatctaaaagttagggaactcgactatagcattctctcatgtttgtatcttaaatggttaacataaaattaaaaaatatgctaacag

SEQ ID NO: 37415 - DNA, 564 bp, DROSOPHILA
atggaaaacttcaggacctcgaataattctggagtatcacagcgaatccataacaccgggcccactcccgtactcgcgccctccggattaagatcccgcttactcagcggttcctctgagcggaatccaaatgagtattacggagactcggactcctcaagcagcagcagatctatcgacagaaccccattcctgttggagtattccagcgactcagagtcgtctagttccagtgatagtgaaagctcatcgaccagcattagcttcgatagcagtatgagctccaccgaatcatcaacaccaatgggacatacagaatcctcagattcaaacgaggattctcctcccaacaaacggatcaaatcagatgacgaggagtccaagaaatctgtcttgccctacaactgccctgtgtgcctggaagatgtccgcgagaagctaccagtgtccaccaattgtggccacgttttctgcaaagcgtgcattaagagagctgtcgacactggcagggtatgcccattgtgcggagtggatgagcccgaattccatcgtattttcttgtaa

SEQ ID NO: 37416 - protein, 187 aa, DROSOPHILA
MENFRTSNNSGVSQRIHNTGPTPVLAPSGLRSRLLSGSSERNPNEYYGDSDSSSSSRSIDRTPFLLEYSSDSESSSSSDSESSSTSISFDSSMSSTESSTPMGHTESSDSNEDSPPNKRIKSDDEESKKSVLPYNCPVCLEDVREKLPVSTNCGHVFCKACIKRAVDTGRVCPLCGVDEPEFHRIFL

SEQ ID NO: 37417 - DNA, 7021 bp, DROSOPHILA
tcttatttttttggctcgcccccctcagccattggtgtttcattcgcttgtcaggagtttcacaagctacaaaaaccgagttgcactgcagttaaggattttttccggtctgccagcaaagagcagcacggaacaattggcgtttcttttggcttgactttgccttttcctatttctatttaaattaattttagcgaatgtttaaggggcgtggtcgcctcttgatttttgctagacaatggggcgtatgtgtaatgtgttttgggtttatttaagctgcgtcaaaacacacggagaactgagctgctttaatgctttatttctattgtagtaagtcgtgttaaattgattttttcattcatagcttatcatattgttcttttggtagagaactgacaataaaatccaggccaccatgcatttctgttgcagatctgtccaagaacaatataaccaatatcacagagaacaactttcgaggacaggacaacctactggaattggacttatcgaaaaataaagttttacgcatggccagttcaacgtttcgccatttgacggtgagtacacaacgaactgttgattgatagccttttgtttgcatctgtcacttttgtccgggatttaaaattgaatattattatgttattcatatagttgtttaattacacccagagagaaaagagggattgctcgttcagagggaaatttttatgcacataggaattttatgaatgttccgtaaatttcatgaaaatcctttataaaccaatagtttgtcagtttcaatctcgaagctgattgcatttggccttcgtgtaataaattgtgtggcatttttaatagccttgttgctactgcaaatttgttgcctacttttcgggccgaaaaagaagaaaattctacgtgcttgaatttaagttctcctggtccacttttcccaattttcccggcagccggcggaagtgcaagtgcacagaagttagtttcgttgtcttcaatgtgctttcgattttgttttgcactgcgccctggtgacttcctttaccgcctcacttttccacttttccgctttcccacaccgccctctgccaggaaaagccagtgcagcgtttgcaacttttttggcagtttccgggacccggtaatatttgcctgatttatgaattattagccgtagctgcagtgcctgatcataaaacattattaatacagtgcgtgccgtaataaacttggtaaattgcttctcttgcccgaaaaggatctgcgtcgccttaatttggccgacaactcgattgtggagctcgtgcagcgcaacttcttcatgctaagtagactcaagtatctggaccttagcggaaatccgctgcaggatttacagccggatgtgtttcgcgatgtgccggtgagttgtctacaaatacaaatgtttaagtcttttgttatggcagcgaaacttgatgatttgttttgtcgcaggaactcaaagtgctcaagtgtcgcaattgccagctgaaaaaaatcaatccgcagatgtacaatttattgccgcttttaagcgaattggatttgggacgcaacgaggtttgtcttggccacatttattcgtccctcccaaaaaagagtttttccaattatttttccctttcgtgcagttcaagtttctcgacaaggatgaattccgcgatgtgaagagactgaccaaagttctgttggatggcaatcaattgtctgtggtggtggaccaactctttcgcatgcagaagagtcttaatcatctgggtgcgtcattgacattatactccctccgcgacggtcttttaaaaactctaaattgctttctacttgccttcctttttatgggctcattcgcttgaaccactttagatttgtcgtacaatcggttggccaaagtgcccaatgactcgtttctacagctgaccaacttgaccttcctggacttgtcctacaacaaactggttcgtctggagccgcagtccattagaagtttgagcaatctgctgacgctcaacataagtggcaacgtactaatggatcttagggagatgagagaaacctttgaggtgagattgaatattaaattgttacagattcaaatatttattacatatactgaaagatttcatgcataagccattgatatattatttttttttaacctgttccaaactatttttccagctcattccccagcttacacacctggcgattgcggatatgggcacaatgcccgttggtctactgcatcccttcaagcaactgagatatctcaatatctccggcaattccttgaacaacacggcattggaggtcatcgatccgtgtcgagaactggaggtaagtcactcacagtagttgcagcacctgggtaataattcagcctggaatgccgcacacatttgtccccgagatctattgtcctgcatcctggactgttgattcctgctggccaatttgtagaatatttcattgtaaagcattgaggggagattgtgcagccaggtaccatcactggaattgagggtggtggaagagatatttgcagttttcgttagcgtttgccgtttctgtttatacatttctgacaacgggccaaagccgtggctttattccgtttaccagccaggaggattcatgtcccatccgtctgtgtgtcaccctggtttttgtacgtgccccatgtcagtcagacccacttctctagctccttttttacgccccaatttatatccagccaactggtgtccttgcactcttcttgcggattgttttcggtgccgtgctggggatccattgttgccacagtcctgccatcgaattttctgttattgttgccgttttctatggcaaatgtattgggcaacaacaagagctgcaggagcatcaacagcccgagcaacaacaatcattttatagccattaagcctttcattttaattgaatttaattgtgtatacacttcactcaagccatttgggtactgttattgtggctgacccaaaaattacaaaattgttttgcttgattctctgagtcttttacacacgaaaaaataatttcctctcgttgggtaaacttatttacatatcaacagggatttattaaggcattagggatgcaattttttgttaactccgaataattcttaattccaaataattataatttataatatataatttaatgcaaaataaagctcagctcagaacttatatttctgagtgttgctatacgtgttcctaagctaattgtcatttaaacagaagagttttccaataaaaattaaacttttgtttaccaaccactcccttctgtccgtccacttgaaatgcacttttaattgaacttttctggccattttcccggcccttttcaccaacagtttttggacttatctcggaatcaattacacggcatcagcgaggacacggtcctcaggattcaaggcatacgcaacgtgcgactcgacaacaatcctttgatatgcgacgagtgtcacatggggaaattgataaatgtcgtgcgccaagtaagtggaaatgcagttgcaaacaaaataaacgccatcggctgggaaaattcaatttcaattagttttcgaagtcgttgctgattgatgacgaccatacaacacgaccatgagttgattcactttcggtttccctccttgcagctgcagtggaaatgggatacctatcccatttgctttctgccgaagagtcttcgaggtgcagaaataaataatttggatatcaacgggctgcacacgtgcttgactttcatcaccgacgaggagcaaaatgcagccagcacatcatataactttcttgagcacggtaaggacataatataataatgacataatgcagtctacatatttcatggtatcaaattatttgcgactgaaagtgaatatgtaaatcattgagttagtccttttatacggattatttatacccgttacttgtaaagtattaacaaatgcacaaatgatcagaatcactattttttatatatttgtaaaaaagttaaaatcaattcaactaccaaccgctaggtggagctttcgtttacagtcagaaacagtcgatttgcatatcgccatctgcccagcagggagtgcgagtatctgatagccgactacagacttctctcttgttttatcttacatttaatacactaaaaaaagtattccaaatgcaaatgcagttacgttaacacttaaatctctgttaattaaccgacaggtggtctcaatactctggccattctgggtggcatcatctttgtgctaattgccgtcattatactgtccttggttgcctgcttttcgaaaaatcgggctcgctactacacgagggaggaccatctgaatggcagtaagtacagattagtacctgaatttaaatttaattgcagtccagaggatgaggtgtcttaagccccgaactacgggcaaattgccaaatgcaggcgcagaagtaaaaatgggaaaaacgacatccggaaatttatgtgctggatactggcacgcgcatgattcaccaaattaaaaataaaggaaaaagtcgccgcacttaattaattacaagaacgtgcttcattatgccgagcccttagctcctcactcccagcgtaattggggaataaataaatttcacactgaccaagttccgccggcgctaatgtttgtgctcacctgaagttgtccttggggcatccgccattcagcagaacgtactcgagggaaaccttatcgaaagagaaaggggcaagggggccagagggtcggcaaaaagaaaacaaagccaaacttctgaatttacgcaattgtagcatttctgcacaaacaataaaatggccttagagcctgtcgccctgccacaacgaaaacttttggccgcacacaaaaattcgattcccacgataaacgggcagggaaaacagggcaaaaaaaaaaacagaaaaatttcagctgacagcaggcaaaaactgctagcactacccacacttcccacggagttcttagaattcagaaaaatgtgcaaaactatgatgccgccgaagcctttcgctgccccagtttgcacacaggcactctaaaaaaatattattgaaatgaacagaaaagatagacgtgaaaactattgaaacagctggtctcgggagttatttcacaattgtgaatagaagctttgtttcctaaagtataaaatattacgaacttaaggctaaattaaaaaataaataaattaattatttacctcatcgaccttaagtaaataagaatattattaaatatataagtaccaatttcgatttttgaagtgcatctggatgggaaccgatattccatagctggctctcatttgtttctcctttcgttctttttattctgactccccaggcgagagcaagtgcctggaaaaaaatctggaggcgaccacgattacaacgctgggcaatggcagctcgcccaccacgacgaccacgctgaccctggccacctccccggcggcaccaaatggtccaaagacgaatggacagggcctgagcctgagtcctgccaatggcagcacgcccgttcacggaatctccgacgacaagggcaaagaaatcaacttcacctttcccgtggatgatcgcgtctgcaccattgacgaactgatgccatcaccaccgccgcctccgcagcagcatccgcatccgaatatgggcagcctgatgtacagtgtgtcgcactcgccgaactcagctacaactctggcagctgtggcagcggcggcgactgttattccgccaggagccccctctcactcgtccatgcccacgcccacacccactcctgccgaggctgtggttgtggtcctgcccccgccaccgctaccaccacaacagcaccaccaccagatggacggcagcttggccagcctgcgggaggtgcagcagcagctggtccatctgagcagcacgctagagccgctggtcagcgttaactgacccaggggcccatcgggagccaccgcgtcctcatcagctacgaagtttgcccagcaaacagttggcacgacaccgacgtaagccgccggagagttggatttgcagtgtgcaacgggacgacggggcgtataattaatggccatgcggggtcacattgaagtgcagtaattaggatttgagttcgcaattaagttcattaatcactccagacgatcatcatcaaatttggcctttccccgaaggaatacgccattattccatactgccattttcacaattaacgaactttaccagtgtttcactaagatacttgtaacttaattttaatgttttttatatgcgcatctgtatataaaatttgtctacatttaggtaaagtacacacgattcatttcgacacatttcaaatgtgataaaaccgagcgtattctgtaaataagtattaacgcaagcgaaccataaaaactaaggtgttaaatgtgtaagcgaaaaaatgataaatttgtatatttggccaatgcgattcaaaattgagcagccgctgtttgagaatttaaaagtatacattaatatagcacgtagttagtggcatagatttccaagacacatacaaaacctacaatatatagaactagcatgtaaggcatgtcaaagtatattgttcaaacccaaaaccagcagaagttggcaatcatttgaatgaaacccaactaggagcccaaacgattttcggttctcccctcgaatcaataacagaacttggcattttcacgtatccttaagtcggaaaattgtatttattttacacagcaataaccgtaatccataataaagtgtgactgtttatgaaaccaaaggagatacgtgtcattcttgaaaccaaaaatggaatccgcaaaaatggtaaggtcttcttgcgagcaatttatttaataaaaattcacatttactgcactgcacacttgcatcatttgcggttttccgttcttggccctgcgcc

SEQ ID NO: 37418 - DNA, 1803 bp, DROSOPHILA
atgtgctttcgattttgttttgcactgcgccctggtgacttcctttaccgcctcacttttccacttttccgctttcccacaccgccctctgccaggaaaagccagtgcagcgtttgcaacttttttggcagtttccgggacccggatctgcgtcgccttaatttggccgacaactcgattgtggagctcgtgcagcgcaacttcttcatgctaagtagactcaagtatctggaccttagcggaaatccgctgcaggatttacagccggatgtgtttcgcgatgtgccgttcaagtttctcgacaaggatgaattccgcgatgtgaagagactgaccaaagttctgttggatggcaatcaattgtctgtggtggtggaccaactctttcgcatgcagaagagtcttaatcatctggatttgtcgtacaatcggttggccaaagtgcccaatgactcgtttctacagctgaccaacttgaccttcctggacttgtcctacaacaaactggttcgtctggagccgcagtccattagaagtttgagcaatctgctgacgctcaacataagtggcaacgtactaatggatcttagggagatgagagaaacctttgagctcattccccagcttacacacctggcgattgcggatatgggcacaatgcccgttggtctactgcatcccttcaagcaactgagatatctcaatatctccggcaattccttgaacaacacggcattggaggtcatcgatccgtgtcgagaactggagtttttggacttatctcggaatcaattacacggcatcagcgaggacacggtcctcaggattcaaggcatacgcaacgtgcgactcgacaacaatcctttgatatgcgacgagtgtcacatggggaaattgataaatgtcgtgcgccaactgcagtggaaatgggatacctatcccatttgctttctgccgaagagtcttcgaggtgcagaaataaataatttggatatcaacgggctgcacacgtgcttgactttcatcaccgacgaggagcaaaatgcagccagcacatcatataactttcttgagcacggtggtctcaatactctggccattctgggtggcatcatctttgtgctaattgccgtcattatactgtccttggttgcctgcttttcgaaaaatcgggctcgctactacacgagggaggaccatctgaatggcagcgagagcaagtgcctggaaaaaaatctggaggcgaccacgattacaacgctgggcaatggcagctcgcccaccacgacgaccacgctgaccctggccacctccccggcggcaccaaatggtccaaagacgaatggacagggcctgagcctgagtcctgccaatggcagcacgcccgttcacggaatctccgacgacaagggcaaagaaatcaacttcacctttcccgtggatgatcgcgtctgcaccattgacgaactgatgccatcaccaccgccgcctccgcagcagcatccgcatccgaatatgggcagcctgatgtacagtgtgtcgcactcgccgaactcagctacaactctggcagctgtggcagcggcggcgactgttattccgccaggagccccctctcactcgtccatgcccacgcccacacccactcctgccgaggctgtggttgtggtcctgcccccgccaccgctaccaccacaacagcaccaccaccagatggacggcagcttggccagcctgcgggaggtgcagcagcagctggtccatctgagcagcacgctagagccgctggtcagcgttaactga

SEQ ID NO: 37419 - protein, 600 aa, DROSOPHILA
MCFRFCFALRPGDFLYRLTFPLFRFPTPPSARKSQCSVCNFFGSFRDPDLRRLNLADNSIVELVQRNFFMLSRLKYLDLSGNPLQDLQPDVFRDVPFKFLDKDEFRDVKRLTKVLLDGNQLSVVVDQLFRMQKSLNHLDLSYNRLAKVPNDSFLQLTNLTFLDLSYNKLVRLEPQSIRSLSNLLTLNISGNVLMDLREMRETFELIPQLTHLAIADMGTMPVGLLHPFKQLRYLNISGNSLNNTALEVIDPCRELEFLDLSRNQLHGISEDTVLRIQGIRNVRLDNNPLICDECHMGKLINVVRQLQWKWDTYPICFLPKSLRGAEINNLDINGLHTCLTFITDEEQNAASTSYNFLEHGGLNTLAILGGIIFVLIAVIILSLVACFSKNRARYYTREDHLNGSESKCLEKNLEATTITTLGNGSSPTTTTTLTLATSPAAPNGPKTNGQGLSLSPANGSTPVHGISDDKGKEINFTFPVDDRVCTIDELMPSPPPPPQQHPHPNMGSLMYSVSHSPNSATTLAAVAAAATVIPPGAPSHSSMPTPTPTPAEAVVVVLPPPPLPPQQHHHQMDGSLASLREVQQQLVHLSSTLEPLVSVN

SEQ ID NO: 37420 - DNA, 2339 bp, DROSOPHILA
catgaataataagtaccatatgttggctctctgagcaagaaatttatggtctctcaatgtaaaggttctttttgtttttgggcacttgctgcaaaagtgcgcgaaatgaggcggtaacaaaaatagcactgaccacgtatttgctgaataatagagtgattgctttgggtttttttcgacaaattttgaaaaaggagttgtattaaaggttttaattgaattttttccaaacgaagaccaaaagttctctagtcatgggtcgcggcaagcattttaccgtcgaaaaaagaaatttgattaaaaacatgatctctaaaggtaaaaaatacgctgaaattggtggcattgtgggttgttcaagctaaatgatccgcaaagcactgctgtttgtcgaaaagaacgaaacacggcgaagaaagccctcaatgtcgcttggttaggcaaggcaagaaggagcctttaaagccggcgacggaactgaagaaggagcttcagatagctgaaagcggggaaactgacaaaaaagagaatctctcaagacggaaacagagtgccagaagtatataagtactgaaatgcctaatatatgaatgtaaaacatttatcgcttttaatagattgttatcaaagttgatagggtttgatgattcgtaagtaagcataaattgataacgtagaacaaattgatctctcttcgcaatctcttacttcaatgtgattttcttgtcattttgagactcttctccgctctcgtttgacgggttttctcagacttatatagttatcttatctgagtcacaagcaacaaaaagaagattgtcagctcttgacggttcactgtttgccttgttgttgcctcaattaccaccttctgccgtggcgataataacccagaccccaaactgattggtaatcatgaaaaagagggaaggaaaaaaccgctgaaaatgcccggagaccagcgaatcgctctttagtcgagagcagaacgcgttttgaaatggacacggatgagactaaggctggaacctcgggtccggggacgtaccacgatgaggttgactttaccagcggatacgagactcagtataagaaggagtacagcccgctgaaaccgatttttgtaccgccgccggataaaaagcacgcctggtttcgcaactggtccaccatactgatggtcagcttcctgtccggggtgtttattctgggaaccgtgatgctggtggtccaagttttcaccgccagtcccctgcagatcttcatgatcgtggctatatatgtggctatagccgctgtgatgatttggctggaggtgcagtctataaaagtgcggtgaaataatatgtacgtgtcgtgactaatttagagcgttatcgcacttacgagctacgttctgttttcaaacagtggcaatcgaactgtgttctgctagcaaatgcaaagcttaactaaaaaggaagcggctttactgattaggcgctaagaacaaaaaatcatgatttaatataagttcaaagtaaagaaagaaatcccataatccatgtgttttatttttgactagacagtgcttttaacgttttccgataattccggttcaattaactaattatttacggcccataaatgaacgtaatctagagagcgaaacaaggtggccagataaagggctttgtgtgagataagcaaacaaaagtgaacgaaagaatcacgaattcaagccatttaactgcaaaataaatacgcattttgtttgtcgatgtataaaggacaaatgttgtagtgacacattaaagctccatacatcacagagattaacaaagcaaagtacataaaaaagattcccttatcaattaactaattaaattaagcacgctaattaaaaattcattaatagcggcttagcgatggagagtggaaattcaattatttaacgctgttgtttattaaaggaagtgtcacaaaccgcatctgcgccggtgtttggcacacaaaattattaaaattatttccactctcacttgaaaaagaaaaaatacaacgaattttcaactatgccagttcccaatggaaatagttctctaaatattttcacatttgcatttttctaaatcacttctgtaattgcttttcacatgccactgctggaaaaactccgactccctcagaattttccatgtttttacaacagttttctcacttgtgtgtgccatcaagttggtaaaattctagtttaatagcttgaaatgttacgaacatttggtcagcgtaaaaacagccggacaagcttatttctcacttggaaattctaaaaaaaaaaaacgttgtcccattaaact

SEQ ID NO: 37421 - DNA, 339 bp, DROSOPHILA
atggacacggatgagactaaggctggaacctcgggtccggggacgtaccacgatgaggttgactttaccagcggatacgagactcagtataagaaggagtacagcccgctgaaaccgatttttgtaccgccgccggataaaaagcacgcctggtttcgcaactggtccaccatactgatggtcagcttcctgtccggggtgtttattctgggaaccgtgatgctggtggtccaagttttcaccgccagtcccctgcagatcttcatgatcgtggctatatatgtggctatagccgctgtgatgatttggctggaggtgcagtctataaaagtgcggtga

SEQ ID NO: 37422 - protein, 112 aa, DROSOPHILA
MDTDETKAGTSGPGTYHDEVDFTSGYETQYKKEYSPLKPIFVPPPDKKHAWFRNWSTILMVSFLSGVFILGTVMLVVQVFTASPLQIFMIVAIYVAIAAVMIWLEVQSIKVR

SEQ ID NO: 37423 - DNA, 3298 bp, DROSOPHILA
agccacctgctctgcgcgctttcgacaattttcgcacttaaaccgcagaaattttgttaaattttcattaaaaatacatggcttggcaattgtggcagctgtgtcggcatcaaaatgtcactgcgttccggctcccattcccccgaaaagcttttgcatccgctcctgccggctcgtgtgaaaagtttgagggggtggcgaatggctgtccctgcaccggaatatccaagcaagttacaccagtttgcaattataaatgcaaatatgcacgtggctgtcgaagttattttatttaaaaatatcacgggagaacccaaaatatttcgaagaattttgggaaagtaaaccttatttgtcaaatagttgtactcgaaatgtttttgagctaggtactgctctataagtattcctatatataatatataagtattcctaactaataagattattttttaagtctcaatctaagcagtggcattccatttaaattccatttaaattaagactgaccaaatcgtaaagtatatgcaacatatcggaaattcatcaaatggcacacccattaaatttctcaattaaatatctgctcactttcatgcaatacgagccctgcgcaaagacaatatccatttcgcattattttctcctacgcacctcgaaagagcaggacaataaattgcttcagcatattattgttaagcatacatcaaaataatcaactatgaaattctatccgcattccgatgaacctgtttcccgtacgcattttgccattattgtcaaccacatgccatatatgccactgggctttccataatttatttgcatatatagatacatgtgacttaatgccggagccgggcatttaattaaggcaaatccgtggccatggaatgtcctggttcacagtgccagtatcactgctgcatttaataatgtcaattccagttgacttgtgtgcgttgatttagttaagactgccggctttatttatgccaatttacagatctgtggacaccagggaatcctgtgaccgccggaccgtgtaggtcagctggaagcccgtttcagatccactggactgcgaatcactggcgaatcgcaggacaaaaggcggccgggccactagctcctggccagccaatccattgccacagtagtgagtggcctgcagctctggcctgccgaccatgtatgcatcgggaatgctcacatagtcagatacgcgcaacggagtcagcactgtactgcggcaatcggtgtcataggcaggtcctggctgctcggagttcgccttcgagagctcaaagtgcgtgatcttgtagctgttttggagaaagccgagaaatattacattattattatatttttatagttaatacgaaattattgtgtactaactagtaaaacattattcatttgtaatacacaaaaaaaagaagtattcggcaatgaatgacaattataaatgttgactagaatacggcgagaagcgtgtgaaatatattcggagtggtgactcactcaccttatctcgttgtctgccgctcccttgacacaaatcgagtacttcatgttgggcatatagacgccacctgcaaaattgaagctcactattccgccagtggtggtcctgtagtactgatcacagcccagaggtgccaacatctccagatccgcacttgaaggcgatgtgaaagtctggataagctgggcagcgggaccggaacccgagccgattccagattgtccgccaaagatggtccgcggcaggaagttacccaaaaagggcaaaatcggtcgcacagtgggtgtttgcacctcgggttgccttgtacctacacccctggcggagtccctgggacactctagttgggtgagagtcagctgccaggtggactgcctgccgagggacgtggccagtcgaaacagaagctgcagctcctgaccccggcgaatgggtatatacaagtgctgaccactgttgcgaccgcacagccggaaatgctgtatctgcagaaaatcgacgcactccagcactccggaattggcattcaactgcggctgcggcagctccaaacgctcgaaatcaacgcgcacctgacacacctggccgctccacggcgccacgcggtactggcaagtgtccaactcggccagcccacctgttcccgggctgctgagaacgatgcgtttctggcggacagggccgctcctcgcattgcaggccacctggcagtggacaggtgtaaagactggtgcaagcacgagtgcaatcatcagcaggtggaaatccatttcgggtccaattcgttggggggtacgaacttcgattgggaaattttcgctgaacagcgcttttatatcagtttctgagagcaattgtatccatcgacagataactgccattgacactcgacgataaggcccacaagatgtttgctggcgataaagtatttggacagcgatgcgtccctggaaattccatgtcgcggttatgaaatttttggtaaacgaaagcagagccaacttcgctgattcagcgtcgagtgcaaaaagactgagttgcttctaattattaggtgtccccaaatatttaaaataaattaaactatttaaatataatatttgagtatatatagaaattatacttataaattcgtataaatatcgctctccaaggacttttccctcaacccaatttatttggcccaagtgggattttccttcattatctcggtaataattatcgaataaataatgcgctggggagacacgtcaggcatgcaatcttccagtttgcaccctcaccttccggcagataacatttgttctcttcggctttaagccttctcttcaaataggaattcattgcccaaacgttttatcaataaatgccacaaggaagttttacgcacattttatgataaaggtagagaggcgtttatggccccctacaacacttatgaggtctcacaccaacacacacgcaacgaaaaggacctcagcgcacgtaaaacaataaaattcgaggcatttatatgagcatacctttgattgtgttcaaatggtggagagcatatgtggtacagccccctgctgccaatttacataatacataatttgcggcataggttaccattttttgtgcgcgccctataattaaaattaaaaagctcgtgcaacatctattaaattttacgtttaacgcatataaagtgacaaaaaatacccgccgagctggcgttaaaattaaacaaatggccaaataatactaaaattgcatgcacagcgcgat

SEQ ID NO: 37424 - DNA, 1095 bp, DROSOPHILA
atggatttccacctgctgatgattgcactcgtgcttgcaccagtctttacacctgtccactgccaggtggcctgcaatgcgaggagcggccctgtccgccagaaacgcatcgttctcagcagcccgggaacaggtgggctggccgagttggacacttgccagtaccgcgtggcgccgtggagcggccaggtgtgtcaggtgcgcgttgatttcgagcgtttggagctgccgcagccgcagttgaatgccaattccggagtgctggagtgcgtcgattttctgcagatacagcatttccggctgtgcggtcgcaacagtggtcagcacttgtatatacccattcgccggggtcaggagctgcagcttctgtttcgactggccacgtccctcggcaggcagtccacctggcagctgactctcacccaactagagtgtcccagggactccgccaggggtgtaggtacaaggcaacccgaggtgcaaacacccactgtgcgaccgattttgccctttttgggtaacttcctgccgcggaccatctttggcggacaatctggaatcggctcgggttccggtcccgctgcccagcttatccagactttcacatcgccttcaagtgcggatctggagatgttggcacctctgggctgtgatcagtactacaggaccaccactggcggaatagtgagcttcaattttgcaggtggcgtctatatgcccaacatgaagtactcgatttgtgtcaagggagcggcagacaacgagataagctacaagatcacgcactttgagctctcgaaggcgaactccgagcagccaggacctgcctatgacaccgattgccgcagtacagtgctgactccgttgcgcgtatctgactatgtgagcattcccgatgcatacatggtcggcaggccagagctgcaggccactcactactgtggcaatggattggctggccaggagctagtggcccggccgccttttgtcctgcgattcgccagtgattcgcagtccagtggatctgaaacgggcttccagctgacctacacggtccggcggtcacaggattccctggtgtccacagatctgtaa

SEQ ID NO: 37425 - protein, 364 aa, DROSOPHILA
MDFHLLMIALVLAPVFTPVHCQVACNARSGPVRQKRIVLSSPGTGGLAELDTCQYRVAPWSGQVCQVRVDFERLELPQPQLNANSGVLECVDFLQIQHFRLCGRNSGQHLYIPIRRGQELQLLFRLATSLGRQSTWQLTLTQLECPRDSARGVGTRQPEVQTPTVRPILPFLGNFLPRTIFGGQSGIGSGSGPAAQLIQTFTSPSSADLEMLAPLGCDQYYRTTTGGIVSFNFAGGVYMPNMKYSICVKGAADNEISYKITHFELSKANSEQPGPAYDTDCRSTVLTPLRVSDYVSIPDAYMVGRPELQATHYCGNGLAGQELVARPPFVLRFASDSQSSGSETGFQLTYTVRRSQDSLVSTDL

SEQ ID NO: 37426 - DNA, 4995 bp, DROSOPHILA
cattttataaagaattcacgactttataatgaaaataacgaatgagttaaacattcatttgttaaagatattaaaatacatcaatcatttgggttgattatgattccacacttctgattcaaaacacactttgagattttttctaatatcttgatcaactttatttgtttgactcttttttcgattttgtttttgaatattgatacgcatgctcatcaacatgtgagatatgtaaaatacattaaataggtattggaaacaactgcttattgaatgtttacgaataacagcaaccacctaggtaggaatacatgatttataattcattatattaatatagctacagcttaatgcgaaaatcggtagtatttacaaatgctctacacgtgtacaactgacgggttttttctttttaaacaaagcactcgcttgcgaacgaaatcacttcgaataaataaataaagtatattcataaataggcgaaaattacatttggaaatttggctaatgagagagttttacactaactaagctgcattcgtatctcgtatttacacgtaacagtaacacatcatttagattccatacttcaaataaatacaatgaaatattacaagaataccagcgattacgaaaagctcgattggcccttctttttgcaatacttatgtgtgtaggagagagggttgctttagataataatacttagtttatagtacaattagctaactgcgatttcgattctacattctaccagctcgctttcaagagtgccacaactcaaaaatccgtccgagctgcattccaataggtgagatatatatggtgaacatttggtttttgatccatgacagtcttgtagtagcgagctagcgattttgttatgtggcttcgcgtttgatcttttaacttatggtggcggcacacgctgcactgggattgtctcagtttgagttttggtttctgggttctgtttgcccctccgtccacgtcctgatcctcaggaggagttggagtgacgctccggcgtggcgacagtcttctggtagcaattcagattggccgacatccgaccaaaggcggctgccatgcggttgggcagcctgctgaggtgctcctgaagattggacgatctggatgaggacggagccgatgggcccgacgccgtggtgacctgctgcagctgggccaccacctcggcgtgctgaacgtaggagacccgtatgttgaccccctcgtcgtcgtcctcgtccacctcgctgccgctctccacgtcctcgtagtaggtgaagcccacctgctgctcctcccgctatacattgccgtagtacggcatcggggtgttctggtcgatgggcttgacgcgcagcttctgcttgtagtgatactccttaaggtagctcttcagccgaccgggcagctccatctggttgatcccgtcgtagctggtgttggacacaatggtcgcccgggagagctgctgcagggagaaggtctgccttctgtgcaggggtatcgtcaggcagggctcgaagaacatcacgcaggcggggtccttgtagtgctccaaaagtcctgtcaccgtgggcgccgtgaacacacacggatcgtggcagtcgaagctgtagaagaatggatatcgttagtcaccagtttggatttcaaggtgctgtggaatttcgagttttgaaatatttaaaaagtttaaatgaacaaatgttggattttcaacaagtgctgtcttcaagtctaacattgttgcgataaaatgaactcattacaggcagcgacgactcatcaatataatttaatcggaattaccaggaattgtctatcatatttcaatgactcgcccatgcatgtcagctgcggattccgagaaatccgttgagataaggactagtgctcacctgaacttgtgaccgctctgctcgatgcgagcgtgcagtgacctgccgtacttccggaatgtgaccgagaagaggaactcctcctgggcggagtcgcgcagcaggaacgtgccctccggcttgccctcgagcaggtgctccgcctcgtagcggtccatcttgccccagtagaagctgctgttcgtgatcttctcgagatcgggaaccaggcagtgcatgaagtcgatttgcgagtgcacggtcatgttgcgggcggctccgattccggcatggccagcccctccggcgggggcgaccgtggccaggggacgtggccggggcggagtctggggcgactggggggcgggctcggtgaccacagttacgcggccgccattgggcgactcgaccacgaagcccggcgatgtgatccgaatgatgagctgatgatggtgatggctggcgtccggaacggcgacggaatttcgtatcctttggctctgcatccggcgctgtgagccaccactcgatgtgcccagcgtgggcggtgtggagcggcggtcagctgtccgggatttcctcggaaccatcgccaccaccgcagcggcatcctttttattgctcacggaactgctgctgctcggcagcatatcccttaatcctcggatggcgtcgcggcacttgcacttgcagcatcgtcgcttcgaggatgtggatgtggacacggatgtggatgcggatccggaggcggaggatgttgctgctcccattgaaagtgctttactgctgcgactgcggcagcaactgttgctattattgcttctggaaactgttttttcggagaacaaaatttattattaatttgattcactttaaatttgatgagattaggtcggattctcttctatattggtcagctgtgcacagcgaaaaatcccttgatcatactatacatttcgtcgaattcattgaactgaacagaaagtggcatttccaacgtttcactttcatgaaattttttggtgagtaattcgaaattattatggttctgttctgaattctaggcagtagttagattgttttgattagcttttactcactttaaaaagttcatgatgtcactacttgattggatttcatcacttggttaaatttttgaaatcacacaactgaatcttaattgctgacaaattggatttaaatattattcacttattatatgttttgattcgttaaaaaaaaaaatcgtgccgatttttcgctgtgcactttccaaattgagaagagagttcgctcgctctcacactccgacttttgcccacctggcttgctgctgtgttgcgttcccgccgacaacatattgctgactggcagcgactcgagcacttcgcaatactcgacgacttcggcctcgtgctgctgctgctgctgctgctggtggtggtggtggtggtggtggatgttgctgcggctgttgctgttgctgcgacgccgacgcaacagcgactcatccaggtcgtcatcgtcgtcggcttccaaggggcagttggcgttgccgccatggttgtcgtgcagttgtaacgtacttatcgcagcgccgacgcttcccgctaaaccgttgttattcacgggctgtcgttcggttttggccgcttccggcgaactgccagcagttcgatttgtcaccacgcccacctcgccgtagccgccctccagcgtcacattcacaatctgcccatttgcattcagcgaatccgcagacagggcggcggcgtcgtcgtcggtggcaccatctgcgcattgccgctgctgctcctcctcctgttccaccacctcggcgaaactttccacctgaccagcggccaccggattgccgttctccattttggccagctggattttgatgatgatctgacgcacttccgccggcgatgtggcggctgagacagtggcctctgtgaggatctcttccacctgcagctcctcctcgtccaggctgatcgtctctactagtgctgctgcttccctggggctcgagctggcggtaggatttctcttttcctggctattggcgcgtgctgagaacttgctaaggtgatgacccattggaagctcgaggtggggcagagtcctagttggcgtggacctccgattgttttctggaatgaaggaatgggaaatcgtacacttagtttacatgtgccatcaaacatttaatgcctattgctttatccacctttattatttactgggaattgacagtaaagaattattacatggactaatagaagatcccgccgttaatttcaagttaattattgaccagatcagttagcacgtttcgatttggttaatattagcacccagcgcatttcgcaagatccagaaatagccgggttccgattggaacgagttttgcccagttcccccaacggcgtgcgaagtgtcttgacctacagcaatgagtccatccacttggcgggggcttcaccagtgcgttaattagccacttggacagacggagaagtaccacagtggcactccgagtgggacttactcgttcgccggtcaaatgggcaattaaatgccactgtctaactattttgattaatggagctacccccagctgatcttctgcggcacagagttgtgtatatctcccccacgaactgactcatcatcccggagggatctagttgatctgggtgatctcgtcatgcatatgaggacgataaacagcggcattccaatcccacgcatcagttagtgctcccccaaagagcaagtacactcgaacatttgttcaccaaatcgttatgggctcatcctatttttagaaacctgcccatggagaggtgatgaatcaatgtggaaagcgagtgcacacgacgccgtgcacgtagtgcctccatccttgattccaatcgcatttgactgacttgcgggtcaagctgccctacttatctccatttgaacggcgcccacaaagtacctcctccattcatggaacattctatattattcacagctaaattctacataattcgtgtgcacgtcattacgtctctctgggaactgggtgttctggcgggcaagtgaaatcgca

SEQ ID NO: 37427 - DNA, 2181 bp, DROSOPHILA
atgggtcatcaccttagcaagttctcagcacgcgccaatagccaggaaaagagaaatcctaccgccagctcgagccccagggaagcagcagcactagtagagacgatcagcctggacgaggaggagctgcaggtggaagagatcctcacagaggccactgtctcagccgccacatcgccggcggaagtgcgtcagatcatcatcaaaatccagctggccaaaatggagaacggcaatccggtggccgctggtcaggtggaaagtttcgccgaggtggtggaacaggaggaggagcagcagcggcaatgcgcagatggtgccaccgacgacgacgccgccgccctgtctgcggattcgctgaatgcaaatgggcagattgtgaatgtgacgctggagggcggctacggcgaggtgggcgtggtgacaaatcgaactgctggcagttcgccggaagcggccaaaaccgaacgacagcccgtgaataacaacggtttagcgggaagcgtcggcgctgcgataagtacgttacaactgcacgacaaccatggcggcaacgccaactgccccttggaagccgacgacgatgacgacctggatgagtcgctgttgcgtcggcgtcgcagcaacagcaacagccgcagcaacatccaccaccaccaccaccaccaccagcagcagcagcagcagcagcacgaggccgaagtcgtcgagtattgcgaagtgctcgagtcgctgccagtcagcaatatgttgtcggcgggaacgcaacacagcagcaagccaggtgggcaaaagtcggagttttccagaagcaataatagcaacagttgctgccgcagtcgcagcagtaaagcactttcaatgggagcagcaacatcctccgcctccggatccgcatccacatccgtgtccacatccacatcctcgaagcgacgatgctgcaagtgcaagtgccgcgacgccatccgaggattaagggatatgctgccgagcagcagcagttccgtgagcaataaaaaggatgccgctgcggtggtggcgatggttccgaggaaatcccggacagctgaccgccgctccacaccgcccacgctgggcacatcgagtggtggctcacagcgccggatgcagagccaaaggatacgaaattccgtcgccgttccggacgccagccatcaccatcatcagctcatcattcggatcacatcgccgggcttcgtggtcgagtcgcccaatggcggccgcgtaactgtggtcaccgagcccgccccccagtcgccccagactccgccccggccacgtcccctggccacggtcgcccccgccggaggggctggccatgccggaatcggagccgcccgcaacatgaccgtgcactcgcaaatcgacttcatgcactgcctggttcccgatctcgagaagatcacgaacagcagcttctactggggcaagatggaccgctacgaggcggagcacctgctcgagggcaagccggagggcacgttcctgctgcgcgactccgcccaggaggagttcctcttctcggtcacattccggaagtacggcaggtcactgcacgctcgcatcgagcagagcggtcacaagttcagcttcgactgccacgatccgtgtgtgttcacggcgcccacggtgacaggacttttggagcactacaaggaccccgcctgcgtgatgttcttcgagccctgcctgacgatacccctgcacagaaggcagaccttctccctgcagcagctctcccgggcgaccattgtgtccaacaccagctacgacgggatcaaccagatggagctgcccggtcggctgaagagctaccttaaggagtatcactacaagcagaagctgcgccgggaggagcagcaggtgggcttcacctactacgaggacgtggagagcggcagcgaggtggacgaggacgacgacgagggggtcaacatacgggtctcctacgttcagcacgccgaggtggtggcccagctgcagcaggtcaccacggcgtcgggcccatcggctccgtcctcatccagatcgtccaatcttcaggagcacctcagcaggctgcccaaccgcatggcagccgcctttggtcggatgtcggccaatctgaattgctaccagaagactgtcgccacgccggagcgtcactccaactcctcctga

SEQ ID NO: 37428 - protein, 726 aa, DROSOPHILA
MGHHLSKFSARANSQEKRNPTASSSPREAAALVETISLDEEELQVEEILTEATVSAATSPAEVRQIIIKIQLAKMENGNPVAAGQVESFAEVVEQEEEQQRQCADGATDDDAAALSADSLNANGQIVNVTLEGGYGEVGVVTNRTAGSSPEAAKTERQPVNNNGLAGSVGAAISTLQLHDNHGGNANCPLEADDDDDLDESLLRRRRSNSNSRSNIHHHHHHHQQQQQQQHEAEVVEYCEVLESLPVSNMLSAGTQHSSKPGGQKSEFSRSNNSNSCCRSRSSKALSMGAATSSASGSASTSVSTSTSSKRRCCKCKCRDAIRGLRDMLPSSSSSVSNKKDAAAVVAMVPRKSRTADRRSTPPTLGTSSGGSQRRMQSQRIRNSVAVPDASHHHHQLIIRITSPGFVVESPNGGRVTVVTEPAPQSPQTPPRPRPLATVAPAGGAGHAGIGAARNMTVHSQIDFMHCLVPDLEKITNSSFYWGKMDRYEAEHLLEGKPEGTFLLRDSAQEEFLFSVTFRKYGRSLHARIEQSGHKFSFDCHDPCVFTAPTVTGLLEHYKDPACVMFFEPCLTIPLHRRQTFSLQQLSRATIVSNTSYDGINQMELPGRLKSYLKEYHYKQKLRREEQQVGFTYYEDVESGSEVDEDDDEGVNIRVSYVQHAEVVAQLQQVTTASGPSAPSSSRSSNLQEHLSRLPNRMAAAFGRMSANLNCYQKTVATPERHSNSS

SEQ ID NO: 37429 - DNA, 4381 bp, DROSOPHILA
taaagattctaatttaagtttgctaacttacaaaaagtgtgctaatccaatgattcaaacttccatctacatagatacttttcccgaaagtaaaaagtataatatatcctacataattcctacgagatattcttaattttttcacgaagttaccgcgaagttactttcgagcgacaagcacaacaggggttaatcaatacaagttttgacagctcatgttatcagtgatattcgatatggttatgtttggcgtgggaaaacgcggagtggaatgcgagtaagtggttgtattttcttgtgggtgcgcacgccactgtcgaggcttcactgtatccgcatctgctcgtgcgcttgcatctgcatctgtattcgtgtcgtgtggcgctgtgtgcgtttcagtttcgagtctgtgtgagggccagcttcatttcagcttggcttgcggtgttaaatgtttgcagcagcatttttcattcaatagcccgaacaacaagaacaacaacaacaacaacaacggcagctggctgccaacatcatcacacaagcgcacacacacagccgcgcgaaccactcagagtgcctgcgtgtgtgtgtgtgtgtgcgtgtgagtccgcttgtgtatctgtgagagtgagtgcgagtacgagtatctttgtatctgctggttcgcctgggctgtctgtcacttctcagaaatcggtctaaattagaaaatgcgtttctgggaatttcgtatcgctcttttgggcccacggagctcagcgaacaacatatataaaaaaatatacatatatatgtatattgtcagtatatattgtagccattccccttacgtccagttcgcggaatattgcgcctttccctaataaatttatcaatggcatttgcaaatattatatagcaaacagggcaactatttattttgcttagtaatttatgcaaacagcgagcggttcagggaattccaattaccacaatgtggtaaacacctaagacagttttgtatttacctctattttggtttgctggcttttttttttggtttcggtgtgctcgttacttttggctagttggcaatttggctaaaccgtagtttaagcatattttagttttgctttgaaagatattttccccgttttcacgttatctcaaccgtttggctggcacatacacactcacactagcaaacactaattgattgcacttttcgatctgcgatggcactgcactatttccattcgacagtgtgcacttccactaatttgtgcaatttcactcgacgcaacgaaaccacgcacgaatccgaagaagtatcgcttccccgaaaagtatctgtatcgttcgcactgcgtccgcttcgttccgtttctccagtgtgactgccaacggaatcgccaacgatactgcgacccattaaaaattccacaatggccgcggaaaaagtagcactagcgggtggataactcggctaagtggtcgcacattatcgctagaaatggtggtgaaactggaaagtggtcgagtttcaaaatactggtattcgtatactctagcacgggctccaacccgtggcatcattagcagtcaggacggcaatgcttgatatccttataaatcaatatggccgcgcttaacatccttagaattcaggatggcagccccgctaatgcttagaattaacaaaatgagtggaattacttgaaaaatcaaattaacggtgacttaacttttgtttccaaaatgtggaactcattgtgccgtagaatttttgaaaatatattttgaaaacatattttcctccatgagaacttcttgaaagtttccaatgagaatttgtcacaacattttatttgatttcgttcaaaaaaatattaaaattattcataattataaaacgtagataagaaattccaaaacaagagcttaatacactcaaaacaaaagtcgggtctatacaaaagtaaatttcttattggacaattacacttaacaaatatttagtctagtatttgctggtcattaatccgctaacgttttttcatttttgcgatcaggtcttacaatcatgttctaataaaaactaaagatagacgaacatataaatactcttgactatattacacattcctttttacacaataaatcccaaaaatattattattatattaaattcatgatggaaaattattattctaagcaaaatattaaacagcacaggaataatgagctcatagccgcgattactttcatatatttattaggtttaaaatggtggcattaaatcgtgatacctttacaagggtataacaattctctccgagcttatcaacaagcaaataaaaacaagtaagccggtggcaataaacagtcaagaagttctcttcggcatggcaactgtgggacagctgacgagaatcacggatgtggccaatctcaaggatctgcagatactgtatctgaaggattggcccagcaactgtgtcggctacttctggctggacaactacttgcgatggatggatcaaaacccgacgttgaaacaccttaacttctatactttggataatgattggaggagcgatggattgtttatactggtggtctgtggaaacgttcttacgaactattgagtataatcattgaacacttatcatttcagcatcgttatcaactattcttcagtaacttgagcaagcaaaaaaccgatttggaagttgcgctgaaacaattggattggtcgagaggatttaaagtcagtgctatccatgagatccatcacaagatctacaagcagctggctctggacctcgggctcaacatggatcgagaaatgaataccattatgtacatcctgaaccgtgaggaggcagagagactgcagatacagtgcccggatggttatttcctggacaaagtgcggctggaacatgcagatcttattaacgatctttggtcagctcgacatcccggctcgctgaagctcatccagatgcttataacatacaataccaatgtgggattgtatgagaaggagttgggttcattatgtgcttggtgcttgaggtactaagaaaatgaattctgaattgtattgtatctttaaccaagtcttacagactgcaaagtggattcctcggtgctttggaagtgctcccaacccaccaacgtcgtggtttgggcctagttgtggccgccgccatttccaaagcaatcgcaacggatctacagcaggatattacggctttggtcaatataaacaacagtgctgcctgtcgtgtgtttgagaaactcaacttcaggttgatccaggacgaacactactactggagcatgattaagccagcagcaggaggccagatatcttggccctgcgacgaatagggcccacaccgttagtattattggccagaaattgcttacaaatgaattgtttgtataccttatatacctttgtagttgtaaccttaagaaatatattcttcaaactaagtacagatgatgcttgacgagctgcacttctatttggatatttgatcggaaaggttgtttcgcttgaagtaagtgtgcagtcagttgagagctagcttttagccagctaaatattttcacaattccccattgctgactcagttttaactgccacttagcaaatgattctgatcacattcaagccaaaaggctttcggatatcttgatccggcagggaataggcccagacagcaaatagagatacagcaaagtctacagcggctaatatgcaaaatatctagaaggtgccctgctatctcagtgtataaattgaatcaccgtctagttgccagggatcagttttcgaaatggatcgtctgcagcaggtcggcgttcagcagttgggtgatctgaagcgtgttttcacccgggaatggccaaaatactgcaaggagtactactgcctggacacgtttctggagctatataaaaaggacgatcagctgaaggatgtgcaagtctatgctcttcccaatctagagctcggaatatttgtgatcgtggtatgaatgcggttggtggttgtgcgatcttttatttaatttttatgtggatcgttaaggatcactatcagatatttgtgggcttcctggaagctgaacaatcagaaagccttttcaaggagtccttactcaagtttaagctctatggaggcgaacagttcgcctcaatgccaaaaaggtatttcaatgttgccaacgacattattcaagcgaagaatctgaaactagatctcgactgtgtaacactttccctggtcttgagcaaagaggaagccctgctttttcaagtagagtaagttcatccaaaaatatatatagtgcatgtgcctaataaaccgctctaaacttta

SEQ ID NO: 37430 - DNA, 1342 bp, DROSOPHILA
ttgtatttacctctattttggtttgctggcttttttttttggtttcggtgtgctcgttacttttggctagttggcaatttggctaaaccgtagtttaagcatattttagttttgctttgaaagatattttccccgttttcacgttatctcaaccgtttggctggcacatacacactcacactagcaaacactaattgattgcacttttcgatctgcgatggcactgcactatttccattcgacagtgtgcacttccactaatttgtgcaatttcactcgacgcaacgaaaccacgcacgaatccgaagaagtatcgcttccccgaaaagtatctgtatcgttcgcactgcgtccgcttcgttccgtttctccaggtataacaattctctccgagcttatcaacaagcaaataaaaacaagtaagccggtggcaataaacagtcaagaagttctcttcggcatggcaactgtgggacagctgacgagaatcacggatgtggccaatctcaaggatctgcagatactgtatctgaaggattggcccagcaactgtgtcggctacttctggctggacaactacttgcgatggatggatcaaaacccgacgttgaaacaccttaacttctatactttggataatgattggaggagcgatggattgtttatactggtgcatcgttatcaactattcttcagtaacttgagcaagcaaaaaaccgatttggaagttgcgctgaaacaattggattggtcgagaggatttaaagtcagtgctatccatgagatccatcacaagatctacaagcagctggctctggacctcgggctcaacatggatcgagaaatgaataccattatgtacatcctgaaccgtgaggaggcagagagactgcagatacagtgcccggatggttatttcctggacaaagtgcggctggaacatgcagatcttattaacgatctttggtcagctcgacatcccggctcgctgaagctcatccagatgcttataacatacaataccaatgtgggattgtatgagaaggagttgggttcattatgtgcttggtgcttgagactgcaaagtggattcctcggtgctttggaagtgctcccaacccaccaacgtcgtggtttgggcctagttgtggccgccgccatttccaaagcaatcgcaacggatctacagcaggatattacggctttggtcaatataaacaacagtgctgcctgtcgtgtgtttgagaaactcaacttcaggttgatccaggacgaacactactactggagcatgattaagccagcagcaggaggccagatatcttggccctgcgacgaatag

SEQ ID NO: 37431 - protein, 374 aa, DROSOPHILA
MALHYFHSTVCTSTNLCNFTRRNETTHESEEVSLPRKVSVSFALRPLRSVSPGITILSELINKQIKTSKPVAINSQEVLFGMATVGQLTRITDVANLKDLQILYLKDWPSNCVGYFWLDNYLRWMDQNPTLKHLNFYTLDNDWRSDGLFILVHRYQLFFSNLSKQKTDLEVALKQLDWSRGFKVSAIHEIHHKIYKQLALDLGLNMDREMNTIMYILNREEAERLQIQCPDGYFLDKVRLEHADLINDLWSARHPGSLKLIQMLITYNTNVGLYEKELGSLCAWCLRLQSGFLGALEVLPTHQRRGLGLVVAAAISKAIATDLQQDITALVNINNSAACRVFEKLNFRLIQDEHYYWSMIKPAAGGQISWPCDE

SEQ ID NO: 37432 - DNA, 2960 bp, DROSOPHILA
accattatgtacatcctgaaccgtgaggaggcagagagactgcagatacagtgcccggatggttatttcctggacaaagtgcggctggaacatgcagatcttattaacgatctttggtcagctcgacatcccggctcgctgaagctcatccagatgcttataacatacaataccaatgtgggattgtatgagaaggagttgggttcattatgtgcttggtgcttgaggtactaagaaaatgaattctgaattgtattgtatctttaaccaagtcttacagactgcaaagtggattcctcggtgctttggaagtgctcccaacccaccaacgtcgtggtttgggcctagttgtggccgccgccatttccaaagcaatcgcaacggatctacagcaggatattacggctttggtcaatataaacaacagtgctgcctgtcgtgtgtttgagaaactcaacttcaggttgatccaggacgaacactactactggagcatgattaagccagcagcaggaggccagatatcttggccctgcgacgaatagggcccacaccgttagtattattggccagaaattgcttacaaatgaattgtttgtataccttatatacctttgtagttgtaaccttaagaaatatattcttcaaactaagtacagatgatgcttgacgagctgcacttctatttggatatttgatcggaaaggttgtttcgcttgaagtaagtgtgcagtcagttgagagctagcttttagccagctaaatattttcacaattccccattgctgactcagttttaactgccacttagcaaatgattctgatcacattcaagccaaaaggctttcggatatcttgatccggcagggaataggcccagacagcaaatagagatacagcaaagtctacagcggctaatatgcaaaatatctagaaggtgccctgctatctcagtgtataaattgaatcaccgtctagttgccagggatcagttttcgaaatggatcgtctgcagcaggtcggcgttcagcagttgggtgatctgaagcgtgttttcacccgggaatggccaaaatactgcaaggagtactactgcctggacacgtttctggagctatataaaaaggacgatcagctgaaggatgtgcaagtctatgctcttcccaatctagagctcggaatatttgtgatcgtggtatgaatgcggttggtggttgtgcgatcttttatttaatttttatgtggatcgttaaggatcactatcagatatttgtgggcttcctggaagctgaacaatcagaaagccttttcaaggagtccttactcaagtttaagctctatggaggcgaacagttcgcctcaatgccaaaaaggtatttcaatgttgccaacgacattattcaagcgaagaatctgaaactagatctcgactgtgtaacactttccctggtcttgagcaaagaggaagccctgctttttcaagtagagtaagttcatccaaaaatatatatagtgcatgtgcctaataaaccgctctaaactttaacagacctccagccggattttcccttaagccggtagatatagacgatgctcaggtgattaatgatcaatgggaatggagtgagccggattccctttccgtggtccgccgtcaaattctgtatgacacagaaagaaattcatgctattagaaataaattctcaattactattacttcgcagggctccagatggcttattggcagtccttcaggtcaagacgacctacaaacgcagaggcttcggccaactgattgtgaaggaatttgcgagacaagaggctctgctgggacgcgatacaatcaccgaagtggttccggaaaacaaggcatccttgggcctgttcaccaaactgggctttaaaatcaacgaccagtgtcactggctgatgacggagccgccaaaaggagttcgataagattaaggacttgtttatctgtaaatgttattttttttgtagatttaaattattaaagctgataagttttagcagctggcaaaaaatgtactggctggccataagaaaaccacacgtaagagaatctaacgatttgaagagattgcatgaagagaaatagacaagctgcttgattgagtcacccaaacaacaatcaaatgagccattttcactcggtcgctcgaaggggaagattgtttcgctcgaccaatatgggtactcgattagaagttattgggctgaaagatatccaggagttccaacagctctacaagcaaaactggccaaaatattgccaggaatactactgccttgataactttgtggaatttctgaaaaaacagccccatatgaggaatattaagatgtacacattggatgcaaaacaagccagagatgaaggtctttttgttatagtggtgagttctacatatatgtatagactgcaactcactaagagaggcggccctctcttaggatcgctatcaactattcgtaggttgcttgaacaacacgaacggccttgttggaaaagctctggatttactggactggtcgtcgggtttgaaatgcagttctataccctccagacacattggtgccctggatagtctggtggagtccaaaaagttgaatctggtgtacagggactgcacgaatttgttttttatgaaagccaacgacgctctcaagctgaaagtcgagtaagaaataataatccatttaacataacgagttttatatgatctaagtcttgtagacctccatctggatttgttttaaagtcgttgagtgtggcagatgctccattggttaacgcagagtggcccaatcatcatgagggatctttgttcttcgtagaaaggcagattcgcctgtgcgtcagtgttggattgtaccaggaagacacccaggaactagttgcctggtgcattaggtaagacgaatgtatttttataaa

SEQ ID NO: 37433 - DNA, 777 bp, DROSOPHILA
atggatcgtctgcagcaggtcggcgttcagcagttgggtgatctgaagcgtgttttcacccgggaatggccaaaatactgcaaggagtactactgcctggacacgtttctggagctatataaaaaggacgatcagctgaaggatgtgcaagtctatgctcttcccaatctagagctcggaatatttgtgatcgtggatcactatcagatatttgtgggcttcctggaagctgaacaatcagaaagccttttcaaggagtccttactcaagtttaagctctatggaggcgaacagttcgcctcaatgccaaaaaggtatttcaatgttgccaacgacattattcaagcgaagaatctgaaactagatctcgactgtgtaacactttccctggtcttgagcaaagaggaagccctgctttttcaagtagaacctccagccggattttcccttaagccggtagatatagacgatgctcaggtgattaatgatcaatgggaatggagtgagccggattccctttccgtggtccgccgtcaaattctggctccagatggcttattggcagtccttcaggtcaagacgacctacaaacgcagaggcttcggccaactgattgtgaaggaatttgcgagacaagaggctctgctgggacgcgatacaatcaccgaagtggttccggaaaacaaggcatccttgggcctgttcaccaaactgggctttaaaatcaacgaccagtgtcactggctgatgacggagccgccaaaaggagttcgataa

SEQ ID NO: 37434 - protein, 258 aa, DROSOPHILA
MDRLQQVGVQQLGDLKRVFTREWPKYCKEYYCLDTFLELYKKDDQLKDVQVYALPNLELGIFVIVDHYQIFVGFLEAEQSESLFKESLLKFKLYGGEQFASMPKRYFNVANDIIQAKNLKLDLDCVTLSLVLSKEEALLFQVEPPAGFSLKPVDIDDAQVINDQWEWSEPDSLSVVRRQILAPDGLLAVLQVKTTYKRRGFGQLIVKEFARQEALLGRDTITEVVPENKASLGLFTKLGFKINDQCHWLMTEPPKGVR

SEQ ID NO: 37435 - DNA, 2141 bp, DROSOPHILA
aaacattgattagctttcgaactgagctacccaataagtataaatcaaataaatggtcttgattttagcttgagaaataactaatgctatagttgttaaaatatttccggatagttacaggaacatggtgggaacataacaattatcctaatatctcaatacaagtcttgatacattcatgacagccctatgatatctaattgccttcaatggtaaaggactgacaagatgtttgttctcgttcaacgaaaatacgagccactagaaactgaaactcattatacgatttcacttatgccggctatcaatgtcgatgggtaatttgtaattgcaagcaaaatttgattatgcaactaaatcggattgatcaaggcgaatgtggatagatatgttagtgaagctgaagccgtagcaaagcaaataagccaagttaggcgaaaaaccagctcctgctcattggattcgggttcgagtttcggttttgactcactgaacagcaagagcgacggctgcaatgtatccatttgattacagtggccggcgcttgggcgactccaaagtgaattaccgataagcaagtggcaaatgaaaggcaatgtgcaacctaacgagaatcgggggatgggtttcgcttctacatgagctaggagtgcgtgcactgcacgaaatattgtagctcttgtgggtaactcaagagaaggcacctaacaaactaaagctagctaggtcattgaatgtgtaaagatatcattgaagtgaatggaaaggaaggacagaaatggaatgccccaatttatataaaatggctataggggtcattaaaacaacattcacttcggactcctattttctgccggtgtaacgagtccagctgccagcggccgcaacagcgatttgcataaatttgaggggacaggacatcgtccgcagttacgcagtttttgactgctaacgaattgcagttgccaggagacatgacgaggatgggaacgagctggagatggatgatgatgatgggcagggcggtggcgacgaggatgacaacgttgccgctgccgctgccgctgccgatgccgatgcttctgctcctgatgatgatgagaccaaagtcacgcgggcattggcaacgtttaacatttagcagccatgttacacgaagcgcaatcaaacggctaacgactaaatggcaatggcccccagggggcgtggctcagcagagaacgggtagtggattattaagtgcaatgtcatgtacagcgtctggcggaataaccaggcaaataccaatgcagatgcagacgtttgatggcttcgtctcaaatgggtatttcaaaatgatcgcctgcaagacaatgtggttaatttgttcgaaagcggaaagaacttttatttgtaccagacaatctacaaccatcacttttcaaatgcgagctcacagttcctttcaatttataattctcacattgccatacatcccatttcaaattaagctttgaaattgaatattggtcgaactttcagccttgctatgtattttgtagagcttccgctaaaatagcggacgaacccttgcggtgcacggcgccagacaataatccctttggaaaacagttcccatgaaaacactatcaaaatcgcccgtacttacggaacgaattcgtgccggagctggaggatcccctgctgggacactggcggtgcttccatggcatgatgctcgtcacgctcgagtggagctggtggtgtttctgcggcgtcaccgaacccgatccgccgaccccaccactcaccgctgcaccacccacatgggcgtgataatgatgcggatgcgaatgcgagtgggtgtgcggatgcggatgcggaagcgtgtgcggatgatggagcgatgtctgcgactcgcgttctttcaggccgtgtccgatatcactgtcgaaggatgtgagcgtaaatgtggacgaggcggccagtcccaagcagccgtttgccattgcaccacctgaccctgcgtttcccgattgcattttctggtacggcacacggcaaccaccagtaccgcccgaaccatcgatgttcactaaattgccaaagctgcgactattaattggcagcgaccaatccatgctgctggtgtgaaagatggc

SEQ ID NO: 37436 - DNA, 141 bp, DROSOPHILA
atggatgatgatgatgggcagggcggtggcgacgaggatgacaacgttgccgctgccgctgccgctgccgatgccgatgcttctgctcctgatgatgatgagaccaaagtcacgcgggcattggcaacgtttaacatttag

SEQ ID NO: 37437 - protein, 46 aa, DROSOPHILA
MDDDDGQGGGDEDDNVAAAAAAADADASAPDDDETKVTRALATFNI

SEQ ID NO: 37438 - DNA, 4039 bp, DROSOPHILA
tcgcttctacatgagctaggagtgcgtgcactgcacgaaatattgtagctcttgtgggtaactcaagagaaggcacctaacaaactaaagctagctaggtcattgaatgtgtaaagatatcattgaagtgaatggaaaggaaggacagaaatggaatgccccaatttatataaaatggctataggggtcattaaaacaacattcacttcggactcctattttctgccggtgtaacgagtccagctgccagcggccgcaacagcgatttgcataaatttgaggggacaggacatcgtccgcagttacgcagtttttgactgctaacgaattgcagttgccaggagacatgacgaggatgggaacgagctggagatggatgatgatgatgggcagggcggtggcgacgaggatgacaacgttgccgctgccgctgccgctgccgatgccgatgcttctgctcctgatgatgatgagaccaaagtcacgcgggcattggcaacgtttaacatttagcagccatgttacacgaagcgcaatcaaacggctaacgactaaatggcaatggcccccagggggcgtggctcagcagagaacgggtagtggattattaagtgcaatgtcatgtacagcgtctggcggaataaccaggcaaataccaatgcagatgcagacgtttgatggcttcgtctcaaatgggtatttcaaaatgatcgcctgcaagacaatgtggttaatttgttcgaaagcggaaagaacttttatttgtaccagacaatctacaaccatcacttttcaaatgcgagctcacagttcctttcaatttataattctcacattgccatacatcccatttcaaattaagctttgaaattgaatattggtcgaactttcagccttgctatgtattttgtagagcttccgctaaaatagcggacgaacccttgcggtgcacggcgccagacaataatccctttggaaaacagttcccatgaaaacactatcaaaatcgcccgtacttacggaacgaattcgtgccggagctggaggatcccctgctgggacactggcggtgcttccatggcatgatgctcgtcacgctcgagtggagctggtggtgtttctgcggcgtcaccgaacccgatccgccgaccccaccactcaccgctgcaccacccacatgggcgtgataatgatgcggatgcgaatgcgagtgggtgtgcggatgcggatgcggaagcgtgtgcggatgatggagcgatgtctgcgactcgcgttctttcaggccgtgtccgatatcactgtcgaaggatgtgagcgtaaatgtggacgaggcggccagtcccaagcagccgtttgccattgcaccacctgaccctgcgtttcccgattgcattttctggtacggcacacggcaaccaccagtaccgcccgaaccatcgatgttcactaaattgccaaagctgcgactattaattggcagcgaccaatccatgctgctggtgtgaaagatggccggctgctgggctgccttgtgctgctgttgttgctccgcatgttgcatctgctgatgttgctgttgttgctgctgttgctgttgttgctgcgggaaactcagcaaagactgggagaagcagcgacagcgctgctgctgaaagtgcgccatttgttgctggtggtgctgcttctgcaggtagcgactgtagtgcgccaaatgccgtgcataatcgctgctcggcccaatggtattgtatttcgaggatgtattaccgcccggcaggaagcacaagctggggtccgatttcttcgagtgcggcgagaatatctcgtcctcctcgtgggcggcgaaagggggcgggggcggtggcgggttggtggtggttggtgtgggcgtgcgcgtaggcgtggcattgccgtgcagcttgtgcctatggttgtgggcgtggccgggcggctggcacaggtccggcttcacctgattgttattattatgactaatgctggcagcgatgttgcaattgttgctcgcattgctgttgctgctgctgtgattgctggtcgtggtgcacttgagcaatgtggcagtgcactcatccaatgcagacttagtgcactcctgcaacagatcgctgctgcacagctgcgccaagttgttattgtggctgctttgctgctgctgctgctgctgctgctgcaggtgttgcaacaatcgcaggctgcgcatgctgccattgcgcttcatcgatgggggtggtggcacaggcggtatcacatccacatccgacaagctgggcgtgtcgctctgggaagagaaagaaggatgtgagtatcaagctgttgacaaaagggaaatcgcattaaatcaaaatggacatgagcagcttccgacggatgtaaccccacaacgtgcctttgaaaaggattgaattcggaataaacccatatgtagcctagtttatgcccttgcatacgcatgacctatttgtacagcttaatttaagttaacttttccagtttcagtttcttaatcttccatttgtttagtcgtcagaagtaaaatgatatataataccatattatagagatgacaaagcttttatcctgcatgctacccataagcattaaaattctccatatcaaggatataaaaactgcctttcaataccgtaaaaactttcgctctactcgtaacgagccctagaaaatgtgcaacgcactccttttgccgttacttggcgagaattcggcagaaggaagccgagatttacaatgatggggcaaagtgcggcggagtgaagacgatccttagaccccctggctacataaaatttaattatgccatagacaccggttcagactgaaagacttccacacacacacactcacttagggagccataaaaggcgtgcgaaaatggccaagaaaaaggtttatccccgaaaactccaagaagtttccaagagtcggggccatgccaagtgccctgattgaatttgccacggtcagcatcagccaaatcatcatcatcatcgtcataatcatcggcaggagatgcttggggacttgaaattgaatttcagttacgggaaatacatttgcattgatttgcttcgcccctctttttttagggggatttttgggtcgaattatttttatgcgtctgggcgaaacgagacgcattgccattaataaaaatttcctttgaattttgattgctttacgcccaccactcctggccaaattcttacacctcggccctcggctcgttattgttgtctgtgttttttggttgattattttgtatttactttgtcttgtccctttcaatggcggtgtcctgtcctgtcgcatcctgtccgctgcttaagtggaaattgaaattttcatattttcatttggtaatttatttattctttttgttgccctccgtccgacgacagcttaaataatttatgcaaatgtttagcggtggcgtgtgttgcatattttaagacgggccaatttgtaaacggcccacttatttcgaatcttctaattcttctttggatttattccaaggttcatttttttggtcagataaattgaacaagatgaaaaatgtgttttcccttctaagtttttgttagtcaaagaatatagtagttgttgctcagtgatattttactttacttaaaagaattgcagttttattctactaagcctgttggaaaataaaatgcgttactcttctaattggcatagcttacatgtatccaattatctttttcttttctttacttacatattttttctgagccctcttacttttccctatgaggcttttagtagttatttgcagctgctgcgatggcaaatcactgtctaattaatacgcgagcagtctactttctcttagcccttaccaacgagcgtacatagttattaagcgaataaattcgtaaatatgtatgcaacagtaaacggttgtcgggtgcttatgccgcaaatttgaagacgagtttatggcgttgggaaagggttgggatataagttgtatatgggg

SEQ ID NO: 37439 - DNA, 1341 bp, DROSOPHILA
atgattatgacgatgatgatgatgatttggctgatgctgaccagcgacacgcccagcttgtcggatgtggatgtgataccgcctgtgccaccacccccatcgatgaagcgcaatggcagcatgcgcagcctgcgattgttgcaacacctgcagcagcagcagcagcagcagcagcaaagcagccacaataacaacttggcgcagctgtgcagcagcgatctgttgcaggagtgcactaagtctgcattggatgagtgcactgccacattgctcaagtgcaccacgaccagcaatcacagcagcagcaacagcaatgcgagcaacaattgcaacatcgctgccagcattagtcataataataacaatcaggtgaagccggacctgtgccagccgcccggccacgcccacaaccataggcacaagctgcacggcaatgccacgcctacgcgcacgcccacaccaaccaccaccaacccgccaccgcccccgccccctttcgccgcccacgaggaggacgagatattctcgccgcactcgaagaaatcggaccccagcttgtgcttcctgccgggcggtaatacatcctcgaaatacaataccattgggccgagcagcgattatgcacggcatttggcgcactacagtcgctacctgcagaagcagcaccaccagcaacaaatggcgcactttcagcagcagcgctgtcgctgcttctcccagtctttgctgagtttcccgcagcaacaacagcaacagcagcaacaacagcaacatcagcagatgcaacatgcggagcaacaacagcagcacaaggcagcccagcagccggccatctttcacaccagcagcatggattggtcgctgccaattaatagtcgcagctttggcaatttagtgaacatcgatggttcgggcggtactggtggttgccgtgtgccgtaccagaaaatgcaatcgggaaacgcagggtcaggtggtgcaatggcaaacggctgcttgggactggccgcctcgtccacatttacgctcacatccttcgacagtgatatcggacacggcctgaaagaacgcgagtcgcagacatcgctccatcatccgcacacgcttccgcatccgcatccgcacacccactcgcattcgcatccgcatcattatcacgcccatgtgggtggtgcagcggtgagtggtggggtcggcggatcgggttcggtgacgccgcagaaacaccaccagctccactcgagcgtgacgagcatcatgccatggaagcaccgccagtgtcccagcaggggatcctccagctccggcacgaattcgttccgtaagtacgggcgattttga

SEQ ID NO: 37440 - protein, 446 aa, DROSOPHILA
MIMTMMMMIWLMLTSDTPSLSDVDVIPPVPPPPSMKRNGSMRSLRLLQHLQQQQQQQQQSSHNNNLAQLCSSDLLQECTKSALDECTATLLKCTTTSNHSSSNSNASNNCNIAASISHNNNNQVKPDLCQPPGHAHNHRHKLHGNATPTRTPTPTTTNPPPPPPPFAAHEEDEIFSPHSKKSDPSLCFLPGGNTSSKYNTIGPSSDYARHLAHYSRYLQKQHHQQQMAHFQQQRCRCFSQSLLSFPQQQQQQQQQQQHQQMQHAEQQQQHKAAQQPAIFHTSSMDWSLPINSRSFGNLVNIDGSGGTGGCRVPYQKMQSGNAGSGGAMANGCLGLAASSTFTLTSFDSDIGHGLKERESQTSLHHPHTLPHPHPHTHSHSHPHHYHAHVGGAAVSGGVGGSGSVTPQKHHQLHSSVTSIMPWKHRQCPSRGSSSSGTNSFRKYGRF

SEQ ID NO: 37441 - DNA, 4273 bp, DROSOPHILA
tttaattttataaatttggacttagttcttattagcgttcggtaattatattgcgtatacgtcgtgttggcaggccatgtagagtcaaaccatgtcagagctatatcatcagatattccccaaactttggagctgctttaaagaaatcccaattaatgtgataacaataacatttataaatccattcatcaatatgctttaactagagtttgataaatttaaagtctgaatgcgaccagcaactaaatggagttaaatgtaacgcatagcgtaaataaaaccctaaaaacgatgctactaaattatgtttgccgtttgaacaacgaaccgaagacacagagttaagagtgaataaggcacagaaacggggacaggcaaagatgggaaatggaaaagctcttccggcagttggaaaagcgcccacgcatgccaccaaattgcagccacaatttgctgcaacgaactcaactgaaaactgaaaaccgaaagtggagcaggcccatggaaaagcatacatcaaatgtgtcaaagagatttgttatgcatgacagaggcctgtgacagcaaactcgcccaagtatcaaaaacaaggactatgagattcccagcgatctgaaattgttttatttcaaaaatttcatagagtacgaaatacataactttaaaagaattcgtaatgataaaccgaaaattaactatccgtaatttgtgctcattactatactctggtttttattgttatgcaatatttaactaaaaacatagaacccatttagattcccaaaaatatgggttcaagaagattgaatatcaaaaatatcaaaaataattcaatgcgaagctttattgaaccgaagcatatccaaacttcttcactgtaatgggtttcgagtcagattgatgtgtctgtctgaaaaatgagtaaatctatatgggttatatacaacgtcgtttcccgtttacacaaatgaattgcggaataaatttaaacgtaatgcaactagatgagattggttttcttgataaggttgagaaactcctccttgctaacctcaccatcaccggaaacgttggcttcgtcgatcatctcctgcagttcctcgtcggtgagctgttcgcccagctccttggccacgcgtttcaagttgaggaaggatatgccgccggtgcgatcgtcatcgaagaaggaaaaggccttcatcatatcctgattagagtccttttccgccatcttcaggcgcatcagatatagaaaatcgttaaaggcaatccttcccgtcttgtccttatcgatttcgtccatcatacgctttatatcctctttcttcggctcgaatcccagggcacgaatggccacgcgaagctccttggtttcgataaagcccgtgcactgggtgtcgaacaaatcgaaggctttcttaatgtccaccttctggcttagcgacaggtcaaaggtcggcagtttgggctttttcgattttttagccctgcttgagatcgatgcactcgaatgcattacactggcggaggacaccatactaccaagtcgtttgccggacatgatgatcttatcggctttttgatgtgggagtcggtaggaatatcgattgtttgagatctgctctcttggaatgtgaacgtatactgtgtagaaatcgggcgggctgttcgaactggccgacagttggggacttgacctactcggttacgatagttttgggcttgactttgaaggaatttacattctaaagtcacaaagctgccgaaaaagcacttaaatggtcaaatgggagtatatttaattctaaaaaaacatatcaaggtattgtattggattatctctgaaatttatcgacccgaagtgctggctcacagcatttgccataacaatcaaaattcatgtgtgccctaatacttggcgaacttgaagtctcctccattcccctcgcgattcgaagacagcttggtggcctgagcccgagccccaagagtcagtgggtgtggcaggtgtcagtcactcggtcgtcagactacaacatccacctcctacgtgccacgctctgtttggttagcgcatttgcctgttgcaaaactctgtctgtatttctggtggaggcacgtgccgttggctgctcatgactacaattacaattacacaaagtgtagcggggtttcactcacctgggggtctccggctcctcctgttcctcctccagatcccattcccaatcccactcccagtccgattcccaatcccgtttccatcccagtcagcgataatttacgattacgctcgcgctccagtctcataagtatctgcgcattctgctcgcaggagtaggtgtgtgtcttacgctttcgttccagactgtactcgtacagcggccttgccgcattcggttgcaaatccagttgggcctcgtcgccggcatcgcagctgcacagggactgattggagcggcccttgctccgcttcagggatccgcggttcgacgacgagggcgtcaggcgttgttcacttacaaaattcgagaaggttaccacattgccagaggaacctactggaagatagaaaaaaaagttgtttagcttccatttaaagttctagtcctgtccgtctaccacattctagtaatgtgcgctcaactactcttagcagcagaggcgctaattgtttactctacgagttacagaagaaatatacaattaaatttcttttctaacagaatcttgtataatatgttattaagctatttaaattttgtctgaagtgccgcataaaaataatttattattatttatagcgtattgtacatgcaagtataagtactgaatgcgctggtagtaatatcttaattagagttgttaagttctgacacttatttgcttaatgagcaagctgggaaaacttttatatgattgactgatgggcctggcgtttatttacccctcagaagggtgctactcacctgaagtggctccttttcgcttggatggtgagacgtagaagatgtcgtgctcatcgaactcaacgctccgctgacttgttatgccgacaccaccgttcaggccacccagaccgcccaaaccgccggcaccaccaagtgctgtggtggccgtggccgtactactgctggtggtgctggccgcactgttgccaccgctgctgaggttgcagccgtgatccgccagggcgtgcagcatcggatgcacctgtcgatctctcagggagtgctgcttgtgcaggccattagttcgtcttagctccgtcatcgtcctgatttcactctgcgcttcttttttattcccggagccggcttattgtcatcactcctgcgctcatgaaatattcatgccacacgacttcaagtccttcgcgactggggcattagcatatcactttgatttgaaacggtcttgcttgctatattcttaattttaaatttgccctcttgctggctaagccggctaacggtttccttgtgtcaatacagcagattcgcaatccgatttgccagctaactgtttcaattctggcccgcgccccttgcgttcttggccctctcattgccagctttttcgactttcttccttttttgactgcttacattcttttcgcttctttacaatcagtttctctttggcggcctggctttgtttgccctgttaatagacttggcttagtcgctgccggttgtttgtctataataactgcaaagagatggcaaatgagagtgagagatgagattaagcttaggcttaggcgatatgtgtgtgctgaaaagtctattctaaattgatttcattgtttgccagagtatcagaaggagtgtgtgcttgtaaatatgtacaaataatttatgggggcagatatttacttatttaccaaggacttttcccaagcaaagtaagctgccaatgcttaagtgcaattcttgggcatcaatcaagttttatggggaatcgaccttaattttattgtagcctaaggttagaaaatgaatatacttgttgtctgatatttttattctagtacgtaattgaacttaaattctatcatataaattatctcttaatcgtagattcatatttttttattatttcacctgtcactaaattaacatactttgccaattaactgggcttcggtctattgatttttcgggcgcgtgttgtaaaaagttatttactttctgatcccccagttgattgaagttttttctttgcggcactttagtaatttaagaccgaaatggaacgcctatgctaggca

SEQ ID NO: 37442 - DNA, 1437 bp, DROSOPHILA
atgacggagctaagacgaactaatggcctgcacaagcagcactccctgagagatcgacaggtgcatccgatgctgcacgccctggcggatcacggctgcaacctcagcagcggtggcaacagtgcggccagcaccaccagcagtagtacggccacggccaccacagcacttggtggtgccggcggtttgggcggtctgggtggcctgaacggtggtgtcggcataacaagtcagcggagcgttgagttcgatgagcacgacatcttctacgtctcaccatccaagcgaaaaggagccacttcagtaggttcctctggcaatgtggtaaccttctcgaattttgtaagtgaacaacgcctgacgccctcgtcgtcgaaccgcggatccctgaagcggagcaagggccgctccaatcagtccctgtgcagctgcgatgccggcgacgaggcccaactggatttgcaaccgaatgcggcaaggccgctgtacgagtacagtctggaacgaaagcgtaagacacacacctactcctgcgagcagaatgcgcagatacttatgagactggagcgcgagcgtaatcgtaaattatcgctgactgggatggaaacgggattgggaatcggactgggagtgggattgggaatgggatctggaggaggaacaggaggagccggagacccccaggccaccaagctgtcttcgaatcgcgaggggaatggaggagacttcaagttcgccaagtcaagtccccaactgtcggccagttcgaacagcccgcccgatttctacacagtatacgttcacattccaagagagcagatctcaaacaatcgatattcctaccgactcccacatcaaaaagccgataagatcatcatgtccggcaaacgacttggtagtatggtgtcctccgccagtgtaatgcattcgagtgcatcgatctcaagcagggctaaaaaatcgaaaaagcccaaactgccgacctttgacctgtcgctaagccagaaggtggacattaagaaagccttcgatttgttcgacacccagtgcacgggctttatcgaaaccaaggagcttcgcgtggccattcgtgccctgggattcgagccgaagaaagaggatataaagcgtatgatggacgaaatcgataaggacaagacgggaaggattgcctttaacgattttctatatctgatgcgcctgaagatggcggaaaaggactctaatcaggatatgatgaaggccttttccttcttcgatgacgatcgcaccggcggcatatccttcctcaacttgaaacgcgtggccaaggagctgggcgaacagctcaccgacgaggaactgcaggagatgatcgacgaagccaacgtttccggtgatggtgaggttagcaaggaggagtttctcaaccttatcaagaaaaccaatctcatctag

SEQ ID NO: 37443 - protein, 478 aa, DROSOPHILA
MTELRRTNGLHKQHSLRDRQVHPMLHALADHGCNLSSGGNSAASTTSSSTATATTALGGAGGLGGLGGLNGGVGITSQRSVEFDEHDIFYVSPSKRKGATSVGSSGNVVTFSNFVSEQRLTPSSSNRGSLKRSKGRSNQSLCSCDAGDEAQLDLQPNAARPLYEYSLERKRKTHTYSCEQNAQILMRLERERNRKLSLTGMETGLGIGLGVGLGMGSGGGTGGAGDPQATKLSSNREGNGGDFKFAKSSPQLSASSNSPPDFYTVYVHIPREQISNNRYSYRLPHQKADKIIMSGKRLGSMVSSASVMHSSASISSRAKKSKKPKLPTFDLSLSQKVDIKKAFDLFDTQCTGFIETKELRVAIRALGFEPKKEDIKRMMDEIDKDKTGRIAFNDFLYLMRLKMAEKDSNQDMMKAFSFFDDDRTGGISFLNLKRVAKELGEQLTDEELQEMIDEANVSGDGEVSKEEFLNLIKKTNLI

SEQ ID NO: 37444 - DNA, 2870 bp, DROSOPHILA
tcctaccaaaacgccacaaaacgtcgggtaatcacagcacacaactctttgattaggaaaatatttaatgttttatatttaaatttttttataaccatataaatctaatatataagatataacgaaaccaaaaatttacattagccaaattgaaatttaacaaattatagtctaaatggattaagtcagcaataaatggtttagtaatttttcttaatgcttaattttttctgcagaaaagctaatactcccttaaatataaacaaggggcagaactactaccaaaatggttgaactgtttaggacatgcggcatatccttatgcaaaatacacacacatgagaatgaagcctttttcggcctcatttaatgaccgcccctcaggccaaaaagccggagtagcagtggagccgactacgttggccggctcctctcgaccatgaaaataaagcccaatttatgcttttagttgttagtgatttttattatgtgtcataggcaacggacgtcctttaacccgctttgctgccgggctgccctagatgtcctgctgtggcaaaggcaatttccggtttatggcggaaacgagccatccacgcccatggccaaatccccatcggcaaacccaattgtttgccgtacggctgtgtcaactgacaatgcagtttcaaatttaagaatttataccgtcgatggacaaaatagattattggctcgatgggttcatcgaaaacgcttgtaggcagatgcaatttatgtctctacaaggattcggttagttctctctgtctgtcttggctaacagaagggctatcgattggtcaactgggacgttttaagcagagttcgattggtttttggcaagtggcagtttaacaacaagccaataaataaattcggctcaaacatttaaatataataaataccatctaatatagttcctaattcgacatccgaattttacacagatacgaaaatagtaggaaacgaaaataaaggatcaaacttcgacttgccttataaaataatcctgtacaaattcctgattctcatccagccaggcctccatccgcgcgtgctctggatcgtagggtctgtggtgttgtggcgagttggcctggtggtgatagtgatgctggtactggtactgatacggctgttgcacctggtactgctgctgttgctgcggcgtggccgacgtctggactccgccgccggaggaggatgatccgttggatgaggagggcggggctgctccggagtggttcagcggctgatagtgggcggggagtggctggtgctgggcgaggggcagggggacaccggcgtggcgtgtggcgatgagcagcgagtgctcgctggatccgtagccgccgtaccccgtgcccccctgctccgtgttcatcctgccagtgggctggaactggagcggcgtcgtcgctggctcctcgatgctccgcaaatgcaggcctgcaacgaggaaggagtaatggaaaaataaatacttaattcgcattatcaggacattcgaattcatacactgcgatatattagggggacatatactttaagttgaatcttatacctcttaaatagttgttataaagaatcgtttaaaggcttgtttactccaaacggattttaaaaagataaaattattgctgcattaattattactttttattaaaagcaatatttatgtatttaaattgtataaacattttttaagctgactttttgcatcgtgtgtaatttgcctgctgcatgtgtcgacagttttatgagcttgccgcccagctctttcgcccttgacgcacacttggcacgtgaccgtggacacgcccctctccacgtcgctggcaattgacatggcttctttttgacgcttttctgctgctttcttttcaatttcaacaatttggctgtgagagcaaatcacataaatttgttcaatagctttttcagctcatcaatttgaagctgttcctgtccctcttcgaacaattaagtgtcaagtagcgacttttaagggagttcgcagagacgttcgcacacagctgcatgcatatgtaacacatggcaaacgcggcgtatacgtaacgccataaataacattggcagttggggctccccaaaagtgtttcagttaacattaaccggaaatattggcaatttccttgaaatattgacttcgtgtgggcttgctgcaaagtgcctggcgtctgtaatgccagcattgagcgcctgattaagtgctaaaaatagatataaatacgacaacgagtaacccactgatacatgtctcaaggatgcgatagaaggagtccttactcatctctctctctctctctctctctattgcccccatttttgtttgtgcccccagttatttattctatagaaaatatgatttatgtgctgcttttcgacttacacaaaagaaataaacaaacgacttgttcctgtcgcttgacaattcgactttcgggctaagctggtatacaacaaatatcaaggatatttcgttttcttaaatacgttagagtagtctattttgggctagattacatacggaaatattttcagttggatggctttatattattcacaactttttgggaaatttatttaattattaatttacatatctatgcaactatacatttgtatcctcttttgagtaaaacagaaaatgtattactgatttgcagccagcttcaatacccattttgtttctggtatgaaaattatttatatgtttaccatatgggttcgataacgtttatataaaaattgctttttatgccatccgaggtttttcttttcgatgtaatttatagcagtacaaatttaattggattttatgctac

SEQ ID NO: 37445 - DNA, 606 bp, DROSOPHILA
atgtcaattgccagcgacgtggagaggggcgtgtccacggtcacgtgccaagtgtgcgtcaagggcgaaagagctgggcggcaagctcataaaactgtcgacacatgcagcaggcaaattacacacgatgcaaaaagcctgcatttgcggagcatcgaggagccagcgacgacgccgctccagttccagcccactggcaggatgaacacggagcaggggggcacggggtacggcggctacggatccagcgagcactcgctgctcatcgccacacgccacgccggtgtccccctgcccctcgcccagcaccagccactccccgcccactatcagccgctgaaccactccggagcagccccgccctcctcatccaacggatcatcctcctccggcggcggagtccagacgtcggccacgccgcagcaacagcagcagtaccaggtgcaacagccgtatcagtaccagtaccagcatcactatcaccaccaggccaactcgccacaacaccacagaccctacgatccagagcacgcgcggatggaggcctggctggatgagaatcaggaatttgtacaggattattttataaggcaagtcgaagtttga

SEQ ID NO: 37446 - protein, 201 aa, DROSOPHILA
MSIASDVERGVSTVTCQVCVKGERAGRQAHKTVDTCSRQITHDAKSLHLRSIEEPATTPLQFQPTGRMNTEQGGTGYGGYGSSEHSLLIATRHAGVPLPLAQHQPLPAHYQPLNHSGAAPPSSSNGSSSSGGGVQTSATPQQQQQYQVQQPYQYQYQHHYHHQANSPQHHRPYDPEHARMEAWLDENQEFVQDYFIRQVEV

SEQ ID NO: 37447 - DNA, 4996 bp, DROSOPHILA
actcggtacagtaacaacagcaacgtgcaacaaatccccaacgcgtttgaacacaaatcgttatcaatgaattaaagcaaacagaagcgttcgccataccggcaaaatgtgcgagagttgcgatagcgtcggtaaaattcacaccaaactgctgtagcaaccgcgtcgcgtccgaatccttacaggatattttcagcatgtgcggcttgcttatataggttcaccactgttaagcattcgctctcattttcaggggcgtatgcagaggggtttcgataaatattgctatttaaaatgcttattttcaatgctaactgttaccaatcagagttatgaacatatttaactggatttaatacgatgttatgtcaagttaggagcccaaaattacctatttaaagaaaaagacattaagcgctgttctctatgctagagctctgttaacgttgaaaatatgttagctcaagattaattaaaattcatttgaaagctattcattgaaagctattgctgtaaccatatttaaataaagtttaaataaaactataaggtaaataaagttgaaaaacataattttttaaatacatccaagttctcaacccgtccccgatacgattaatatcggcaattcccttttcggccagcgttgtaatctaagataccgatagcatcgcgcatacaccagcttttttaccacctctaggtaaagtgggcacgatttttctgttttttaccgaatgcttttattaaattcaacaaaaaacgctacagtagctcacaacggccgggaaaacgtgtggaaaccatgcgacactttgaaaatgtcaacggtttgaggaaaattcgagcgggaaaagtgcagtgagccaaaattcattgagtgcgcgtgtggcgagaagaagaaaagtggaaatacaacgctgaaaattaacagcgccaaaaaacgtagtaaacaattgtaatgcgctgagcatccagccgccaagtgggatcgatcaaaatgacggaaaccttcgacgaggagctgttcgagacgcgactggaggcgctaaaggacacgcaggagggcatccagcagatgtcgaactggtgcctgcagcaccgctccaaccacaagaagatcatccagtgctggctgaacgtcttcaaaaggggtgagttcgcagtgtgctcgtccgtgccgcacaagcttatgatgcctctatctctgtagttcgcgtggaccaccgcctggtcctgttctatctggccaacgatgtcatccagtacagcaagcgcaagcgctacgagtttgtggagtgctgggccacagccctccaaagggccaccaccatggtgcggtaggtatttccagacggaataaacataaggaacgaatatcatttttattgaaaaacaaacaaattcaatccactatatactatattcaccttttaaaatatcttcttccccagcgacgagcgcgtcaaagataaaatcctacgaatcttcaagatctgggagcagcgagagatctacaatgaggagtacctaagcgacttgagcggcctgctgaacatagcgccgcccaaaaagtcccaggtcgatgtcagcgacgagttccagaacgccacactgatcgcccaggtgagggagtgcgtcgagctggccgagatcaccgacaaaagcatgcagaagctgccgaagccgccaaccttcgaaatcgaagtcatcaagcagcagctgaaggacaagagccactccggaaacattgagaaggaggtggagcgctgtgtagccttcatcaatgcctacaataagaacctgcagaacgaaattaagagtcgaaaggcggtgctggccagtattgaagcggcgaaaaagttttacgagcatcagggaaaggaagtcaaagtggtagccagtgtaagttaaatctattaagctatcaagattacgaagtctaaataatttaatcttacaggcctataagagctttggcacgcgcattaaaattgtgaaacgaaagctggacgagaccatacccaacctggccagtccgataccctcgccggacgtaaatgctccttcacccgaacgcgatgcagatctccaactacccgaagaaaataatatacccctggtacttttatcaaacaaaataataattgatttcagtcaagcttattcatttattttccttgcagaacctttttggcggtagtattaatggcttcacgagctatctggatggtggcaagctgcccttcgacatcaacgatttcaagcgggactcgaaagataggggaagtgccattgaggtgattggatcgcgatcggacgacgaggcatacgtgccgagtgccaatttctacaaaccggagcctatatccagtgccgatagcagctccataccaggtcttggaggatcagcggtatatactcccgatgcgcccctgtttggttctaacagtcaagaccaatatgtcccgcctccaccatcgcatctctacggtgataacggaaacggaggaagcagtggtggtccttccgaccagtacacgcctgcacccatgccaccgccaccactgccaccgtcgcttggaccctccagtggatcggcagatgatttcaacagcacgtggaatatgagtatgtcgtggacgccgctggactctagccttaatagcagtggagcaagttcttcttcgtatgcgaatcaatcaactcccaattcgccgccgcactttgacagaaaggctagctccacggcagctccgatcgaatataacgagcttctacatacgaatcctgcagcgctgggcgccgaggacgtagaccatcgcaccttgcagcttcctccggcgttcgagtttggcgcaaagttgggtctgagcaaggacaagtccaggcagttggtggacattgatcacagaaatttgatatcactaactggatcacctggcggagcagaaaaggtaacctttagagtcatcttatttttcttacaaaaaattgccaaaaattccgacttcatgaagcatttttaatagttttagtttaatatattatgaatatgtgacagtcttcttttcaggactttaccggcggtgatgtggattaccgcattgtcccgagtccaaacgatgaaggtatcatggcccctcctggcaacaactatgcaaaaagcaagacctgttcgccgcttaaatccaatgctagtacgtacaagcaaaataagtatatatatcacaaattaaacaagttcaatccttctcgtcatcaggctcgtcatctgaatcggatcgcgtagatggagctactcgttatgatcctgctgatatggtaattgatatggatatgtcggatgacgatattgatgagtcactaagaggtaagtaaaaagcaatctccccagggtaatgcttataacttttaaactatgatcttttagagcccaaggaggataatggagatgccgagatcgacgccaatggtgcattgacgccatcgcgtcccgttttgctggaaactccgcctgactttattaatccgtgggacgcgaacaacagttttatggggccgcctttgcccgatgaagaggatcagcagcaacaccatgaacagcagcaaaatcagcagcaagagcttcaacaacatcaccaacatcagcagcatcaacagcagcagccctggaaccaaatgaatcgcatgcaaatgggaggaggtggagcaccgccacctccgcgaccaccatatggacagcctttcccgccctttcagcgcttccccggtccaccgatgaacggtcccgatggaatgcagcgcgggcgtggacgaggccggggatggaatggacccggaccaggtccttttagaccgccttaccaacggatgcccggaccgggatttgatggacccggaccagggccgcgaccattttttcctcggggtggcggacctggtggtcccatgcgaggccgcgggcgtatgcgtggtaaagcatggatgatgtaattacgtattttatagatctacaaaaagagagaacctagttttagatttcacttatctcactttgatttaatttaacaaaaaagtgtattgcatagaacagataactcattaaccccacacacttctcttggtttccctttgggcggtgggcagatgacgttggcagaagatattgtacattgctgtgtataatattaactagccatggttgttattgatgtaaattcatgagattttaaaaaatatataacatgaaaaacaacaagccatcagcaattgaagtgaaagttaaataaaattattcacgaaatccgttgagctattttattatgtaaattattaaatgatgactaaatatgataacgcaaattgttttcaatcagccaacgtcagcagccttcatcaaggggaatctaggacaacacgtgcaaagactttacacttacaccctcgacttaacttatgtttgtgtgttgacatagattaagcatatagtgtatgattagttaatgccttcgcctttagttcctagtgctaaacatagacactagtaattgtaaatagttataacgaaaagtagtccaaaaattaattgttaacgtaattcaaaagttctatactctttacttatggtcaatgatattaactttttaaatatatatcgatttgaatttcattttaacaactttataatgaaaatcgaaatataatggtaataaaaaacacttttcagcaatcgttcagatcgttgtaatggcatttttagaactatgttttccgatcttcgttatttttaaatttagtatatatcgattgaataaatatttttggattaccaacgatccagtttaagccatctcaagttttgctaattttatgaaaacgggctataatatttctattggtggcattcacatccatcgatcgttgaaatcaaagtatcactaaaaatgttacaatgatctgacttatttcaagaaaaatatatagttctcgacaa

SEQ ID NO: 37448 - DNA, 2457 bp, DROSOPHILA
atgacggaaaccttcgacgaggagctgttcgagacgcgactggaggcgctaaaggacacgcaggagggcatccagcagatgtcgaactggtgcctgcagcaccgctccaaccacaagaagatcatccagtgctggctgaacgtcttcaaaagggttcgcgtggaccaccgcctggtcctgttctatctggccaacgatgtcatccagtacagcaagcgcaagcgctacgagtttgtggagtgctgggccacagccctccaaagggccaccaccatggtgcgcgacgagcgcgtcaaagataaaatcctacgaatcttcaagatctgggagcagcgagagatctacaatgaggagtacctaagcgacttgagcggcctgctgaacatagcgccgcccaaaaagtcccaggtcgatgtcagcgacgagttccagaacgccacactgatcgcccaggtgagggagtgcgtcgagctggccgagatcaccgacaaaagcatgcagaagctgccgaagccgccaaccttcgaaatcgaagtcatcaagcagcagctgaaggacaagagccactccggaaacattgagaaggaggtggagcgctgtgtagccttcatcaatgcctacaataagaacctgcagaacgaaattaagagtcgaaaggcggtgctggccagtattgaagcggcgaaaaagttttacgagcatcagggaaaggaagtcaaagtggtagccagtgcctataagagctttggcacgcgcattaaaattgtgaaacgaaagctggacgagaccatacccaacctggccagtccgataccctcgccggacgtaaatgctccttcacccgaacgcgatgcagatctccaactacccgaagaaaataatatacccctgaacctttttggcggtagtattaatggcttcacgagctatctggatggtggcaagctgcccttcgacatcaacgatttcaagcgggactcgaaagataggggaagtgccattgaggtgattggatcgcgatcggacgacgaggcatacgtgccgagtgccaatttctacaaaccggagcctatatccagtgccgatagcagctccataccaggtcttggaggatcagcggtatatactcccgatgcgcccctgtttggttctaacagtcaagaccaatatgtcccgcctccaccatcgcatctctacggtgataacggaaacggaggaagcagtggtggtccttccgaccagtacacgcctgcacccatgccaccgccaccactgccaccgtcgcttggaccctccagtggatcggcagatgatttcaacagcacgtggaatatgagtatgtcgtggacgccgctggactctagccttaatagcagtggagcaagttcttcttcgtatgcgaatcaatcaactcccaattcgccgccgcactttgacagaaaggctagctccacggcagctccgatcgaatataacgagcttctacatacgaatcctgcagcgctgggcgccgaggacgtagaccatcgcaccttgcagcttcctccggcgttcgagtttggcgcaaagttgggtctgagcaaggacaagtccaggcagttggtggacattgatcacagaaatttgatatcactaactggatcacctggcggagcagaaaaggactttaccggcggtgatgtggattaccgcattgtcccgagtccaaacgatgaaggtatcatggcccctcctggcaacaactatgcaaaaagcaagacctgttcgccgcttaaatccaatgctagctcgtcatctgaatcggatcgcgtagatggagctactcgttatgatcctgctgatatggtaattgatatggatatgtcggatgacgatattgatgagtcactaagagagcccaaggaggataatggagatgccgagatcgacgccaatggtgcattgacgccatcgcgtcccgttttgctggaaactccgcctgactttattaatccgtgggacgcgaacaacagttttatggggccgcctttgcccgatgaagaggatcagcagcaacaccatgaacagcagcaaaatcagcagcaagagcttcaacaacatcaccaacatcagcagcatcaacagcagcagccctggaaccaaatgaatcgcatgcaaatgggaggaggtggagcaccgccacctccgcgaccaccatatggacagcctttcccgccctttcagcgcttccccggtccaccgatgaacggtcccgatggaatgcagcgcgggcgtggacgaggccggggatggaatggacccggaccaggtccttttagaccgccttaccaacggatgcccggaccgggatttgatggacccggaccagggccgcgaccattttttcctcggggtggcggacctggtggtcccatgcgaggccgcgggcgtatgcgtggtaaagcatggatgatgtaa

SEQ ID NO: 37449 - protein, 818 aa, DROSOPHILA
MTETFDEELFETRLEALKDTQEGIQQMSNWCLQHRSNHKKIIQCWLNVFKRVRVDHRLVLFYLANDVIQYSKRKRYEFVECWATALQRATTMVRDERVKDKILRIFKIWEQREIYNEEYLSDLSGLLNIAPPKKSQVDVSDEFQNATLIAQVRECVELAEITDKSMQKLPKPPTFEIEVIKQQLKDKSHSGNIEKEVERCVAFINAYNKNLQNEIKSRKAVLASIEAAKKFYEHQGKEVKVVASAYKSFGTRIKIVKRKLDETIPNLASPIPSPDVNAPSPERDADLQLPEENNIPLNLFGGSINGFTSYLDGGKLPFDINDFKRDSKDRGSAIEVIGSRSDDEAYVPSANFYKPEPISSADSSSIPGLGGSAVYTPDAPLFGSNSQDQYVPPPPSHLYGDNGNGGSSGGPSDQYTPAPMPPPPLPPSLGPSSGSADDFNSTWNMSMSWTPLDSSLNSSGASSSSYANQSTPNSPPHFDRKASSTAAPIEYNELLHTNPAALGAEDVDHRTLQLPPAFEFGAKLGLSKDKSRQLVDIDHRNLISLTGSPGGAEKDFTGGDVDYRIVPSPNDEGIMAPPGNNYAKSKTCSPLKSNASSSSESDRVDGATRYDPADMVIDMDMSDDDIDESLREPKEDNGDAEIDANGALTPSRPVLLETPPDFINPWDANNSFMGPPLPDEEDQQQHHEQQQNQQQELQQHHQHQQHQQQQPWNQMNRMQMGGGGAPPPPRPPYGQPFPPFQRFPGPPMNGPDGMQRGRGRGRGWNGPGPGPFRPPYQRMPGPGFDGPGPGPRPFFPRGGGPGGPMRGRGRMRGKAWMM

SEQ ID NO: 37450 - DNA, 3376 bp, DROSOPHILA
ttcttttgtaaatcactttctatttgccgaatgattattactgcaaagcatgcagtttgtgcatcttacaggatatgcacctatttacgatttcacttcaacactcatcgttttcaattcaatttgaatattgcacttcaagttcttccctgcctttaatatctgtagttgaattcctttcaacttgcttgtctggcgcctcgaggagattttcatttaattcgcgactgcccgctggcaagtcgaaaagagcgaaaaatatggtgaaacaaattaatttgttggtgctactacagccaaaagtatatccccgaattatgttttaaagtatatctatatcttagttttgcgaaagttaaaatgagtttcactcataaatcacttaaagctcgagggtaaatattttctggaaagagcttgacaaattggatagtcgtttactagctgattatgacatttacagatgcgatgctggttagaatttgtttggccacccattttgttcataacaaccgtatttgctctcaatcaccagacttattgcaccttagctccacggccatggcttgaccgttttccgaacgatttaaggccaggtcctggcacaaagggaaaagtaagggaaggatatgggggcatccccccatcgtgaggggcaaacaaacgccgtctggctgtcacttaatcgaagccattagcgttattagtggggctgctaccagccgatgcactgagaaaatatatacgatgctcgatgaatatttgattaaatagcattataagttatataatttaacaataattgttaaattctttgcagtcaggtgtaattgtgtctggatctctattacacttctttagtagatacaaaacagaaattaaaaataaattgtaagctataagaataaatattttattaactttaaaacatatattttaagaacaaattatgttttgatttccttgatcatttgtatgatttatgttttatatgcatctattattcccacgcctgactggcggccaagtagagggcaaagagtgtctggacattatggatgtagtccgcctgcgactccaaaggtccttccactccgaatctctcgcaaagaactcccacgtattccgctacagaaatgttctgctgcagacaggatctgtaggcctgatcaagggcattaatggtttgttcatcgccaaaggatctcggccaatcctccaggagggcatctatgtcctttctgggctggacatcgtacattgactgagtcatatgcacttgttccacctcagtgatccacttctctatatccttgcccgatcgggcggtgggaaccagtgatgcggaggaggcgtgacgcggatttcgccccatgctgccactcagtaccgaccgaagtttcatattcagcagactgggctcactttgagcgccagagggctcatcgagcaaccataagcccaatttctccaagtgatcgttcagatccttctggcgttggggctgcaaaagaggcggagcctggactttcagaagggcatccacatcacccacagcgggcacaaactcggggatgaaaggttgcaggtgaaacggagtatcgatcgtttgcggggtgtatttgacgatgtagggaaagagttccttgagttctccgggcacggacagatcctcccatttgtcggcactcataataaaggattgatcatcctgccgcttagatcttcctgctccactagcacttcccctcatgggaagcgttagcttttgatgtggtagcttggctccgcctcttgctcctccggatcccattctgccacccattgcggcctcctcgctgcccgagctcagggtgtcatccggtacttgcttggaacttcggttgcttcccggccgcttttgcatgttcggcccgggcaccagacccgtcattcccacgcccatggtcatgccctggggcagctgcatctcgctgtcatcgtcatcctcgctgtcctccgcctcgtcatcgtgatcaatgatgtcctgcagcagaccatcgtcatcagtagagttgttttggaactgttgcatggaaggaatatgcatatatgaaattattatattcattgaacaagaattgtacgcatttaaattgctccttaatacttattttcatttcgtcaccgtggaaattctttaccactcaccattcgacggtgcctgcctgcggctgctcttcgtacagctccttctccgcccactgctcctggtccaccaccgccagcaccacctctgccaccgcctgttcctccatttcggggctccatttgaacactgctcaggtgcttggagtcgggtccgccgattgtgatctcctcgtcgtagaagttcatggccaaggaccagctgcgaggacccggattcagattcagattcaaatagctctccagctgcgagtcctctcgagctattcagtttcctttcaccgttttcctgcccacttcctggctttccgcgaaattcgcacaacacttgtcccgcaattttccgctccttttgcaggtgctgggtcctcgtccttgtttcctatctccagagcagagttttcttccttttcagcgttttccgcgtcgttttttctgttttcacttgcttacctgctggaaacttgtcaattgctttggccaatgccggtgtcgatgtcgatgtggtcgtcctgacaacgcaacccactacgctgcactgcgagaaatattttcgtgtgtttaaactggaagtacgtatatgtgcattcatttttaagaatttgcattattcgaaactgttgtatatgacagacaatacaattataatttttgtacacacgttttctctctgtgcatcaagtggttgttattgtcatatcctttttggcctgcgtaaacatttacagctgaaacagttgccctttgttatgggccagggttttaattacattcaatttttgaaccgatttaccatcggcgttcgtcctgcgtccatttaaataatttgtagctactgtttaaagagaattttatggcgccgatttattaatgaacatgcgaaatttgggacactttcaaagtgcccataaaaggcttaaccaaatagatttacatttacacaaggcgccgtctttccggaacttatttccaaatttcaatgcttatagttttaagaggtgataacgatgttcaaaacaacatatgtgggttttttttgataatggtctaatatctaaaaacacctttttcttagcgaacatccctttctttggaccatacgatacaaatatgtttttgcccgaaaaataccgaagttaaattaattaatggaaaacaatccgaaagagaataaaaaactatttttaaa

SEQ ID NO: 37451 - DNA, 1251 bp, DROSOPHILA
atgaacttctacgacgaggagatcacaatcggcggacccgactccaagcacctgagcagtgttcaaatggagccccgaaatggaggaacaggcggtggcagaggtggtgctggcggtggtggaccaggagcagtgggcggagaaggagctgtacgaagagcagccgcaggcaggcaccgtcgaatgttccaaaacaactctactgatgacgatggtctgctgcaggacatcattgatcacgatgacgaggcggaggacagcgaggatgacgatgacagcgagatgcagctgccccagggcatgaccatgggcgtgggaatgacgggtctggtgcccgggccgaacatgcaaaagcggccgggaagcaaccgaagttccaagcaagtaccggatgacaccctgagctcgggcagcgaggaggccgcaatgggtggcagaatgggatccggaggagcaagaggcggagccaagctaccacatcaaaagctaacgcttcccatgaggggaagtgctagtggagcaggaagatctaagcggcaggatgatcaatcctttattatgagtgccgacaaatgggaggatctgtccgtgcccggagaactcaaggaactctttccctacatcgtcaaatacaccccgcaaacgatcgatactccgtttcacctgcaacctttcatccccgagtttgtgcccgctgtgggtgatgtggatgcccttctgaaagtccaggctccgcctcttttgcagccccaacgccagaaggatctgaacgatcacttggagaaattgggcttatggttgctcgatgagccctctggcgctcaaagtgagcccagtctgctgaatatgaaacttcggtcggtactgagtggcagcatggggcgaaatccgcgtcacgcctcctccgcatcactggttcccaccgcccgatcgggcaaggatatagagaagtggatcactgaggtggaacaagtgcatatgactcagtcaatgtacgatgtccagcccagaaaggacatagatgccctcctggaggattggccgagatcctttggcgatgaacaaaccattaatgcccttgatcaggcctacagatcctgtctgcagcagaacatttctgtagcggaatacgtgggagttctttgcgagagattcggagtggaaggacctttggagtcgcaggcggactacatccataatgtccagacactctttgccctctacttggccgccagtcaggcgtgggaataa

SEQ ID NO: 37452 - protein, 416 aa, DROSOPHILA
MNFYDEEITIGGPDSKHLSSVQMEPRNGGTGGGRGGAGGGGPGAVGGEGAVRRAAAGRHRRMFQNNSTDDDGLLQDIIDHDDEAEDSEDDDDSEMQLPQGMTMGVGMTGLVPGPNMQKRPGSNRSSKQVPDDTLSSGSEEAAMGGRMGSGGARGGAKLPHQKLTLPMRGSASGAGRSKRQDDQSFIMSADKWEDLSVPGELKELFPYIVKYTPQTIDTPFHLQPFIPEFVPAVGDVDALLKVQAPPLLQPQRQKDLNDHLEKLGLWLLDEPSGAQSEPSLLNMKLRSVLSGSMGRNPRHASSASLVPTARSGKDIEKWITEVEQVHMTQSMYDVQPRKDIDALLEDWPRSFGDEQTINALDQAYRSCLQQNISVAEYVGVLCERFGVEGPLESQADYIHNVQTLFALYLAASQAWE

SEQ ID NO: 37453 - DNA, 2843 bp, DROSOPHILA
gtagattttgtctaaaagtttttttaaaggtatttgcataggacgtgagctctttgaaatgtaaattcctccacctgttcatgcaaatgtgtcattttgtgtaggagttctaattggtttcggattttggtttttattagctcaaatttgcctgtcacagtggaaaatctgcggaaaatgtagaagttggattttgtatttgaatgtatttttcacctaattacccacgttgttcaaaacaaaactgttataacctcttttgcctgcaaatattcacttaacacccggcgattaaaactgaatgagcaattactcacgttgtcaattgtatttaaccatttttgaacttgctaagtaaatgaaatttggcaaattgttcattgagcataaatttgtgtattatattgtttgtttacgatttgagtttctggagcggaaattgattgtgtttaatttccagcacagcgaccacaatgaaaatgtacatatatatttttttgtttttttttttaacttggcagcaattgcagaagggcaacaaagtaaataaaaaattagagaaccagagaatccgaaactgaaactcgtgttgcgactgggaattgttttacgaggtatttcgtgggcttcgagggtatatatgtatgttgtttttgcttccatttggatattcatatcatagattaaaaatacacttgttttgatctattcacttcatgcggtgaaattttttattataattagattattgtgttgtattttcttgcaagaaatgcagatacctatcgagtatatatttctaattgggaacggggtatcttatagtcgcattttaaatacaaggtccaactgtttttattgtcggttgccaactttgcgaggtggcggaaaatgggaaaagagaattgcattaactccacttgcagcgaaaaccgcagccgaaaagcttttgccacagaaatctaatttagcactctcgctcttctctttttccaactagatgtcgcatcaactgcagcagacacgccgccgtttgggctccgttagcgattcggcgccaccatcggagtccagtgagggcacaggctcctccctggagccacgggacgagctgattctccatccggactggtcggcccactcgcattcgtcggcacagaggagcagcgcccatggaaccacatcgctgtacaatgcctcggatatcgatgcggataccatcagcacggacaccacgagcaacacaaatctatcggactacgaacgtggtcaggtggagagtttcttcggcggattgggcacagagatattcgtgagcggcgctttggccaatctctacgagggaaccggaaacgatggcgactggcgtttggtgttcaccggcataccggtgatactgcacgacaagggaaactccaaggccagagccatacccagagtgacgctggttctggcggagaggggctcctgcttcgccctgtggtcggatcggattgataacctgtcgaactatcggatcgcgggtccctcgttccacacgatgtgccggtccagcaatcatcagcagatgattggcttcagcttcgattccacggatgcggcacgcgaattgtggcagcacgtggagcgtttggtcagcaatccagagaatgaggctctaaccgtggccggaacccgcaagccgaagaaacagaagcgcgtcaagccggctcccttgccaccgaagtcccagatttcgcatccatgccaattccaccacgtgaccagtgtggtcaaggaggacagcgaacggtactacagcatgcaggccttcggaccccccaatccccagcagcatcgttgagtagggtcgggcgcgtggatctggaacacgagcgccctatggtggcagaactgaatctgcctcgaagccacaacccaacacaaccacgaagaaatccaggaaaaaccaacccttagttcgtatggctagttatagatccatttgttataggcctaagttatgccaatgtgcgatccgagtgcggaactcggccaacacatttatctgtgatacgatttaggcgtctttactttagagagggatactgataacacaatttgataaagaacatttttaaacgaagaacatagcaaatgaagcgagagtttttgcaagttattaaaacatattaagcgattaacgtttgtcgataagcaagttttttgtaaaaccttttctaatatcacacatatacccttatgcataattatattcgtaccatatagtcctgatatctatcgagtaatctttatgtccacactcgaaggcactgcgaatgattttgatgcctgaaaagcttgctttcctatcggattattgactaagcccagacaaagatacaaaaacagttttttgaaatctatgtatcatataacacacataaatatatatgctatattacacctatctatatattatatatagctctaagcattacatcatagccacttgtctgtatgaacttcatattttgcctgtgcaaaacaatcgcgagaatcaaataaagctgacaaagagagccaattaaatgtgaaaattattcttaattggtttgttttagattcaatctaaatcacttaatcgggtttcaaattaaaatgaattatttaaataaataggttatggacagtgccagattgggtgtagatttattgaatttatgtcattataaaaaccaatggtaatgaaggaaataattaaaaagccaatgtgtagtgaaagcgactaagtgaaaagagctttaggtgtctgaagtggtactatcaatttttatataatttgtttgcagaggcttatggta

SEQ ID NO: 37454 - DNA, 843 bp, DROSOPHILA
atgtcgcatcaactgcagcagacacgccgccgtttgggctccgttagcgattcggcgccaccatcggagtccagtgagggcacaggctcctccctggagccacgggacgagctgattctccatccggactggtcggcccactcgcattcgtcggcacagaggagcagcgcccatggaaccacatcgctgtacaatgcctcggatatcgatgcggataccatcagcacggacaccacgagcaacacaaatctatcggactacgaacgtggtcaggtggagagtttcttcggcggattgggcacagagatattcgtgagcggcgctttggccaatctctacgagggaaccggaaacgatggcgactggcgtttggtgttcaccggcataccggtgatactgcacgacaagggaaactccaaggccagagccatacccagagtgacgctggttctggcggagaggggctcctgcttcgccctgtggtcggatcggattgataacctgtcgaactatcggatcgcgggtccctcgttccacacgatgtgccggtccagcaatcatcagcagatgattggcttcagcttcgattccacggatgcggcacgcgaattgtggcagcacgtggagcgtttggtcagcaatccagagaatgaggctctaaccgtggccggaacccgcaagccgaagaaacagaagcgcgtcaagccggctcccttgccaccgaagtcccagatttcgcatccatgccaattccaccacgtgaccagtgtggtcaaggaggacagcgaacggtactacagcatgcaggccttcggaccccccaatccccagcagcatcgttga

SEQ ID NO: 37455 - protein, 280 aa, DROSOPHILA
MSHQLQQTRRRLGSVSDSAPPSESSEGTGSSLEPRDELILHPDWSAHSHSSAQRSSAHGTTSLYNASDIDADTISTDTTSNTNLSDYERGQVESFFGGLGTEIFVSGALANLYEGTGNDGDWRLVFTGIPVILHDKGNSKARAIPRVTLVLAERGSCFALWSDRIDNLSNYRIAGPSFHTMCRSSNHQQMIGFSFDSTDAARELWQHVERLVSNPENEALTVAGTRKPKKQKRVKPAPLPPKSQISHPCQFHHVTSVVKEDSERYYSMQAFGPPNPQQHR

SEQ ID NO: 37456 - DNA, 2312 bp, DROSOPHILA
gtttgaaaacctttccactgacgtttgaatttatgacctgaaaaaggtatttgctcttccctctttctgtccatattagtgcctctaatccctgcgatctgttcggtttatgcgccatataattgatgtggtttccactggaacgttaaccaaagccgatcacgactgacagtttgctttgccacggttgggaaaccactgtccccctgataagcaccgaaaaatgtcgaaaataaggctcgtccgactttaagcaattaagcaaatagccaagttaacactgcaagtggcgacagaagctcacacactcacccacatggaaaaaaactcacgggactgaatcttacgcagatacagtcgaaacccgctaatcagataccggcgaggtgtaattctaagcagatcaaggcgaccctggcataacaaaaataccaactctagagaaatttttcactcaaaccttaaatttccaacataattaaccaaaacgttatgtttgaaatgaaaaaaacatgtttaatgcttaaactggctagcctttaaacacaatttctgtttttgtaatcattaattagctctaaattggctacagtcaaaggttcgccataagaatctcagaaaaaataactaaaaatcattgtaaaggctttaaaaagaaaagctagtaagatgttatataaaaattaaagctttactttaaaaacgttgctctttaaaactcgaccttattgtaaattgttattaacttaagattgtggattatatagacgaggcttgactgtacttgaacgcacacaaactggcgaaaaagatatggagaagacgtcgacgaactcgtttcaattgagacgcaaactgaaacacaattcatttcgctggagaacgcgcaaccgaaaacattttccacctctgctcttattcgtcttctaactgatatttttttactcacggtttcttggcctttggtcttttgcgtctccgatagagccccaaaaataaaatggagcagtggaacaatgtggagctgacgaacatgtccaaaaagtcgtataccctgaatcatgcctacgatgccgccgagaagttgaacaaggaaaacacggcaaagtcctcgaatggcaatggcaccagtgccgatgaatcaacagctgcagatggcgatctcctcaagccaggatcggacgtgcgcccaaaagtggagcccgaggacgtggagagcctgctgcgtcgcctctacgggatcacgataagcgaggttaaggaaatcgtcgcctacgacgatcgcaacttctttgtcaaggaggataggtaagcaaagcgatgacagtatctcgctgacaccctttcccaatcccgcaccacatccggaggtttatctcgtgtatgggagttcagcgtaagcatctcatacagctgcagtcagattattagcacaggcaatttcaaacatcataatatatcatttagatcaggattagtcttctatatagtaaacacaagaattcgttgcttgaaataatatctcctttaaagcatcaacacaacatattttctgtgctttgacatgactgcaattttagctgctgttcgtagtacgactgtgcaacacgaaaacaaataataatgagccggagaaatgcggcggtatgtagcatctatttatacccagtttaattaaagttgttagtcgcggcagttgagtgtgacgcagtcgacagtcaccttgccagcatcgcaattgctatcttgatggattcatggcattcagcactgatgtagtcagttcagctcttcactttaataaattagataaatctagagaacaaaaagcttacaatctagaagagccatctatttgaggacaggtttcgtctggaagccaaacatgctgagcttggtttgattctggctcacggcacccagttttccattcgtcctagatttaggagtgcccttcttggcagtggagggtttactcagccccactcttcgtttgctggttggcaaaaagttctggcgttgctggctggaggatgaggtagatgatgctctctgatccgagctacagctgtcgtccgatagcagaatgatggcatcattattgttcctgtcggattcctgagtgggttccggagagttttccagaagtaaatccagtgacttaatgcgaatagttgttgaattggtattgccttcagttggtatttggggttgagagttgttgagatcttcttgggattctaaaggcgaaggaacacctttatcttgtgattccaaaagagaagaggctgtggtatctgtatctgtttcac

SEQ ID NO: 37457 - DNA, 312 bp, DROSOPHILA
atggagcagtggaacaatgtggagctgacgaacatgtccaaaaagtcgtataccctgaatcatgcctacgatgccgccgagaagttgaacaaggaaaacacggcaaagtcctcgaatggcaatggcaccagtgccgatgaatcaacagctgcagatggcgatctcctcaagccaggatcggacgtgcgcccaaaagtggagcccgaggacgtggagagcctgctgcgtcgcctctacgggatcacgataagcgaggttaaggaaatcgtcgcctacgacgatcgcaacttctttgtcaaggaggataggtaa

SEQ ID NO: 37458 - protein, 103 aa, DROSOPHILA
MEQWNNVELTNMSKKSYTLNHAYDAAEKLNKENTAKSSNGNGTSADESTAADGDLLKPGSDVRPKVEPEDVESLLRRLYGITISEVKEIVAYDDRNFFVKEDR

SEQ ID NO: 37459 - DNA, 2840 bp, DROSOPHILA
ccaaaaagcgttaagtccgagtcctcggtgatgatgtactgggccacatctgctctattcagccaggccatttgggcatcggcctcgtagggcgccacaatgcagtcaacattccggctccggcattcccggatcaaccgcaacgccatgtcgtgggtgacatccacgcagcgtcgcatatgggatcgggcctcctcgatgcgacccaatcgaaggagttccgccgcccgctctttgctctgcttcctggagtcccttctccgcttttcggtcaaagccttggccggcaagtgctgcccatcgaagaccagaatgggcttgatgtcgtaggacagcagcatgttcacatacttcaagcagtattgtatataaacatccgtatcctcgccgcgggccaacttctccgcacagccgaagactcccttgtgtagccagcaatatgtgtccacggccactgtgctgccgcgaatgtcttttagatgcagctgcgaggaggccttgcccacgaagggaattaggccggtaatgcccatggttaggaccaacaacaataacacatataaaaacgaaataaacaattaataaaattgcggatcttagcgccaaaattgccaatgcatcagtgtgaccaaagtgcgatgctataaaaaaaattcgaattgccattcacatggaacgcatatgtctatcattatccaacacttggattttaaaaataattcaatatttctaacagatattattttgtatttttatgaatgtggcgctttgttatgcctcattttttatttactccttaagataagtaatttcctattgaatacatttccgtattgcagtaatgttaagaaccccctcattgtaacccactgtccacacggatacgtcctgaaaatcctcaactcactggactctaagaaagaggacttcgtggatgcccaaaaccagatgctgctttacttgggtaagaattgctagccaaatcatcagcaaattgacaatgcaatcgtattccctaggaaaacacagtgtgaaatgcccacgaccagtagccaatgcaacaggaaagtattactctgtggaacggctgaatgggaattcgaatgtggtgcgactgctggaatttataccgggagaaatcttccaccaggtgccggtgacgaagcacctgctctaccgcagcggcgaatacttggccaggttggatcgagccctcaagaacttcacccaccaggcatatgaaagccacaagaccttgtggatgcttcagagtgttcccgagcttaggcaattcctgtacgtggtgaaggatcaggagcagcggcttatctgcgacgaggtgatcgatgcctttgaagccaaggttctgagccaactgccatccatggagcaccagatcatccatggggacttcaacgaacaaaatatagtggtggagcaggtgcccaatcaaactgaatataccatcaagggagttattgatttcggtgatacgagcaaatcgccactgatcttcgaaattggaattgccctcacttatatgatactgcaggccaacgatttggccaatggtggcatatttctgtccggttataccagtctgaacccaattgagaattccgagctggcccttctcaagtactgtgttactgcccgatttgttcagagcctggtaatgggactctacacccacacgctgcatcccacaaatgagtacctcctggtgacccaggaaaagggatggaagctccttcagaagctgtggcgcgagagctttgacgatattgatgagctgtgggcaagcactggacaccagtacttgacgcagagcaataaataatataaaattccgttaggcttttccgttttttaaaggtattttaactgattttcaatccagctattctggttgttgaagattttgtatgttatgttttccattaggtaacgagggtcagataaaattgtcacagccaatatatagagtataatgaagcattttctaagatattaaatacatttgcaattagcccctaaacaagtttatatcgagatgatcgcaaacaaaaagacatctaaggaaaccagaagcaagcgatgccaggtcattggaaaatcaattgaggcctgttaaataaacccattgtcaattattagaatttcatttacatatcacctgtgcaaaataagttgcaagtccaagtattgattgcatttcgttgctttacaatttactttatcctgtatattattatcgttatctttacaataaaacttgttaaacaaatacaaatacattgtatgtagtacatttattcttacagtaggtgagtttgtttagggctctacaatggtggcaattaatttcgaattgatttttagttgaagcttcagtaaattgaactatttaacgctaattacattgaatggtgtaaaatggtgttgaacgaagttcatccaccctccgctcctccttttcctggacaatgtacatcgtatcgtatttactttgttacattataattatctctatgcgtttgggtacagtgcctacttaacgctatattacaagtaaccgactttacacctatcgaaatgtacaaaaataagacgccactcgaaagcgagctggtgatttgatttctccggacgttggcaggctccatatcattgcgacagaaagtcaaacagaagaagtgttaaacgaaacaatatttagccaaaaatacatggtgcccataaggccaaacgggtgtgcagttcgggaatcagttttatatttattcttcaaatctagttttcatcttaacggcctttcttgttcgatacaacataaaaca

SEQ ID NO: 37460 - DNA, 840 bp, DROSOPHILA
atgcaatcgtattccctaggaaaacacagtgtgaaatgcccacgaccagtagccaatgcaacaggaaagtattactctgtggaacggctgaatgggaattcgaatgtggtgcgactgctggaatttataccgggagaaatcttccaccaggtgccggtgacgaagcacctgctctaccgcagcggcgaatacttggccaggttggatcgagccctcaagaacttcacccaccaggcatatgaaagccacaagaccttgtggatgcttcagagtgttcccgagcttaggcaattcctgtacgtggtgaaggatcaggagcagcggcttatctgcgacgaggtgatcgatgcctttgaagccaaggttctgagccaactgccatccatggagcaccagatcatccatggggacttcaacgaacaaaatatagtggtggagcaggtgcccaatcaaactgaatataccatcaagggagttattgatttcggtgatacgagcaaatcgccactgatcttcgaaattggaattgccctcacttatatgatactgcaggccaacgatttggccaatggtggcatatttctgtccggttataccagtctgaacccaattgagaattccgagctggcccttctcaagtactgtgttactgcccgatttgttcagagcctggtaatgggactctacacccacacgctgcatcccacaaatgagtacctcctggtgacccaggaaaagggatggaagctccttcagaagctgtggcgcgagagctttgacgatattgatgagctgtgggcaagcactggacaccagtacttgacgcagagcaataaataa

SEQ ID NO: 37461 - protein, 279 aa, DROSOPHILA
MQSYSLGKHSVKCPRPVANATGKYYSVERLNGNSNVVRLLEFIPGEIFHQVPVTKHLLYRSGEYLARLDRALKNFTHQAYESHKTLWMLQSVPELRQFLYVVKDQEQRLICDEVIDAFEAKVLSQLPSMEHQIIHGDFNEQNIVVEQVPNQTEYTIKGVIDFGDTSKSPLIFEIGIALTYMILQANDLANGGIFLSGYTSLNPIENSELALLKYCVTARFVQSLVMGLYTHTLHPTNEYLLVTQEKGWKLLQKLWRESFDDIDELWASTGHQYLTQSNK

SEQ ID NO: 37462 - DNA, 11968 bp, DROSOPHILA
tgatcacacatatttgtataatatcaaatatgtaacaatctgtttgaaataaagcattctatggattatttactcttcaaatcaactgctactccattaaaacttatccgcctggcggctaatctgagaactactcgcaagcagcgctctaatcggctaatttcggaaacttcaaactatacatgtagatagtgctgacactttttttttacatagctagaaaaaacacaaaggcagttgaaggttcgcagaagaatgtaatgaggcactattatttacaataagtatcaatttcaaatacgagttttttctcagatactttaatggaacttccaccagtttgccttatattgcgttagaatgaagttcatatttttctgtattgtagctgtaattttagtggcatctgtgaagtccatggtttttgtgaagatactgcacaatgagagtaatgcgttgagaaaactttatatgtaagaataataaagtctcattaaaacgctttggtagagtaccccggccagtgttaccccatccatgttcgagtgggtaaaaagaagcaatacgatgtttttgccctacaacccggcgaggaagtcagtgatccaaacacttgcggcgtgcaggtttgcatgaactccgaaggacttactcatgtctactagtaagatcgatccaatttgaaatgatataccctaatgcatatgatatccaagctattttccagctgtcctcgcactttgccgagcagtggctgccaggacgataaggccatggacttgttgctaaaatttccggaatgctgttggacttgtgccaccagtagggactgcgatgaagaccagtcctttccttcttatccttatcctcccgaaatacgtgatgatcaaccagaataatcaatctgccacaaaaaacttagattttccgaaatgtagaaaccatatattattctgagttattttgaaaaaatacaaatgcaaagaaaaagtttagtactctagcagtatttgctcttgaagtcatagtcatcctccgatccggtggccagtagctcctccttgcagccatggtgcagtcgatgcacatccgtgtcgaagcactcatcgtggagtcgtttgtcccggcttttacttcgctgccgcctggaatgcgatgagtgaccgtgtccgtgtccatgtccgtggtgattgtgcacatggctgctggaaccatgatgatgctcagacggtggtgagtgatggctgctgcctgaatggatggtcgccttatggtggaaggaagttggcggaggactgagctcccttggcgggcgacagtggctggatggcggtatgggatcatcgaaccgaggacacggatgatctccaactggcgaagctgtctcatagcgtttcgaaagcattgtgaactcctgatgtgccgagcacagggcctgcaggcgatgcagaagatccgtttccggcaggtcgcgaagatgcagtgtcctggccaccgatgtgcggaaggattgcaaatgcgaaagccgctgattggcatccgagagttgggagctcaagcgactgacatcatcgcgcatagactaaaaatttcaagaaagatttagtatgtgaatttttacataaactatacttttatttacatttattagcgcctcatcgcggcatctgcgattctgattggattcacaggaggacttgaggcgctccttcagggcattaagttgggagagcaggcgcgtcttctcatcctccagatcgcatatctgtgtggtcagctcatcgatctttctggccctctccaacgaggtgatcttatactccacagcctcggctagctgggccttgacctctgctatctgagatcgggcatcggccagctgggcactcaacttgtccacctgcttggccgccttcttggcccggcaaaccgcctcatcccgttcaccctgcaacatgcactttcctcgcgcaccgtcctctatgatggccagcttgcgacgcagtagctccaggtggagatcccgtcgctgcacttgctccctgagaactcgaacacgtcgctgcaggttgtagacactgctgctttccttgaggggaatgtcatgacaggatctctcgcggcgaagtttcccatgaccatgtccgtgatcacagcaacccttatccggactgtgatgatgatgatgatgatgaggtgcctcgtggtcgcagtgagcggcgagtctctcggctctctcaagcaagttctccgccattagattggtatcagttccaagagccggaggggcagagcactcaccccagttcatcgcgagggccagtcgctgcaggaactccgatagacccatgtgatcctttcgaagagtatggatctcggcatggcacttctccaagcgctcagttagctcacatttctgagcctcgccagaacggaggcgacattcggtggtctgttgggtttccttaagcttctcatgctccgagttcagctgatctcgcagagagtgcatttgctagagggtatacaaattggtttattgtttaaatgaattatgaattaataagttcgattaccgcatgcatggcctggttctccgccagaatctctctcagcttgtccttgatgagcgtttcgcacggttcgggaacattcaagagattgctcaatccccgcaagaactgcagacgatcgccctgagtccggtccaggttgttttgcaaacgatggcatcgcgactcaaagccgcgcagctcttccttgagcttctcgccgttgatttccgattcagtcaagcgatctctttggatctgaagatccctttcgtattggcgacagcgtccttccaactcgtggttgtgattgccagctccatcaagttgggccgtgagccgctgcttctcaatgttggccagcgacttcaagttgagcagttcattttcgcaggagctgagcgtgtcgcaggtggaactgaccttggctttcgtcctttgcagctccaccatcacctcctcggcccgcgagatgatgcactcgggtgtggcatgggaattctgattgccatcgcacacatccattcccaaagtgatgctaaggcgtcgcaggagatcgtgcagctgagccttgatctgctccttttgcgattcctcactggccatatgcgtttccagatgctgtatcttgcagattagctctttgttgcgctcgtcggagctacgcttctcccgctgcaccgtctgaatggtggaatcacatcgggcctggacagcctgctccctgctctccgagttttgcagacgactctggagggatccgatgagggcagtctgccgagcagcctgggctcgcagattctcgatatccgcatctttgctgcacaatgctgcacgcgcttcagcaagctaggataagtgtaagtatatgtatatcctttgcattacttgattctataataaattgattcttttatttacctcccccgtaagtcgctcctttttgtaggacaacgcagccagttcactgcgcagtgtggtggtcaagtcgagaccatgatgatgttctgtcacagtgattcccgtattgctgcaggatgtgtccagctggataatcgcatttaaatttggagaacacacaaaaggttttgatttgcggagttattaattaattacatataaatttatctaatttcctagtttagaaaacattttcaaaaaatgtatactttctacattcttgaatatattggctctattaaataaatgtaccattttcacattttcctgttattaaagttatatttatacaatttaagataaaatggttttgaaccattcagactttcattattttttgtaaattttaattgtacttttaattataatatgtaatttttaactgtgatggcattaacattgtcccaatgcccaccaagtgatgatgatgcggagataatccaccagtgtgtcccaagtgatggtgatgcagatgattttcactgggcatatttagagccacgaatatttaaagcactccaagaaccaagtcaactgttcccagtaaaagccgtcgaagaactgaactttggttcgggaataaccactttcggaagcctaacaacctccacctaacaactgaggggagtccgatgcatggcaccgaggaatttaccccaacataacatcacacagtgctcaaatttatgctccaagtgaaaacgagctcaatggcaggagcaaggggctttggataggggggcagccgtgtggagctcgaaaggtgtagccacgattacacttacacatgggggaaactttgcagtttgtttggattatttgggtcattcacatggcgccaagtggcgaagtatcaaatgcaatatccacaacggactcacgcacgcaagtgcggacgccacagggtttggggttttgggtgctccggggctaggtggatggatatacgatggaaattttcaacttggccggaaacggaaaatgaggtgtgcaacttttggccaattgtctgcaatttaggaaggagcaacggcaagacaattgggaactgaaatgtgttgaacattcgataagcttggccgggttaattatgaagccaattcaggttgcctctttaatgaaattgaaatgggcgaaatgggaaatgtttcaaacatttaaaagatatttcattgaacttgattttgggcttgctccttaggctttcacaagtcctcaattcagtaaattagatgcaatggctccattttatcctattgtgtgtttatgaatagctttacaatcattcatatgtatattttgattatgcagccccacccacatggcaatacgaaccactgtatcccccagaccaatcgagttttatgcaaatccccccacaaacatcattagttcccctaacaaccgcatacatttgaaacataaaaaatagcgaacaaaagtcgttattcaattgcgaattcacataaatctatcttgatatgatgtctacacgcttttatggcaatttggcgcacgattttggcaaaatagttaagcgacaaaaactactcacctggcaaaatggaatggctggttgtggcaaaggtgacattgtggtcatccgtgcgggaatcgttttcgggtcctgatcagcaccgaacaagacctcgaacacctgccagtcctcgggtgtgttgccattggtcgtgggtcgcggattaagtggcattccaatggattttatccggatgaactcgatccgcctccgactggcgttggaaaaattctactctatgttttctaagcgtaaataatacacccgacccgaccaggcaacaagaagaggcaaagttatgcggcaactttcaggttgccacggcgcataaaataactatgcatgaggcgatactacactagatggtgagggtgtggttcctggtgggtaactacggtgactaaagtgcacataattcgattttctaaactgcaatagccgtagagtggtaggaggggcagttaccccgcagccgtttgcctgtaatttcatttgtctccgccaaaaataatgaatatggtaaatgtttgccctaacttggcgcccactccccgtccgatggaataacccccttaatggcctgatcctttgacagtgactttgaaggcaacaaccctttggggttaagttcatgcatttcgggattttgattattttgtttgggttgccaacataaataatagttgtcgaattttgatgagctccagcatttcgcctgcttcattttggattcctggcgcttatacatggtgatttcacttccgttgcttattttgcctagcgaaattaaacaatttatattaattttcaattacatatcatctttaagattaactaatttgtaaaggcttgtaaagggaaatatctatatagcccacctgtttttgttgacgagctttagtttgcgtttccatcaactttttgatctcggctatttttcgaaggtacatttcctcctgttccaagcagagcttgtgatcgtccttgaccttctgcagtgcgagcctggcgatcgtgcactgcacctcggcgctttccagatcccgctccagcttgacctcccactccctattgcgtgtcttaagcttttccacttcccaggagtatatcatctccgagctgcgctgcaccgtcatgtcctgttccagcttggttttcagttccattaactccttcctcagcagatcctcgcgcttacagttaagcattagtctctgatccatacagctgtttacccacttgatatggtaacgcatctgtatcggatcagtcactatgaaaatgtacaaaagatacattaaatttttgtaatattttacaactcacaactactgccctcgaagaggtctacgagtgcagttcgattgatatccagactggatacgctggattccactgccaggctactgttgctcattccctccttgatccggcaattgtccttgaggtccttaatccaagcaccaaccgtgttgtacttgcaatctctaagaatataagtgtttccaatatagaatgttcttcttgatggaaatggggccaataccgtattagttgtatgctattttcgcaaaggtcgtcatccttttgaaagtcctctcgcatttcgtgtagaatttgttcgatctctttcagatcagttcggaactttacgcagtcgagatcctcggaactccgttcgcgatggatcacgtccaggtacaactggttatgttccagtcgtgccaggaagtgatccagcgaccacttgaacagattgtagggaatctcgtcgatctttccgggccaaggactggaaaacagacgcagttgcttcagcaggcgaacggataggaactcgatggccgccttctggcatttgatattcaactcggtcatcatggacgaacgcaatttaatgctttctatggcctcctgaacggtcttccttccgctctccctcttccgcatcctggccatctgccgcaccaccatagcctctgctccattttcgaccacccgatccacggtctccacagcataatcaaccacggatttgctccgaagggataatgcggccagcatcgaactcacacggcgttcgtgatcctcgatgattgtgctaaggaatttatcacggcattgggagggatcgagctgatccggcaaggggaactgaatcgcaaaaggatccgattccttttcctccattaacacatccattataatttgttgggcttttatttagcttttccccactcaaatgtttttttatataaatgtcagatttttaataaaaagaaacacaactgctgtgtgatttcaatgtttttaggtaggaattagttttattaataaagaagtcgttctaacgttaaaaaaaaatgtttaatgtaatctttggtaaattgcaaacacataggtaaattaatagaggccaaaccggagaatcttctatggcattttggaatttcgggactttctttcagaccgtctctcagaaagcctttcagattttcgtcctatcttattttcggaattcctctctgattttttttccgacatcctttcggactttctctcggaatttcgaaccgacttcctggacaatcggcttcgcgtggaaccaaatacctaaacatatgtgttattgtggtaattcaaacactgaatcacttcatatagacttaccccctgttcctgagcaattatagcctgcacttcttcgattcgctggagatacatgtccttctgttctttatagaacttaatatcgtccttgaccttttgcagtgcaagcttggatacggtacacgtgacttcggcgttctccaaatcggtatcaagtcgctcctgccacactctgacgctttccctaagctttcccacctctagcgagtatataagctcggaggaattgcgcaccttttcatcctgcaatgcttgtacctccaggtcatttagttcctttctcatcttctcctcccttccgtttatccgatagagacgctgatccgtacagcttctaatccagttgatttggtaccgcatttcaatcggatcctgggctgcggacggaggtgagtatcccagatatggctcatagtaaacacccactcacctgactcgtcttcgaaggctcccattgccgatgagtgacgtaatactatgttaaaggcgctactttgagcaaaaagcctagcggttaacgtactggatctaatgctctcaagattatctttgagggtactgacccaaggtgcgttaatgttgtattgggcacttctgtaatttaatgatatcagatagtgaatataatgaaaaatcataaataaactaaactccttaccttaacaactccatgctcccctgacatagatccctatcgttgcgatagtcttccctgatctcgtagataagaagttcgatctgacccaggtccttgcagaacttgaggcagtccagatcctccgcacttctctccctatggatgacgtctagatagacctgcttaattgccaagcgcatcaggaagtcgtccatcgaccagctgaacaggttgtaagggatatccccagtgtcaccaggccagggactcgaaaagaggcgcaactgctttagcaggcgaaccgacaggaattctatggccgccttctggcatttcaggttcaggtcattcatcatggtcgaccgcaacttaatgttctccaagatctcttccttcgtcttccgcagacttaaccttttgcgctgactcaccaactgtcgcaccaccatagcctctgcccccttttcgggcccctgatccgagaggtcctgtgatgacctgaattccgaagcggcccggaatgtggatctgggccgcagggaactggcccgaagttcgtgctcccggatgaatgtgccgatgaattcatcgcggcattgggacggatcgagttgctccggcaatggaaatttaatctcatatggatcggactcaaatgtggtttctaccttcttcttattttcatcagaatttttcctctttttggaaaccatttttttaattttttcttttttttttttttgttttttttttttgtgttttattctgtatgagtgttgtttgaaagtgtcacattttctgtaaaatcaatacagctactgtatactttgaatactttgtatcaaattaagatgaatgagctcaagcttaagaagtattttattgaaaccgttggtaaattgtaaacatatataagtagaatgggccgaaataagggatatgctattccattttagaatttgtggattttctttgagatttttccgccatcgttttggattttctttcagctttcatgtcagatttcctttccgtcttcatttcaggctttgtatcggacttgatttcagacttcagttcagacttcttttcagacttccctttagacttcttttgaaagttttttgtagactttggtacagattttcttaaagaccccctcgacattcgttttaaggcggctaattcctagtgacatttcatctaatgatgactccataattcgatttctctgccaagacttaccctttcttcgcgaatcatcctttcctgatctatgagtgcttgcacttctttgattcgctgaagatacatatccttctgttccatgtaaaactttaggtcgtccttaagcttttgcagtgcaagccttgatacggtgcacatgacgtcggcgtgttccaaatcggtatcaagtcggtcctgccaatttcgaatgctttccctaagctttcccacctccaactcatacatgagtccggaggaatactgcaccttttcatcctgcactgcttgtacctccaggtcttgtagctctctttttatctccacatttctttcgttcatccgggtcagacgctgatccgtacagcttttaaaccagttgatttgatatcgcgtttcaatcgggttcagggctgcggaagaagatgagttttccaaatatggctcatagtaaccccactcacctgatttcctttcgaacactatcattgccgatgagttacgacgtaacgacgtcaaggagccactttgctcattgagcaaagcgactgacgcactggatgccagattttcgatattatcattaaggctctttacccaaggggcattcatgtggtattgggcatttctgcaatagaacacatatgtcaatgtcgcagttaaagctaaacaaagcaatcgaaacacccttactttaacaaatgtaggctattttcgcagaggtctacgtcgtctcgaaaatctcttctaatttcgtgtataaggtgttcgatctcgctgagatccttgcagaacttaacgcaatcaagatccttgacacttcgctcccgattgaggacatcaaggtagatctgctttacgtccagtcgcaataagaagtcatccaacgaccagctgaacagattgtttggggtctcctccagatcgcctggccagggcatcgagaagagtcgcaactgtctgagcagacgaaccgataggaattcgatggccgccttttggacttggcgaatgagatctgctattatggtggacctcaatcttatgctggctatgacttcctccattgttctccttacggacgttctttggcgcttttgggccatctgcagcaccaccatagcctcggcttcctttacatctgtgtcttggagctccactggccgcttgactatcgaaacgtcccgcactgtagatctaaccactaatgaggccactcgggactcgtgctcccttatcagatccttgagaaactcatctcggcacattgatggatcttcttgctccggcaagggaaagggaatttcccaagagtcaaattgctctccttcgagactaaccatgccaggtaccacggctttcaaatgcttcgtctttttatggggcatttttagagttttttgtttatttttgttttatgttttctattctgaagtattttttgtgagtatcatttctaggaataatgttaaaaggggctggtacaccatcatatgatggtgaaatctaaatacaacgcattgaattccacaccacggagttattatcgtttatggtgataaatttcaaatcccccgccatttagtgttggcaagcgtcgttgcaaagcgaacaaataaacagctgattaggcagtggatagaagcagcagctctagccattcgcatgtcaacgcggctgcacattgctttgaatttttgaatgtgttcgttcgtttattctttttactcattgtttttcgagtgttgtttattgttttaatcaaagttagttgctccgcttgtcagtttacataagcaatctcacaggtgggaccgaatctaatcgactctcctctgcttggccagtttccatccgcggcgctcagttgctaagtttagttggccacttttccgattcggagactcaggtgcattttccgtgaccaggtaaataagcttgtcttagtctattgtttctgtattcggcggcttgtttatgtgcttgattagcagtcagctgtgcatatttgcgtctctcacatgcacactatatttggcttttaattacccacagctgcgcgtgtgtgtgtgtgcgccagagtgggagcttgtggccgtgtgtgtgtgagcccagaaaccgtagttacgtacatcactgcgtatgagcaataaactgtaattgagtcaaggtcagtaattggcacttgattgacaaacttcgatagctgctcgcttatgtacatttaaattcaattattatcgcctctctccgcccaaatatttacatgcatatattccatttgccctgcttatcatcgatcggtacgggtttgaaaacctttccactgacgtttgaatttatgacctgaaaaaggtatttgctcttccctctttctgtccatattag

SEQ ID NO: 37463 - DNA, 6276 bp, DROSOPHILA
atgccccataaaaagacgaagcatttgaaagccgtggtacctggcatggttagtctcgaaggagagcaatttgactcttgggaaattccctttcccttgccggagcaagaagatccatcaatgtgccgagatgagtttctcaaggatctgataagggagcacgagtcccgagtggcctcattagtggttagatctacagtgcgggacgtttcgatagtcaagcggccagtggagctccaagacacagatgtaaaggaagccgaggctatggtggtgctgcagatggcccaaaagcgccaaagaacgtccgtaaggagaacaatggaggaagtcatagccagcataagattgaggtccaccataatagcagatctcattcgccaagtccaaaaggcggccatcgaattcctatcggttcgtctgctcagacagttgcgactcttctcgatgccctggccaggcgatctggaggagaccccaaacaatctgttcagctggtcgttggatgacttcttattgcgactggacgtaaagcagatctaccttgatgtcctcaatcgggagcgaagtgtcaaggatcttgattgcgttaagttctgcaaggatctcagcgagatcgaacaccttatacacgaaattagaagagattttcgagacgacgtagacctctgcgaaaatagcctacatttgttaaaaaatgcccaataccacatgaatgccccttgggtaaagagccttaatgataatatcgaaaatctggcatccagtgcgtcagtcgctttgctcaatgagcaaagtggctccttgacgtcgttacgtcgtaactcatcggcaatgatagtgttcgaaaggaaatcagccctgaacccgattgaaacgcgatatcaaatcaactggtttaaaagctgtacggatcagcgtctgacccggatgaacgaaagaaatgtggagataaaaagagagctacaagacctggaggtacaagcagtgcaggatgaaaaggtgcagtattcctccggactcatgtatgagttggaggtgggaaagcttagggaaagcattcgaaattggcaggaccgacttgataccgatttggaacacgccgacgtcatgtgcaccgtatcaaggcttgcactgcaaaagcttaaggacgacctaaagttttacatggaacagaaggatatgtatcttcagcgaatcaaagaagtgcaagcactcatagatcaggaaaggatgattcgcgaagaaaggcaactcgatccgtcccaatgccgcgatgaattcatcggcacattcatccgggagcacgaacttcgggccagttccctgcggcccagatccacattccgggccgcttcggaattcaggtcatcacaggacctctcggatcaggggcccgaaaagggggcagaggctatggtggtgcgacagttggtgagtcagcgcaaaaggttaagtctgcggaagacgaaggaagagatcttggagaacattaagttgcggtcgaccatgatgaatgacctgaacctgaaatgccagaaggcggccatagaattcctgtcggttcgcctgctaaagcagttgcgcctcttttcgagtccctggcctggtgacactggggatatcccttacaacctgttcagctggtcgatggacgacttcctgatgcgcttggcaattaagcaggtctatctagacgtcatccatagggagagaagtgcggaggatctggactgcctcaagttctgcaaggacctgggtcagatcgaacttcttatctacgagatcagggaagactatcgcaacgatagggatctatgtcaggggagcatggagttgttaagaagtgcccaatacaacattaacgcaccttgggtcagtaccctcaaagataatcttgagagcattagatccagtacgttaaccgctaggctttttgctcaaagtagcgcctttaacatagtattacgtcactcatcggcaatgggagccttcgaagacgagtcagcccaggatccgattgaaatgcggtaccaaatcaactggattagaagctgtacggatcagcgtctctatcggataaacggaagggaggagaagatgagaaaggaactaaatgacctggaggtacaagcattgcaggatgaaaaggtgcgcaattcctccgagcttatatactcgctagaggtgggaaagcttagggaaagcgtcagagtgtggcaggagcgacttgataccgatttggagaacgccgaagtcacgtgtaccgtatccaagcttgcactgcaaaaggtcaaggacgatattaagttctataaagaacagaaggacatgtatctccagcgaatcgaagaagtgcaggctataattgctcaggaacaggggttccccttgccggatcagctcgatccctcccaatgccgtgataaattccttagcacaatcatcgaggatcacgaacgccgtgtgagttcgatgctggccgcattatcccttcggagcaaatccgtggttgattatgctgtggagaccgtggatcgggtggtcgaaaatggagcagaggctatggtggtgcggcagatggccaggatgcggaagagggagagcggaaggaagaccgttcaggaggccatagaaagcattaaattgcgttcgtccatgatgaccgagttgaatatcaaatgccagaaggcggccatcgagttcctatccgttcgcctgctgaagcaactgcgtctgttttccagtccttggcccggaaagatcgacgagattccctacaatctgttcaagtggtcgctggatcacttcctggcacgactggaacataaccagttgtacctggacgtgatccatcgcgaacggagttccgaggatctcgactgcgtaaagttccgaactgatctgaaagagatcgaacaaattctacacgaaatgcgagaggactttcaaaaggatgacgacctttgcgaaaatagcatacaactaatacgagattgcaagtacaacacggttggtgcttggattaaggacctcaaggacaattgccggatcaaggagggaatgagcaacagtagcctggcagtggaatccagcgtatccagtctggatatcaatcgaactgcactcgtagacctcttcgagggcagtagtttgactgatccgatacagatgcgttaccatatcaagtgggtaaacagctgtatggatcagagactaatgcttaactgtaagcgcgaggatctgctgaggaaggagttaatggaactgaaaaccaagctggaacaggacatgacggtgcagcgcagctcggagatgatatactcctgggaagtggaaaagcttaagacacgcaatagggagtgggaggtcaagctggagcgggatctggaaagcgccgaggtgcagtgcacgatcgccaggctcgcactgcagaaggtcaaggacgatcacaagctctgcttggaacaggaggaaatgtaccttcgaaaaatagccgagatcaaaaatcggaggcggatcgagttcatccggataaaatccattggaatgccacttaatccgcgacccacgaccaatggcaacacacccgaggactggcaggtgttcgaggtcttgttcggtgctgatcaggacccgaaaacgattcccgcacggatgaccacaatgtcacctttgccacaaccagccattccattttgccagccccggagcacccaaaaccccaaaccctgtggcgtccgcacttgcgtgcgtgagtccgttgtggatattgcatttgatacttcgccacttggcgccattgaaaatcatctgcatcaccatcacttgggacacactggtggattatctccgcatcatcatcacttgctggacacatcctgcagcaatacgggaatcactgtgacagaacatcatcatggtctcgacttgaccaccacactgcgcagtgaactggctgcgttgtcctacaaaaaggagcgacttacgggggagcttgctgaagcgcgtgcagcattgtgcagcaaagatgcggatatcgagaatctgcgagcccaggctgctcggcagactgccctcatcggatccctccagagtcgtctgcaaaactcggagagcagggagcaggctgtccaggcccgatgtgattccaccattcagacggtgcagcgggagaagcgtagctccgacgagcgcaacaaagagctaatctgcaagatacagcatctggaaacgcatatggccagtgaggaatcgcaaaaggagcagatcaaggctcagctgcacgatctcctgcgacgccttagcatcactttgggaatggatgtgtgcgatggcaatcagaattcccatgccacacccgagtgcatcatctcgcgggccgaggaggtgatggtggagctgcaaaggacgaaagccaaggtcagttccacctgcgacacgctcagctcctgcgaaaatgaactgctcaacttgaagtcgctggccaacattgagaagcagcggctcacggcccaacttgatggagctggcaatcacaaccacgagttggaaggacgctgtcgccaatacgaaagggatcttcagatccaaagagatcgcttgactgaatcggaaatcaacggcgagaagctcaaggaagagctgcgcggctttgagtcgcgatgccatcgtttgcaaaacaacctggaccggactcagggcgatcgtctgcagttcttgcggggattgagcaatctcttgaatgttcccgaaccgtgcgaaacgctcatcaaggacaagctgagagagattctggcggagaaccaggccatgcatgcgcaaatgcactctctgcgagatcagctgaactcggagcatgagaagcttaaggaaacccaacagaccaccgaatgtcgcctccgttctggcgaggctcagaaatgtgagctaactgagcgcttggagaagtgccatgccgagatccatactcttcgaaaggatcacatgggtctatcggagttcctgcagcgactggccctcgcgatgaactggggtgagtgctctgcccctccggctcttggaactgataccaatctaatggcggagaacttgcttgagagagccgagagactcgccgctcactgcgaccacgaggcacctcatcatcatcatcatcatcacagtccggataagggttgctgtgatcacggacatggtcatgggaaacttcgccgcgagagatcctgtcatgacattcccctcaaggaaagcagcagtgtctacaacctgcagcgacgtgttcgagttctcagggagcaagtgcagcgacgggatctccacctggagctactgcgtcgcaagctggccatcatagaggacggtgcgcgaggaaagtgcatgttgcagggtgaacgggatgaggcggtttgccgggccaagaaggcggccaagcaggtggacaagttgagtgcccagctggccgatgcccgatctcagatagcagaggtcaaggcccagctagccgaggctgtggagtataagatcacctcgttggagagggccagaaagatcgatgagctgaccacacagatatgcgatctggaggatgagaagacgcgcctgctctcccaacttaatgccctgaaggagcgcctcaagtcctcctgtgaatccaatcagaatcgcagatgccgcgatgaggcgctaataaattctatgcgcgatgatgtcagtcgcttgagctcccaactctcggatgccaatcagcggctttcgcatttgcaatccttccgcacatcggtggccaggacactgcatcttcgcgacctgccggaaacggatcttctgcatcgcctgcaggccctgtgctcggcacatcaggagttcacaatgctttcgaaacgctatgagacagcttcgccagttggagatcatccgtgtcctcggttcgatgatcccataccgccatccagccactgtcgcccgccaagggagctcagtcctccgccaacttccttccaccataaggcgaccatccattcaggcagcagccatcactcaccaccgtctgagcatcatcatggttccagcagccatgtgcacaatcaccacggacatggacacggacacggtcactcatcgcattccaggcggcagcgaagtaaaagccgggacaaacgactccacgatgagtgcttcgacacggatgtgcatcgactgcaccatggctgcaaggaggagctactggccaccggatcggaggatgactatgacttcaagagcaaatactgctag

SEQ ID NO: 37464 - protein, 2091 aa, DROSOPHILA
MPHKKTKHLKAVVPGMVSLEGEQFDSWEIPFPLPEQEDPSMCRDEFLKDLIREHESRVASLVVRSTVRDVSIVKRPVELQDTDVKEAEAMVVLQMAQKRQRTSVRRTMEEVIASIRLRSTIIADLIRQVQKAAIEFLSVRLLRQLRLFSMPWPGDLEETPNNLFSWSLDDFLLRLDVKQIYLDVLNRERSVKDLDCVKFCKDLSEIEHLIHEIRRDFRDDVDLCENSLHLLKNAQYHMNAPWVKSLNDNIENLASSASVALLNEQSGSLTSLRRNSSAMIVFERKSALNPIETRYQINWFKSCTDQRLTRMNERNVEIKRELQDLEVQAVQDEKVQYSSGLMYELEVGKLRESIRNWQDRLDTDLEHADVMCTVSRLALQKLKDDLKFYMEQKDMYLQRIKEVQALIDQERMIREERQLDPSQCRDEFIGTFIREHELRASSLRPRSTFRAASEFRSSQDLSDQGPEKGAEAMVVRQLVSQRKRLSLRKTKEEILENIKLRSTMMNDLNLKCQKAAIEFLSVRLLKQLRLFSSPWPGDTGDIPYNLFSWSMDDFLMRLAIKQVYLDVIHRERSAEDLDCLKFCKDLGQIELLIYEIREDYRNDRDLCQGSMELLRSAQYNINAPWVSTLKDNLESIRSSTLTARLFAQSSAFNIVLRHSSAMGAFEDESAQDPIEMRYQINWIRSCTDQRLYRINGREEKMRKELNDLEVQALQDEKVRNSSELIYSLEVGKLRESVRVWQERLDTDLENAEVTCTVSKLALQKVKDDIKFYKEQKDMYLQRIEEVQAIIAQEQGFPLPDQLDPSQCRDKFLSTIIEDHERRVSSMLAALSLRSKSVVDYAVETVDRVVENGAEAMVVRQMARMRKRESGRKTVQEAIESIKLRSSMMTELNIKCQKAAIEFLSVRLLKQLRLFSSPWPGKIDEIPYNLFKWSLDHFLARLEHNQLYLDVIHRERSSEDLDCVKFRTDLKEIEQILHEMREDFQKDDDLCENSIQLIRDCKYNTVGAWIKDLKDNCRIKEGMSNSSLAVESSVSSLDINRTALVDLFEGSSLTDPIQMRYHIKWVNSCMDQRLMLNCKREDLLRKELMELKTKLEQDMTVQRSSEMIYSWEVEKLKTRNREWEVKLERDLESAEVQCTIARLALQKVKDDHKLCLEQEEMYLRKIAEIKNRRRIEFIRIKSIGMPLNPRPTTNGNTPEDWQVFEVLFGADQDPKTIPARMTTMSPLPQPAIPFCQPRSTQNPKPCGVRTCVRESVVDIAFDTSPLGAIENHLHHHHLGHTGGLSPHHHHLLDTSCSNTGITVTEHHHGLDLTTTLRSELAALSYKKERLTGELAEARAALCSKDADIENLRAQAARQTALIGSLQSRLQNSESREQAVQARCDSTIQTVQREKRSSDERNKELICKIQHLETHMASEESQKEQIKAQLHDLLRRLSITLGMDVCDGNQNSHATPECIISRAEEVMVELQRTKAKVSSTCDTLSSCENELLNLKSLANIEKQRLTAQLDGAGNHNHELEGRCRQYERDLQIQRDRLTESEINGEKLKEELRGFESRCHRLQNNLDRTQGDRLQFLRGLSNLLNVPEPCETLIKDKLREILAENQAMHAQMHSLRDQLNSEHEKLKETQQTTECRLRSGEAQKCELTERLEKCHAEIHTLRKDHMGLSEFLQRLALAMNWGECSAPPALGTDTNLMAENLLERAERLAAHCDHEAPHHHHHHHSPDKGCCDHGHGHGKLRRERSCHDIPLKESSSVYNLQRRVRVLREQVQRRDLHLELLRRKLAIIEDGARGKCMLQGERDEAVCRAKKAAKQVDKLSAQLADARSQIAEVKAQLAEAVEYKITSLERARKIDELTTQICDLEDEKTRLLSQLNALKERLKSSCESNQNRRCRDEALINSMRDDVSRLSSQLSDANQRLSHLQSFRTSVARTLHLRDLPETDLLHRLQALCSAHQEFTMLSKRYETASPVGDHPCPRFDDPIPPSSHCRPPRELSPPPTSFHHKATIHSGSSHHSPPSEHHHGSSSHVHNHHGHGHGHGHSSHSRRQRSKSRDKRLHDECFDTDVHRLHHGCKEELLATGSEDDYDFKSKYC

SEQ ID NO: 37465 - DNA, 2366 bp, DROSOPHILA
gtcgacgcagtcgcgcttcagcagcggcaatagcaagagccaaaagcataatcaagcgcaacaaaaccacaaccagggcccagactgcgacttggctaaaaggaaaaccgaaccaaagccggcgacacaatgaaaaacgagagtaaaatctccaaagcaagccgctcactgaaatggaaaattaaacctcgttacatcagtccaagcagcagcaacatcgcaacatcgcagcatcgcagcatcaacaacaactgcacacagcaacttgcaactggcagtggccacaacaacaaatattcgctgccaggatagcggctaacacacactcgtgcacactctctaacgaggcaatggcaacctgataccaaaagcgtcacaacaaacaacacatccaacgacaaacaaacaaacaaacaaacaaacaaacaagcaagtaaacaaacagagaagcataaagacagagacacgcacgaccaataaagccaatgcaaaaaatgcctcacatagaaaagattaatacgcgagatcattcacaagatcatcgtaggcatttattggttgagtggatattttaccaatccgaagaatatcaaaaaaatgcagatatgcaagcggcagcatcaacaagttaagataagcctgcgatttaataagtcactgatatcttaatggattgcattagtacgttaacactcaatgtgcaaatacaagttttccttttatataaagtcttttgcatttcatttatatttattgagccatcattaaagtgatgacaaggtataataagctttaagcacccttgtgtatgttcgtttatgcttaatgcaaactgaatagttgaaacttctaaaatgtattcccccaggttaactgggccaaatttgatgattcttgcacctgctggtcgtaaaatccccagcaagatctgctctctaacccgggcatacgtaagtaatggcctgtcaggaacaggggtcctcaaaccgaaagccccaagatgcccaagttgctgtggcgaactgtgcaactcatcaacgagagcaacttctgcagcagcaatagcagccgcagatgttgcattagctgccatggatgcgtttttggggagtcagccgatgatgacgatggcgataatgatgatgacgctgtgactgaagctggagctggagctgggactctagtgccatctgaaccactttttccccgctggacacaacaagtgcagcagcggcagcagcagcagcagcagcagcagcagcagcagcagcagcgacagttgcaacagagagcaaacacatctccaaatcacgttgtgctgtggtcgccgccgtccatcgtcgtcgttacatatctggttgtctagattggctgcaactcgtcgtcaggtgaaataaaaagtgagagtgacatcggaaattgtttcaattttccaaacgaaaccaacaaactagcagctagctaaaagttgccgcaattgcaattgccatcgtcatcggataggcaacttgagcagccagccagccggtcggttggtcggtcgttggtctgccaaatgaatgaatgtcgaaaagtgtatcgaaaagcatttttctacgtatgccagccagcagccagcaagtgctttcccaatgctccaaaaaaaaaaaatcgagggataaatgaagaggaaaactaaaataaaaaaaaaaaccaaaattaaaacacagaccagttggctgcctcgccgctggctgactgcatcctgttgtttgttatagtttgcgatgttttatttcttactttatctttatataactagcacacatgcagacgaccaaccagttaactcagctctggctaaatgctcagcctaaataattgagattttcttccccccccccccgccgccttttttcccccatttgctctctttttttttgtttttttagatgcaaaatcagtttagtttagccagtcttgggcaattttatgtccctctaagcttggagcctctctttcgcaccggatcatttgtaaatgacggacaaacggacaactggacgtacggacgtacggacatacggacatacggaccgaactggagcccataaatttgtgtttagcgggtcttcggattttacttttattgccagcgagctgggcaaatgtttggaatgcatgaaatacagctcaattgaatttcggaggtgccagtttagagcccagagataatcaatggccgcacttggtaattatcggtggacgggattgatttatagcgatttgcctggtttaaatatttgccagagccaaagtctcagatattcggctgattcgtatgcgataaagcttatattcaatgttccaactcatgcgaggtgata

SEQ ID NO: 37466 - DNA, 366 bp, DROSOPHILA
atgcccaagttgctgtggcgaactgtgcaactcatcaacgagagcaacttctgcagcagcaatagcagccgcagatgttgcattagctgccatggatgcgtttttggggagtcagccgatgatgacgatggcgataatgatgatgacgctgtgactgaagctggagctggagctgggactctagtgccatctgaaccactttttccccgctggacacaacaagtgcagcagcggcagcagcagcagcagcagcagcagcagcagcagcagcagcgacagttgcaacagagagcaaacacatctccaaatcacgttgtgctgtggtcgccgccgtccatcgtcgtcgttacatatctggttgtctag

SEQ ID NO: 37467 - protein, 121 aa, DROSOPHILA
MPKLLWRTVQLINESNFCSSNSSRRCCISCHGCVFGESADDDDGDNDDDAVTEAGAGAGTLVPSEPLFPRWTQQVQQRQQQQQQQQQQQQQRQLQQRANTSPNHVVLWSPPSIVVVTYLVV

SEQ ID NO: 37468 - DNA, 2351 bp, DROSOPHILA
atagtgttgaacaatggccagcacgagtcgcatccacactgcgagaaatcactgcgactaaagagaatcgggaattgtgctggcatagtcttagctatatattgtccattaacaattgacgaaatattttaagttaaagaagtcggaatattttgcgaacaaggctttagttgcctcggtttcctcttccggttccggtttttgattcttgaacctcagaaagcagtcctcgtatatatctcccagaaacttggcgcccttaggaactctatccttaatattaaatttctctttgttcggattgaagcataactcgtaggctgaaaaagtgactcgttggttaaagggttctggaatgcaaaacctcagaaggtagggctttatccggtttaaatctttccgcttgccatccatcactccaaatgcttgtttgcccccgtgggtgaatactatgtatccggttatatggtttttgtggcaatattgaagaattcgacgcggaaattggttccttgacattatgttgtacaacttaaactcggtcctaagttgaatatcctcattgaacatccaatcgtaggaccctaataatgtcatttcttgtttagttttgctgaaagatatgcaaataacttagggctataattttggattgtactgagtgttaagctaaatttactggcgtgtaggtttgtttttaaactaaattgattaaactgatgacttacgcaaagcataattattaattgacattttgttttaaaatacgtttcctgatagtttataaaaatactttttacgaaaatctatataaatataaaagtatagcatttttaaagattcagaatttgttttaaatgcttacctttggatggatcagtgatgtttactccacgcaaatttttcgattatatatcatcagcagagtaacttaggaaatctggatcatttattttcaaaagccgtgaaaactcacatactcaaatttccattcccaaaaatgtcgctggaactggtactccaaccgcagccagagatctacctattagcgtatgaaatgagtgtgcccgaagattccgatgaggccctgctttcagttgtggcccacaaagccgcagaacttaaggtgtgtggctacatcgcgcatacgcactgtggccgcaaagtgggcggcgaactggagggcagctctgctggcctgcagatgatggtcgagtggatgcaggctaggagccaggggaatcatctcggggacggggagaagatcaaaagccagatgaaggagccacgattctcgaagtggaagctgcaatcaggggcccccaaatacgatgttttcttctgttgctgagtgctgacgagaggagttgattaaaaatcgcaaattgcattggccccagaatattgtttcgagtgcattttcatctcataaaccataacaatcagtgtcggccgctgctgctgctgctgctgctgctgttgctgatgttgccgctgctgcagttgggccattgaacaatagcccggctgactcgaagctgacttttcaaagtcaaaaacgcgattgtatcatcagtatttttcggggcgcgctccctgcctctgcctttgcctctgcccctgatttttcgttttttttttgtctaaccattttcagatttttccgctcggcgctggcagataaagtagaggagcccgagttgcggcgaaaaacaatcgaatcaattcatttttctagggcgtactgtgccacttgaacgttgaactgcagacgccccaatgctgactaccgctgaggtttcgcttttgggctttccatctcctccggagttgccattgtctgctatcaagacggcagcacggtcttgatcgtgccccggcactagtcattttaatttttcaagattttccgagctcggcgctgcgcgctgtgctgtgcttctgcgcatttcgcaatctgaactctataaatctctcgtgccggtgtgttagatttatgggttatgggccaaatgggagcgggccaagccaaatgttctacggacggcacagaaatcggcgatccgggcgattcaattagatctaaacgctgtcaacatcccggcactaataagcagcaacatttcgggcgaggggtggccacagcccgaaaaaagtgtaaataaaaccaagagtgtcgtctggcctgtgtctgtggcataatgttgcataatattttatgcatgcagagctggcagattgcaacatgttgccatgttgcagctccaacttcgacgccggccccggccgatgatgatgatgatgatgcatagccccaagaatcgctgagacagccaagcgcgctgtggcgc

SEQ ID NO: 37469 - DNA, 351 bp, DROSOPHILA
atgtcgctggaactggtactccaaccgcagccagagatctacctattagcgtatgaaatgagtgtgcccgaagattccgatgaggccctgctttcagttgtggcccacaaagccgcagaacttaaggtgtgtggctacatcgcgcatacgcactgtggccgcaaagtgggcggcgaactggagggcagctctgctggcctgcagatgatggtcgagtggatgcaggctaggagccaggggaatcatctcggggacggggagaagatcaaaagccagatgaaggagccacgattctcgaagtggaagctgcaatcaggggcccccaaatacgatgttttcttctgttgctga

SEQ ID NO: 37470 - protein, 116 aa, DROSOPHILA
MSLELVLQPQPEIYLLAYEMSVPEDSDEALLSVVAHKAAELKVCGYIAHTHCGRKVGGELEGSSAGLQMMVEWMQARSQGNHLGDGEKIKSQMKEPRFSKWKLQSGAPKYDVFFCC

SEQ ID NO: 37471 - DNA, 2919 bp, DROSOPHILA
ttcgatctgaattatgctcatatccagacaatagatattgtatggaatctcaaatctaaaaatgttttatttttaatctcttagattgcctgataatatagaaataccttgtacaaaaaatcctaaggattcccccgttagtgaaaataattatgcatcatttgaattcttcagaaactagttatacttgcaagtattattttgtagattccggataatatttaaatgtaaatatcccacaaaaacagtttcataggtttaatgacatccaggaccccccaagcttctacgctcttctcctagcggtaattccaaaaagaaacccgttagaagaattctaaagcagcaaatcggatattgtactttgaacgtctaattcgccgttttaaatgtcaaaatctgcatttgacttgaataatatatagccagatatgtctgccaaatattttgttcagactgcattatgcaaatgcgccagacacacagttcaataattaaaaaacgtgcccagacactggacaaagaaaataaaaaaggttgtatttttttaagagtgccggagctcaaaaatgcgttttcaaaaatctatataaagacaggagtgctgaataccttaacactatacgagatatcgtcaagtcaagaagaatgctcaacagatccttgggaaaccacctgaaacattatggatccagaaaattccccttactaatttgtttacttatacctttgtttggtgtttgggtttgtttattctattagagatgtttactgtcaaatggaggcccgcgtggcaaacttgatttccattgacgtaccactcgttggcgtaaacaagaaatttggcacaagtctactgtctgctcctccgattttgcatcagagcccccaaaaactagtttatctcgatcacgctccccactcgtgatgatatcactaagtccgcaacgctttctgatataaaagcccctctatcggttcgaaagccaacacactaaagttcgaaggcctagcagtcgatacctaatcagtgattttcaaaaatattttccccaaagtgcataaacaaatgtgtcaatgaagacaccggacaccaaagccaagttgctgaataatataaggtgagaatgcagacgagaagcaaattcaacgtgttaaagttttaaagacaacaaatatcacttacaaaatgtgaagtgcattcgttttagtagagcttaacgtgttccctcgttccattgccataaactaatgtgccccattctttgcttgcagtctatctaaacacctgtcttccaagaaaggcggctctcgcactagtaactgcggcaattgtctggaattctccgtactcacgcgtctctccagcgtgccctgaatccccctgtggtccaagctcacccaagctcctgttgaaacttgaaagaaatcattgacaatggttcaccaaactcgcacacccagcaaggccattcccgccaagcacctgagtcccatgcggaccgtggagggtctgggcggaaagtacgccgtttcgagcagtccggcggatagtttcctgcggaacaccaggctcacggctcagagcagctcccagcagtcggccgccttcaaatacaatcagatggtcacccacaatcgggagcagttcaataacctgcacttctgctaggagacggatagggatgtggatgcacgtcgtcgctggagagaccgcattggaggagggatataccactactcgtacgatgacgattgcttgtcaccatacttaaatgcaataaattcaatttgaacaaatttccacatattaattaagtttcataaatcgcagtagtcacgtgctggggccggggaaatttatttattgcaacttttttattttgccaaattaaattaccccaactaagcctgcgagcattcgtcgcagtcatttttcattgtttgcggccgtctgcctcactttgtcatatgcaaatgtggctgtgcgatttttgcacatttgatattcggtttttttccacacaggtgccatatttttacattagcgtcgaatcaaaagctttaacattcgctgcccgggatttgcataaatcttcattggcttttggtttccttaggtcccacatgtgtgctccatgatggaaaagatatgtggaaaagccttcttaagaaagttgataagtttgccaactagcgaaagttgttcactatgatctcttcaagaaatttgcctcccgaatctgtatagttttagttttcttaggccctaccatagagcttatggtagaaattataggtggaaaacccttccaagaaaagttgcttagttagcaatatagaagaaaataagtttgtatggtctctttaagaaacctgaatacttagttatacttagttttggtgatgtttagttttatatatactttatatcccaacctagatatttataatgctatgcctatgttaaagtggaacttaactgactcaggcatataactgacatatttctacgtttgcccatgtgtttataatcttcctattcatattttagcaaagccaaaagcaagtttaccaaccctagaataaaacttccccgaaatgtttaatatactttatttagatcaaaactcaaagtgaattaattagtgtagaaaggagctccatctcttgggcaaataaaatatcaccacctgtacctgcaactatgggaaaaaagacgaaaaccactcgggggtcaagaccagtaatttatgcaaataactggactggcatgttaatttcaacgtgaacaacgaacttgtttcagatcggatatacacaacatatgctggcgaatcagctgactagttaggctggaaaatagttatccaaccaaagatgactagttagttgccaggcaaaaaagccacaaatgta

SEQ ID NO: 37472 - DNA, 765 bp, DROSOPHILA
ttcgaaggcctagcagtcgatacctaatcagtgattttcaaaaatattttccccaaagtgcataaacaaatgtgtcaatgaagacaccggacaccaaagccaagttgctgaataatataagtctatctaaacacctgtcttccaagaaaggcggctctcgcactagtaactgcggcaattgtctggaattctccgtactcacgcgtctctccagcgtgccctgaatccccctgtggtccaagctcacccaagctcctgttgaaacttgaaagaaatcattgacaatggttcaccaaactcgcacacccagcaaggccattcccgccaagcacctgagtcccatgcggaccgtggagggtctgggcggaaagtacgccgtttcgagcagtccggcggatagtttcctgcggaacaccaggctcacggctcagagcagctcccagcagtcggccgccttcaaatacaatcagatggtcacccacaatcgggagcagttcaataacctgcacttctgctaggagacggatagggatgtggatgcacgtcgtcgctggagagaccgcattggaggagggatataccactactcgtacgatgacgattgcttgtcaccatacttaaatgcaataaattcaatttgaacaaatttccacatattaattaagtttcataaatcgcagtagtcacgtgctggggccggggaaatttatttattgcaacttttttattttgccaaattaaattaccccaactaagcctgcgagc

SEQ ID NO: 37473 - protein, 77 aa, DROSOPHILA
MVHQTRTPSKAIPAKHLSPMRTVEGLGGKYAVSSSPADSFLRNTRLTAQSSSQQSAAFKYNQMVTHNREQFNNLHFC

SEQ ID NO: 37474 - DNA, 5205 bp, DROSOPHILA
catagtgccgaaagtgaacgagtgacgaagttcggagtaaacaaggcatgtgtcgaatctccgaattgttgaacttaaaggttgtccgcaatgtaaattaaagttgctacaaattttaaccagccacattttgtttggaagtttaaagcacagtccataggaacgcacatatataaattctgctatcttaccattattctacgattaattaggagcaaagttgcagtctaaataaaatccctaagtgtatgctaagaaaatgttattaatcggggatatcatgtgcgtagaggaaatgtaaggaatatgtagaaaacaattttacaattcttaccttgaacttctttttgtcaaggtatctttttttaaaagatgttaaaatataagataaaagatatatattaggtgctataaaaaggctacctttagcgaataaaaaatagtttctttttaaattacaaagctacacattaaaatgttcatttatttttttataatttcctacaaatatttaaaatattgtttatattttaatcatggattaacctgggcgtgatgatgaagaaccggtatataactgtatcaattgaaaactcgttaagctaaacattactcatcccatagcacgtaataaatctgttgagctcgttgcattgttctttctatccattaaaatttaacactgcaaataaaatccccttccagtctctgcacttgcattttcgattatataatctgcatattcactaggccctccaaaggtatattaccctgccccctctcataggccaccttgatttggcaatctaatggcccaccgcaaattgctcatgactggcgaggagtatgtgttggattgtttggattaagcgtatatatcggaaaactctgtctcgtctagaagtaggaaaatgcaacagggcagtttgcaactcacggtaactgcagttagccaagttggatctgagttgctgttgccttggctttcagttgatcgcggatcgttgctgtgtcaagttgcaatttgaatttttataggaaatcgtaagctggcatcggatatagctggtactttactcttgaaatatacaatttcggcaattttaaagccaataactagacagaaaataacttaataaaatcgtttatcaagctaagtcaagtatagctcaaaacgtaaataaaaatgggtcaaaaaaaatgcataaaggttaaatctatttcggtttaaaataatcatagttcaagaacgtactcaagagtgtactcaaaaattgctatattaggcttgcaggctaaacctatagttaagtaattggacggacacctcttaatggtcgcaactttgtatgaaactcttgggaaacctgtcgctaaaagttctttccaaaagacaattgccagtcaaattccggtcacgatcttagcatattcacagtttaaacgttcaagttgcaagtgcaacgaagtgcagagctgcagaaacaaagtatctgaaacaccaagtgcaacaacaaccttttgtctcccctgtgttaactttgatctttggtgcagaactctgatggtgctctgttgcatctagccaagagttttcgtagaataactatgggataaagttcggcaagtaactcgaattatttgtcattaaataacttatatagatagtagtaacacatgcaatactataaagtgaaaagccccattttaaattcaagcaagatgagaatgtaatcaaaatagtagtgattgtcctacaataccctatttcaccaatattacaagaaaaaacaaaatctgtgttcaagcaaataaaacgattattaacacttaaaagtgttaattatgcaatctcgattaaaataaataatttttattttccgttctttttatgtgaataaagtgatcagcaatgaagttgctacctctggctttattagcctttttattaagaccgaaacccaatgacgcggcgcacattttgggcttgtttcaacatcccggaaagagccactttgacttcttccgtcccatgttcttggccttggcggagaggggtcacaacattagcatgtatagctattttccactggagaaaccagtggccaactacacggattacgtctttcaaggaatgcccttgctcaccgatattgtggacttaagtgtgggtgaagttcaagttcaactatatttcgtaattatgtattcacttatgaattttagaactttgaatccgaatggaagcccctgggactgccgttcaaggtgcccacctactttatgcttcacgattggggtctgcgatcctgtaaggtggccctgaactcacccctcatcacccaactgctcaagtcccccattcgatatgacgtcatactcctggaacacttctccaacgattgcatggcagcggtggcccacctattgaatgcacctgtaatcgcattgagtagctgtgcgataatgccgtggcactacaaacgcatgggaagtccgttcattaaccccattatgcccatgaatttcctgccctacactgatgagatgagtctgatcgatcgactgaataatttctttcatttccacaccgttaatactctgtacaagtgggtgtcacttgcctcgatcctcaagtgcacagttatctgaatcgaattttccttgaacagcatgattacccaaccagccaccgatgccctgatcgctgagagatttggacccggtctgccgcccatcaatgagatcgtgaagaatacgagtctgatgctgatcaatcagcattacgccctaaccggaccacgcccctatgctccgaatgtgattgaagtgggtgggctgcaagtggggccgataaaaccacttccacaagtaagttgaatcacttactgcggtttaagaggccaaatgaaatgtttaagatcagtatagataattcacatgagcttatagctaaaagaaaataaattatctatggaactgtcttatttgaccagataaccggttatctttgttaatcacataaatgttttttctgtaggtcaccgaactccttatcaactaattacattatatttaaatcgtaccgcatacttcaaacaaataaaataaaagataaaatggggattgtagacatgagcatttaataattatttcgatcccttaacaggcgattcatttgattatttatgctattttgtaatccgcgattagccactgttaatccaatatgaaaaatgtgacaaaacagtcgaactgaaaaaaatacagtcgcattttaatgagattaccaaatattacacaatatttttttgtaggacaacatttaatatgtacatatatataaacccagatgttaaacaaatactttttgtttcagcacctgctagatcttctggatcgatctcccaatggagtaatctatatcagctggggctccatggtaaacagcaatacacttccttcgggcaagcgaagtgcgcttttccaaagcatttcccaacttaaggaatacaactttgtaatgcgctggaaaagtttagaatctctggaagataaacagccctcgaacctctacactttcgactggctgccacaaagagatcttttgtgtcacccaaagatcagggcttttatctcccatggcggacttttgggcaccacggaggcgattcactgtggagttcccatgctggtgacacctttctacggagatcagtttctcaactcaggcgcagtgaaacaaagaggtttcggagttatcgttgacttcagagacttcgattcgaatcacataaccagaggacttcgtattatacttgataaaaagtaatgggtttctaaagaagcaatctattcagatttccttgataactgtttactattaacattttttgattgtattattttacagattcgcggaaagagttagacgatccagcgaagcatttcgccagcgtcccattccccctatcaaattggccacctggtggattgagcatgtcataaagtatgggggagctccacatatccaaagtgaagccagacacataaactggatcgtctacaattccatcgatgttctcctgttctggctgggaatcttatttctactgattgtcgccctgcggaagctcataaagatattcaaaacagctttttgtcgggggaaaatctctagagatactaagacaaagacgcaataaatgtttatttggttcaatgaacttgagatttagtcagagaaattaatgaatgtcaggaaaatgggtcgcatgtcaaaaagcgtattccgaacaaaattatattgtataaatatgttactgagacaacgattttgcttaatttattcgtaattaaaaacatatataattaatgttacatagctcagctttttgtgaatggaaaggtcagcaaaccaaaactgataatgaaaacggctttcactttcaaatttatacaatattatcagctctattattaacagtgtcgttttgtttgtagcaattacatttttgtaaccgaattagtattttttcgaaatattaaaagagcttgctaacatggaaaattttaaagattcctaagaaatgtctattcttgtctattgttcatatatgtatggtatgtacatatgtacaatatgtaccttccgtaaaccgaaaacaagcccgtacgatgaattgtaaacaagcggagccttggggcaaaacacgcatacatcggctgataataaatcggcagacttgtgcttgtcttgatagactttctctacatccggtagttgagtctcgtgtgcactagggcatctacactctccccaattttcattgttttaaaattcttacgagaaagcccgataaaaactcagcaagtttaggcgttgtttataaaccaaaaagaatgcaaaaacttgttttcactttcatttgaaatataaatgacggctgttactattaataaattaaacaaatttgattaaaaacccaatcaacttatatagttttgaaatttttgcaaaagtgcttttttatatacaaaactggaatcctagggttttataaaatattaattttattttagaagccatgataacagtttggctacaatatagccagattgccaataccgccgaagactgcgattgatttccgatcgctgactgagcattttcggctgcggactcgagcgttgaccgaaaagctt

SEQ ID NO: 37475 - DNA, 1648 bp, DROSOPHILA
atcgttgctgtgtcaagttgcaatttgaatttttataggaaatcgtaagctggcatcggatatagctgcaatgaagttgctacctctggctttattagcctttttattaagaccgaaacccaatgacgcggcgcacattttgggcttgtttcaacatcccggaaagagccactttgacttcttccgtcccatgttcttggccttggcggagaggggtcacaacattagcatgtatagctattttccactggagaaaccagtggccaactacacggattacgtctttcaaggaatgcccttgctcaccgatattgtggacttaagtaactttgaatccgaatggaagcccctgggactgccgttcaaggtgcccacctactttatgcttcacgattggggtctgcgatcctgtaaggtggccctgaactcacccctcatcacccaactgctcaagtcccccattcgatatgacgtcatactcctggaacacttctccaacgattgcatggcagcggtggcccacctattgaatgcacctgtaatcgcattgagtagctgtgcgataatgccgtggcactacaaacgcatgggaagtccgttcattaaccccattatgcccatgaatttcctgccctacactgatgagatgagtctgatcgatcgactgaataatttctttcatttccacaccgttaatactctgtacaacatgattacccaaccagccaccgatgccctgatcgctgagagatttggacccggtctgccgcccatcaatgagatcgtgaagaatacgagtctgatgctgatcaatcagcattacgccctaaccggaccacgcccctatgctccgaatgtgattgaagtgggtgggctgcaagtggggccgataaaaccacttccacaacacctgctagatcttctggatcgatctcccaatggagtaatctatatcagctggggctccatggtaaacagcaatacacttccttcgggcaagcgaagtgcgcttttccaaagcatttcccaacttaaggaatacaactttgtaatgcgctggaaaagtttagaatctctggaagataaacagccctcgaacctctacactttcgactggctgccacaaagagatcttttgtgtcacccaaagatcagggcttttatctcccatggcggacttttgggcaccacggaggcgattcactgtggagttcccatgctggtgacacctttctacggagatcagtttctcaactcaggcgcagtgaaacaaagaggtttcggagttatcgttgacttcagagacttcgattcgaatcacataaccagaggacttcgtattatacttgataaaaaattcgcggaaagagttagacgatccagcgaagcatttcgccagcgtcccattccccctatcaaattggccacctggtggattgagcatgtcataaagtatgggggagctccacatatccaaagtgaagccagacacataaactggatcgtctacaattccatcgatgttctcctgttctggctgggaatcttatttctactgattgtcgccctgcggaagctcataaagatattcaaaacagctttttgtcgggggaaaatctctagagatactaagacaaagacgcaataa

SEQ ID NO: 37476 - protein, 525 aa, DROSOPHILA
MKLLPLALLAFLLRPKPNDAAHILGLFQHPGKSHFDFFRPMFLALAERGHNISMYSYFPLEKPVANYTDYVFQGMPLLTDIVDLSNFESEWKPLGLPFKVPTYFMLHDWGLRSCKVALNSPLITQLLKSPIRYDVILLEHFSNDCMAAVAHLLNAPVIALSSCAIMPWHYKRMGSPFINPIMPMNFLPYTDEMSLIDRLNNFFHFHTVNTLYNMITQPATDALIAERFGPGLPPINEIVKNTSLMLINQHYALTGPRPYAPNVIEVGGLQVGPIKPLPQHLLDLLDRSPNGVIYISWGSMVNSNTLPSGKRSALFQSISQLKEYNFVMRWKSLESLEDKQPSNLYTFDWLPQRDLLCHPKIRAFISHGGLLGTTEAIHCGVPMLVTPFYGDQFLNSGAVKQRGFGVIVDFRDFDSNHITRGLRIILDKKFAERVRRSSEAFRQRPIPPIKLATWWIEHVIKYGGAPHIQSEARHINWIVYNSIDVLLFWLGILFLLIVALRKLIKIFKTAFCRGKISRDTKTKTQ

SEQ ID NO: 37477 - DNA, 4966 bp, DROSOPHILA
agagaaattaatgaatgtcaggaaaatgggtcgcatgtcaaaaagcgtattccgaacaaaattatattgtataaatatgttactgagacaacgattttgcttaatttattcgtaattaaaaacatatataattaatgttacatagctcagctttttgtgaatggaaaggtcagcaaaccaaaactgataatgaaaacggctttcactttcaaatttatacaatattatcagctctattattaacagtgtcgttttgtttgtagcaattacatttttgtaaccgaattagtattttttcgaaatattaaaagagcttgctaacatggaaaattttaaagattcctaagaaatgtctattcttgtctattgttcatatatgtatggtatgtacatatgtacaatatgtaccttccgtaaaccgaaaacaagcccgtacgatgaattgtaaacaagcggagccttggggcaaaacacgcatacatcggctgataataaatcggcagacttgtgcttgtcttgatagactttctctacatccggtagttgagtctcgtgtgcactagggcatctacactctccccaattttcattgttttaaaattcttacgagaaagcccgataaaaactcagcaagtttaggcgttgtttataaaccaaaaagaatgcaaaaacttgttttcactttcatttgaaatataaatgacggctgttactattaataaattaaacaaatttgattaaaaacccaatcaacttatatagttttgaaatttttgcaaaagtgcttttttatatacaaaactggaatcctagggttttataaaatattaattttattttagaagccatgataacagtttggctacaatatagccagattgccaataccgccgaagactgcgattgatttccgatcgctgactgagcattttcggctgcggactcgagcgttgaccgaaaagcttttcattcggatgtagtctccgaatttagtcagtcgcttgtcggcagtcttacaagtaagtaagagtggaaggtgagccagaacaggatttatgttcgaaagcgacgactccgcgttttttggataatattgtgtgtgtatccagttcagcggttcaattgaattccggatgaaagaccctcaccaggcgataattgtgaatatattagcgggtgcagtgccgtttgtgatgcaattgcagttgcttttgttgtgcttgtgttttcctttgctgctttcgtccgcattctttacataatttccctgcatttctcgcatccgcgacatgcgcattgccgcccaccgccccgctcaaggtcgctcgaaaatactgaaaagccaagaacccaagagtcaacaagtgtttaagtttctgcacaaggtgcaacgctaaggataatctgttcttatgcaaataccatttctaaattcaatttccgaattttggataccaatacatttcttaaaaagctatatattaaaaaaatcagcattgaccttaatgtgtaaaatgtacatccgtcatatttctgtctcattttcttgtacaattttaagccctttttaagttgttctatagttataattacacatgtcacgaatagctaaatttgtataccaagtgatcttaattgagtatttgacgagaagtttcaattaattattcgtgattaatttaaaataaaatgttgaatttatttcacttgccgtagggtacaatgtggtcgccgcgggttgccctacttttcctggccctagcacttagccaaccggacgagttggtggaggccgctggtccgctgaaggtgctgggtctttttccccatcccggagttagccacttccacttcttccaccccatcatgaagggtctggccgaggcgggtcatgacgtgagcgtggtttcccacttcccggacaagcatccggttgcccactacaaggatttccccctcaccggaatggacaagctcacgaacagtgttgatctcaaggtgagtgaaaaggggaatcccatgtacacacatatctacgtgtcgtaaacctatctattgtttcgtttatttattgtaacctaaatgattgtattcattgaaaaaatgtactcagaatagtcataaatctgagaaatacttagctatatattcagagtaacttgacttactatgatttactaggcattgttttaaacattctattcttcttttagtttttcgagaagcgcacattctacagtcacttccaggagttcttcctgctgtacgactggggcaaacagacatgcaacctgacgctccgttcggaagcactgcagcagatcctcaggcgtccgggacgctttgatgtgatcatcatggagcaattcaacactgactgcatgatgggagtggcccaccagctccaggcgccggtgatcgccttgagcagctgtgtgatgatgccctggcactacgagcgaatgggagctcctttgataccctctcacatcccggcgctcttcatggcccagtcgcagcacatgaactttgggggacgactggccaattggttcagcacccacgccttaaattggatgtacaagtgggtctcacaatttctttaagaactccataacatctccaattatattaatgttttcggtcgcagattactatcggttcccgctgccgacgccatggttcagtacaaattcggccatgacgtgccttcggtgggcgagctggtgaagaacacatccatgttctttgtgaaccagcactactcgctgtctggacccaaggtaacgccgcccaatgtcatcgagctgggtggcatccacatccagaaatcgaagcctctgcctgccgatctgcagcgcattctggacaatgctgaggaaggagtgatcctgattagttggggatcaatgatccgggcgaattccctgtcggcggcgaaaagggatggcattattcgggcggtggctcgattaaagcagaaggttatctggaaatgggaaaacgaaacactgcctaaccagccacccaacatgcacattatgaagtggttgccacaacgcgatatcctctgccatcccaacgtcaaggtgttcatgtcccacggcggactcatgggcacctcggaggcagcttactgtggagtcccagtggttgcgacgcccatgtatggcgatcagtttgtcaatacggccgctttggtcgagcgaggcatgggaactatcctgaatttcgaggatataggcgaaaacacggtgatgagggcactaaagaaggctttggacaaaaagtgagagtaccatgtcatgcactgttttagccgaaactaaatgtacttgatttgcaggttccacgatgctgccaaagtagtctcccactcgttccaccaccgcccacagcaggccctgcatacagccatttggtgggtggagcatgtggcccacactggcggagctcctctgttgaagcccagtgccgtcgagatgtcacgattcgtttactactccctggatgtctatgccgtgttggccctcgtcctgggcagcatcattgccagttgggtgtggctccttcgactctgttgcggatccagtgccgcccagaagactaagaaggattagctcgactcatccctgcacagcttcgtttgtggtctatgtgatattttatatgttctgtgtaagacatttttaattctaaagacgcctcccccacggactgtatctagatgtaatcctagcgacgccaaattaatttaatgtttgatactattgggatttacccgattaaaacgaacgtagttttcgaatattgtatctagtacgggaatattattaaaataatgttataatgttgtaatgaacaactgcaaggaacaacttatttttaaatgaatggaaatgaacatattagaagaaatataatatctgaaaattgtttctagtacggaaataaataaagtttttaaaatatttcactctttttcaatgccgtgcgcatcagtaatgttcaaatgctcggaaattcgtagatgaaattccctatgtatttatttctagccaagagcacttacatgttgcgatactttttaagttccccctaaaagattgaattatgtatgtgtgtatgtatgtaaatataagtatatgtatgctttcggcgcctaattgagcttttttactcgccggcgtcagttgatgctcatcttccgaccgttccggatctagctctatctccccgtgtgagtgaaacgccggagaatattatttttgtttgctaattgtaaaatgaaaaaaataatcgcatttgttaaatttagaagtgcattccacagcatgtaaaactcatatcatcacgaaaatcgatttgcaccgctgactcgacaagaacttgaccctttcccccggttttccagcgcaatgtgtggttgttggaaggttttctgcctgctggcgctactttccctggtcgctttcagcgattccctgcgaattctgggtctgtttccgcacccggccatcagtcacttcaagttctttcacccaatcatgcgcggattggccgaggccggtcacagcgtggatgtcatcagtccattcgaggacaaggaccctccaaacggatacaaggaccacctgctgccgccctccaccttgacagacactattagcttagaggtgcgttgttcaaagccataatgagatggcatacccataaaaaaagggtacataaaggggtcataacttaaatgatgagtgagtgctggtgttattatattttaggtgatacgaacttgaaatgtgtaagcgtaaccccagatgtactattatacaatagtattatattctgagcttatctcagattttaaccttttcttttaacctatacttaaattaagaaacccactttttctatcggttttaccaggacttcgaacggccctacagcttcctatttcactatgtag

SEQ ID NO: 37478 - DNA, 1931 bp, DROSOPHILA
cttgtcggcagtcttacaaggtacaatgtggtcgccgcgggttgccctacttttcctggccctagcacttagccaaccggacgagttggtggaggccgctggtccgctgaaggtgctgggtctttttccccatcccggagttagccacttccacttcttccaccccatcatgaagggtctggccgaggcgggtcatgacgtgagcgtggtttcccacttcccggacaagcatccggttgcccactacaaggatttccccctcaccggaatggacaagctcacgaacagtgttgatctcaagtttttcgagaagcgcacattctacagtcacttccaggagttcttcctgctgtacgactggggcaaacagacatgcaacctgacgctccgttcggaagcactgcagcagatcctcaggcgtccgggacgctttgatgtgatcatcatggagcaattcaacactgactgcatgatgggagtggcccaccagctccaggcgccggtgatcgccttgagcagctgtgtgatgatgccctggcactacgagcgaatgggagctcctttgataccctctcacatcccggcgctcttcatggcccagtcgcagcacatgaactttgggggacgactggccaattggttcagcacccacgccttaaattggatgtacaaattactatcggttcccgctgccgacgccatggttcagtacaaattcggccatgacgtgccttcggtgggcgagctggtgaagaacacatccatgttctttgtgaaccagcactactcgctgtctggacccaaggtaacgccgcccaatgtcatcgagctgggtggcatccacatccagaaatcgaagcctctgcctgccgatctgcagcgcattctggacaatgctgaggaaggagtgatcctgattagttggggatcaatgatccgggcgaattccctgtcggcggcgaaaagggatggcattattcgggcggtggctcgattaaagcagaaggttatctggaaatgggaaaacgaaacactgcctaaccagccacccaacatgcacattatgaagtggttgccacaacgcgatatcctctgccatcccaacgtcaaggtgttcatgtcccacggcggactcatgggcacctcggaggcagcttactgtggagtcccagtggttgcgacgcccatgtatggcgatcagtttgtcaatacggccgctttggtcgagcgaggcatgggaactatcctgaatttcgaggatataggcgaaaacacggtgatgagggcactaaagaaggctttggacaaaaagttccacgatgctgccaaagtagtctcccactcgttccaccaccgcccacagcaggccctgcatacagccatttggtgggtggagcatgtggcccacactggcggagctcctctgttgaagcccagtgccgtcgagatgtcacgattcgtttactactccctggatgtctatgccgtgttggccctcgtcctgggcagcatcattgccagttgggtgtggctccttcgactctgttgcggatccagtgccgcccagaagactaagaaggattagctcgactcatccctgcacagcttcgtttgtggtctatgtgatattttatatgttctgtgtaagacatttttaattctaaagacgcctcccccacggactgtatctagatgtaatcctagcgacgccaaattaatttaatgtttgatactattgggatttacccgattaaaacgaacgtagttttcgaatattgtatctagtacgggaatattattaaaataatgttataatgttgtaatgaacaactgcaaggaacaacttatttttaaatgaatggaaatgaacatattagaagaaatataatatctgaaaattgtttctagtacggaaataaataaagttttta

SEQ ID NO: 37479 - protein, 519 aa, DROSOPHILA
MWSPRVALLFLALALSQPDELVEAAGPLKVLGLFPHPGVSHFHFFHPIMKGLAEAGHDVSVVSHFPDKHPVAHYKDFPLTGMDKLTNSVDLKFFEKRTFYSHFQEFFLLYDWGKQTCNLTLRSEALQQILRRPGRFDVIIMEQFNTDCMMGVAHQLQAPVIALSSCVMMPWHYERMGAPLIPSHIPALFMAQSQHMNFGGRLANWFSTHALNWMYKLLSVPAADAMVQYKFGHDVPSVGELVKNTSMFFVNQHYSLSGPKVTPPNVIELGGIHIQKSKPLPADLQRILDNAEEGVILISWGSMIRANSLSAAKRDGIIRAVARLKQKVIWKWENETLPNQPPNMHIMKWLPQRDILCHPNVKVFMSHGGLMGTSEAAYCGVPVVATPMYGDQFVNTAALVERGMGTILNFEDIGENTVMRALKKALDKKFHDAAKVVSHSFHHRPQQALHTAIWWVEHVAHTGGAPLLKPSAVEMSRFVYYSLDVYAVLALVLGSIIASWVWLLRLCCGSSAAQKTKKD

SEQ ID NO: 37480 - DNA, 4082 bp, DROSOPHILA; identical to SEQ ID NO: 25543

SEQ ID NO: 37481 - DNA, 1584 bp, DROSOPHILA
ctcatcttccgaccgttccggatctagctctatctccccgtaagtgcattccacagcatgtaaaactcatatcatcacgaaaatcgatttgcaccgctgactcgacaagaacttgaccctttcccccggttttccagcgcaatgtgtggttgttggaaggttttctgcctgctggcgctactttccctggtcgctttcagcgattccctgcgaattctgggtctgtttccgcacccggccatcagtcacttcaagttctttcacccaatcatgcgcggattggccgaggccggtcacagcgtggatgtcatcagtccattcgaggacaaggaccctccaaacggatacaaggaccacctgctgccgccctccaccttgacagacactattagcttagaggacttcgaacggccctacagcttcctatttcactatgtagagttctttatcctgcacaaaatgggaagagaggactgcaataccacactgcacagcagagccctaactgagatccttaagaatcctcctggctactacgatgtaattttactggagcaattcaatactgactgtgcgatgagcgtggcccatgttttccaagctccggtcattggaatgagcagctgtgccctgatgccatggcattatgaacgatttggagcccctctgatcccatcgtatatatcagcattgttccagggacaatcccaggagatgtcctttgcgggacgattgggcaactggattactgtgcactccctcaacttgctgtataaaatgtttacagttcccgccggaaacgccttgattcgccaaagattcggtcctggactgccgtccacggaggacttggtgaggaatacttctctaatgctggtcaaccagcacttttcgctcagagtcatcctaattagctggggctctcagctgaaagcgtgttctctttccgctgctcggagagatggaatcgttaaagcgattggaagattggagcaggaggtcatctggaagtatgaaaatgacacgctgcccaataagccaccaaatctgcacatcaggaagtggctgcctcagcgagacatcctcgctcatccaaatctaaaggtatttatgtcccacggtggcttaatgggcaccacggaggcggtctccagtgctgtgccgattgtgggtgtcccaatttacggcgaccaatccctcaatattgccgcattggtgcagcgcggaatggccttgcaattagagcttaagaaactggatgagaatactgtctacgaagcgttgaccaaggcactagatccttctttcaaggcaagagccaaggaggtggcctcatcgtacaacaaccgcatccaaggtcccttggagacggccatttggtgggtggaacatgtggcggagacgaaaggagctcctctgacccaaccaagtgccgtgcatctctcccgctttgtttactactccttggatgtctactcggtcgtggccctaagcctgctactacctgtgatcacgctcttgggactaatccgaatgtttaaaagaagggaacccaaaggtgaccgcaaactaaaacgcaaataa

SEQ ID NO: 37482 - protein, 480 aa, DROSOPHILA; identical to SEQ ID NO: 25545

SEQ ID NO: 37483 - DNA, 3089 bp, DROSOPHILA
gcttaaaaaaggacttacgcggaaactttgacagcttggctttaattgaaaaactcgaatataaatgcgagaccattgtaaggcactatgatccggcagataagcatatggaattaaccattatgttcattacatattcaaatttaaagccgactcgccaatgaaaacatattcgtggagatttaaatttgtgataggcatgaaaaaaagagagtgtgaaacgccaaatgagctgtccataaatcccacatgtttataatcaaacacgccccggcttcccgtttttcgggattcgagggatgcaggattaggcttaaattgagcgtgtgccattttgactgtcggcaacatatcgcacatgccgtatatcgctgacacaatctcggaccctttgtttgctgatggatctctaatgaaattatcaaacattttaataacaaatgaaaacatgtgcggttgccgcaatattgcatgggcgcatgcgcagcgcacaaattgatcgcatttaggggaggcaaaaagggtgacacggcaatatcggagaagggatgcctgctcttctgtttccgattctgtgagccctcataaagcgaacagtggctgcacccgaaattgagattgtatcgcaggacgtatcgctcgtgccaggaactctgtcacgggcattgccgccggattctgaactttggattctagattttagattgtgtacacccgatttgatgtgacccacagtggttgcgttgcacgttaattgcctggcaccacagctgcaattattagccacaccagcatggacacaacacatacgttattacactcctattcaatgtgaaatcctgatggaattgccccattttgggcagggtaactaagcgttacgatgggcattgatatctttattagtacgcagcaggctgaatattacttcatttaaaaagataaacccatgatattcttttctcaatagtggaaaaaaataaataaaaatgtttggatatcaattacacactaaaattatgcttatgtttgatataacttcaaaatttgtgcaaatgtttttaacttcttggtattagttcttaggcaaaccaaataatttaaacgaaactcaccattatcacgatcgctgcgatcatcgctgggcgcggagctgcccccaccgccgctttttgctcccgaggaggaggcggccaccactgcggcggctgctgctgcggctgctgccaggaccttgccgccgttcatgaagtcctcgttcagttgaacaggactcttgggtcgcccgtcgacgaccatttcactgccagcattcacgtaccgattcgtctcgtaccacagctataaaaaggcaagggaaaataatggttaaaattgtaaaaaatcgagtggcacgtgctgaagggctttttataatgggttggggttgtatactaacataaccagcattaatgtaactctgtaaattagcctcgcctatacaatcgtcctgaacgcttcggatttttttcaaccacgtggacacatcttctgtgggctctagccatccattatagtgtctactatgggcctgcaagcacagtataagggtaatcaatttaaaatatatttatttcaagttttttcctcttcattaaaaaagttaattaaaatcgtaattagttttcaaaaatatctgctggcgccatctgttggcccacccctgctaactgtgctatttatacacgtttgtctttgctaagccaagacacaaccctcaaaagtgttatatttgtgtataattgtaagtagatatcaacttcttagatgtaaaatatggttaaatataaattataaaaaatagcaatacagaatacaaagatatacataaaataaataaaaaaaaatactattataacccaaaactaagaaatatctgggtaactgaaagtgctttgcaatttaaataattattattcccaaatgcaagcttgcaacaactcacagtacaatttgagcatattagaataaatttttagtgtcaaacaaattttcattgagagtcaacataattacttagccaattaataagggtcttcacacactccattaaaaagcaggcccagcaagacgccgcccacaagtctgcccgcaaaatcaaggtcactaaacggtaagaggaaactgcagccacggtgcgaaaatacatgaaaagagcaaaacaacagaaaactaaacaaaaaccgccaacagtttttgtgtacaaataaaagcagcggcgccaagctgaattacgcataatttacacaaatcgttaacagcggctgtggatttttttctttttttttcttgttttgtagttgcggctggaaatgagaaaaactgccttagactttgcgacgccgaaagtttgacgctgccgcaaccacaaattaaaatcaaaaaaccaaaaaagaaaaaaatcaaaaaactcaaatgctgcggttgactgaatgactttgcgtatgcgcaacgttcaagtcgccgccgtcgaactcttgtctatgaagtcatttggaaaaacggcattttgcagttggcgatgaagtggtataagggtgtgtgtgtgtgtgtgtgtgttaatgtgtgcgtgtgctcatgtgggtgtgtgtgcgtctagggagaaagagagagagagagtgagccatgtgtgcacgctccaaaaattaagttaacaacgcctcaagtggcttctgctgccccgcggcatatgcagcgcaaaaataaaaaataaaataaatacaaaaatatacccgcgcgcataaatgaaataaactttgcgttttcaggacgaggaagagaggtttcgtcgagtggcttgccaaacaagtaggttgcagtctgtgcatttccattcggcgagggccacgcaagttatagttgcaaaaatgtataattggaagggctttgatttgcgaaacacggggcaattcgcaattacaataattagaagatggtggagtagtaggaacatgtgggttcaaagcaatctctcatttcaaaggggaaggcatagttaatttattaaatcaatattaagcatcaaacccaaagaatttataatacagaaa

SEQ ID NO: 37484 - DNA, 246 bp, DROSOPHILA
atggagtgtctgtggtacgagacgaatcggtacgtgaatgctggcagtgaaatggtcgtcgacgggcgacccaagagtcctgttcaactgaacgaggacttcatgaacggcggcaaggtcctggcagcagccgcagcagcagccgccgcagtggtggccgcctcctcctcgggagcaaaaagcggcggtgggggcagctccgcgcccagcgatgatcgcagcgatcgtgataatgtgtgtaattga

SEQ ID NO: 37485 - protein, 81 aa, DROSOPHILA
MECLWYETNRYVNAGSEMVVDGRPKSPVQLNEDFMNGGKVLAAAAAAAAAVVAASSSGAKSGGGGSSAPSDDRSDRDNVCN

SEQ ID NO: 37486 - DNA, 4848 bp, DROSOPHILA
atccccggacagacatcacacatgtccttgcctattcataactttattaaaaaggaggccaccacgctcacagcagaaaaacacgaaaacgtcaatgggcaggaaaaatatttacgcgccagagataatctcaaagtgttgggttcggttcggttaggttcggctggcaaaactcgcttcgaattgccagatcagatccagatcctccagaaggatcggacgggaaacggtggcagatacagatacagatacggccaatgtatctgtcaaaacggaaacgtgaacgataaaagtgcgcttgatttgaggatcatccaggaataaaggccagaagggatccgatccgatccgagttgtgttatttttgcaattttcgctcgagtggcaggaacaatattttcgtaccaatacctgggccgagtaggtaaaaagagggatctccttgtgcgaattgtcaacaggacgaggcgcgataatttgattggattgtctctgtgtttcggtagagaaaagtggtagcggagggaggaggaaaagtgtcagttgactgactgactgactgacaaccgatcgaagggttcagactgggatcggacgatccgtataccctaattggaatcatcagccggccccgacttaagcctcatttggggtgcactttgtggattttcgtcctggttttccactccggcggaaggtaaattagctctggccggggattaggcacatttgactgacaattgataccctcgaggtagagctctaatcaaatctctttccaatcgtttgattttccctgcgaaaaccacccaaaaattgggatgactcaattcgcttgcaattttcgcacatcaaaattggtacggttctgatgggattaaatttcccgaccagcgaaaaactaatatcggaaatttgagattgccaaaatgcgcacacatgtgaaaggcttaaggtccgtttggtgataaatgtgtgctataaaagttttttgggattttcaggcatgggatttgtgcttctgattgcatgggaaaataattgtaattgcaactaacgacaattttgggtaggcattgttgagttctaccgatttttgaattaattaggttagtgaacatcaagcaactaaaatatatttaaatcatcgttagaaagtagtttaataagttatgcaaagcattacaaaatatcagatccaacaatcaactttagactacaagttttctatctatcgttcgattctaaatattcaatgtattttctactccttccccacagttatatttacttctcagaacttaaaaaattatttatctctttttcaaggattgtcaaaactacttaccttccaggccagctgaggatcgttgggttggtggctgagcttcatgggaaagggtccgtagcgagtgcccctctggagcggcgtcttggcgtagacgccaccactatcacggatgtccagctcacagactggttcgcgcctacgcacccactcctgcaggatgtgctccgcctgggcgcggtccttgaagaaggcatccatgccgtcgacggaggcggctgcggcggaggaggattccacggacagcggcaacgtgggaggcggtggctgttgtcgctggttctgctggtggaaatgattgggatggtgaagtagctcctgatcctgtatatcaagatgatcccgcctcggcggagatccttccacgggctcctgctgcggtaagtgatggcgggcggcgaatgaatcctcgatttgttcagacagtggattgaagccctgactcctggcactcagatccaggtgatggaggtgatgatggtggcgcgctacacttgcacttggatcgaagtcgtcgcctccggagcctgttaacaatcgaagcggataagaaatagacagcgattagaaatgacttttccgaccgctggcaagcactcaaagcactaatcctaatcagttgttggctgtcaattcactcccaaaataaaatagataaagccaatgactcttcacgtcgagatgacaatcgttgcccggttttatatataaaggtgtctttggggattttgcaatgcacggctgggaccgtctatcactgcccactctatgtggctcctatcttcccggcaagacaggtgtctctaccctttccacagacagggcgtatcagttacctcgtctgttttcctgtctaatccaagcaggctgagcaaataaaaactggataaatatcgacgggaaatatttaaactattttgttgacacaataattccgacttaagttgcttagatttgctgcttatcttcacatttaattgatgtgactggattgacttttgccgattgaatagataaaataaacttcactagacgacttgatgagtcagcttagtgacagtagaatcaggggtaatttgatttttacccttagaactcccataatattttgcactatttcagatgggtggtgatgacattgtgagtgcattcccatggtgtcatttgaaaaaaatagcacccacttctttaagataccgataatcggtgggctcggaacataagtatacacggacaaattacccggcgattattgatatttgagcaactactagttgttgtttgctgtttggtttcttgtcttgtccatccgccttgttcgaacacttgaaactaaatcgtaatttgagctgttagacaaaatatgacagcgcttcgaagataacgagcatacgaatggtaacagtaactacggagtaacagtaacattaccccgaaacagataagtatcggccatataagtagaccgcaaaccaatggctcgcaaacaatggccaaacacaaagcaaactacgtttggagttctcgacccgaaacaacctgctgcatttcgcacatcctgcggcacactctgtttgcacagtatcctggcacttcgatcgcgaaccccgacggcttcacaccatttagcgaaatctttttgaagtggcctacacttcaaagaccgccctcgcaaccactcatctcgcgtttatcctcggctctatttgacaacccaattgttaatcactctggttttctttagttttcgcttttacccaagcgcaagtgttttttcaacgggaccttcggctaatttgtgttttaggtaatcacatttgggtttggtctgctgataaaactggccataaacgcttgattgccagtgtgtgggggcttgataagtggggatcgattttaatgggtttacttagggcttacttcggttttagtttggtcattaaaagttgcggcaagtttagtaaggaaactagattaaaagatgttttttgtggcccgagatatagagctcttaaaaaatgttttcgcctaatttttttcactacttcaattattttcaatggtatatgccaatttattaacaggcaataagtattttagctgggttgatataatttgttcaaattatatttgaatggcaagccttcaatttcctgtaagtctaaaaaaattcgtagtttatttataaacgaatgttttaattagggccaagacaataggagataaaaccacgacaccacttattttaagcacttgatttgtcacaatttttgtcattgatgttttagggctaaaaaacaatcgatcaactaatgggtggatttgttcaaactgattcacttggcttctgtttaagttagggccgttgtaaactgttttcaaagtaactgattcagttcagggaactgcgattccctgtaagccgcagtgcgagataccaacttttgtttattaacacggcgtggaaccaacctgatatgacatatcgatcgaacagcatgattccgctttcaaacgttacttgtaattatcacaataaacagatcgctggcaaatattttcataacacgcgatgtgacattttctgcgcggccaacactgcgtatgcttgatgttgctttatgtaggtaccgatattgctacgattttaacggatatttatttatttgatgggtgtcgtctctatctgccggttgtcttcgcaagactgctgccagccagccagccaggaaaagaagcggcgataacgcaaaaaatataaatgcaaagaaacaagcagaaacagaattgtgtggcagcgacgtcgacgtcgacggcgaccgagagtgcaaacggcggcagcgaaaagcgagtgtgattttccgattccgattgccagcacgctcagcaacgaactgaaactgaattgtctggaggcgatgaggattctcggattctcggattgccggactcggattctcggtttgaatgggaatttttcgggccggttggctggttggctatccattcgccatggtggttgtttccgctcctctctcccaaccgaaaatctcatcccatctcccagaggatcgccctgatgtcctggctatctttcgtaaagcataaccaaaaggataggggatgaaactggagagcaacatcggtggagagagggagagagaaagagagagagagtgcagcatctgtatctttaacagtgcgtttatatatgtatctccagcctgcgctcacacactctctctctctcggattctgttcctccttctctttcgcggcgagaacagctctctttctcgccccttgaaatctgtgtcagtttgcagtcattattattatctgaaacttggtgattctgattcgaatccttagtgccagtggccacagaaaggataacagagggagatggccatcaacgagacagggacagagaatgagcaagagagagagagtgcgatggccttatttacccctcgatttttcctatcagaatacggcta

SEQ ID NO: 37487 - DNA, 576 bp, DROSOPHILA
atgctgttcgatcgatatgtcatatcaggctccggaggcgacgacttcgatccaagtgcaagtgtagcgcgccaccatcatcacctccatcacctggatctgagtgccaggagtcagggcttcaatccactgtctgaacaaatcgaggattcattcgccgcccgccatcacttaccgcagcaggagcccgtggaaggatctccgccgaggcgggatcatcttgatatacaggatcaggagctacttcaccatcccaatcatttccaccagcagaaccagcgacaacagccaccgcctcccacgttgccgctgtccgtggaatcctcctccgccgcagccgcctccgtcgacggcatggatgccttcttcaaggaccgcgcccaggcggagcacatcctgcaggagtgggtgcgtaggcgcgaaccagtctgtgagctggacatccgtgatagtggtggcgtctacgccaagacgccgctccagaggggcactcgctacggaccctttcccatgaagctcagccaccaacccaacgatcctcagctggcctggaagaagcacaaatcccatgcctga

SEQ ID NO: 37488 - protein, 191 aa, DROSOPHILA
MLFDRYVISGSGGDDFDPSASVARHHHHLHHLDLSARSQGFNPLSEQIEDSFAARHHLPQQEPVEGSPPRRDHLDIQDQELLHHPNHFHQQNQRQQPPPPTLPLSVESSSAAAASVDGMDAFFKDRAQAEHILQEWVRRREPVCELDIRDSGGVYAKTPLQRGTRYGPFPMKLSHQPNDPQLAWKKHKSHA

SEQ ID NO: 37489 - DNA, 3617 bp, DROSOPHILA
cagggggatttcccgcggcgcgtttccacggcggcccacatggcgtatgagtgacagccaggcaacggcgacgtcaaagtcgtcgacgactcatatcaaattaccgttatggttatgcacaggcggttgaaatggtggagggtgggtggtgggtttagcgaggggtggtgtcagatggaggggccgaggggacaggacatctaatgagcgacgagggccagcaacttggcagttatcaatttctatagcatagcaaatggagcggagcgttccgaactcatttggtttcgtttttgcctctcaacgcatgtggagaaattataaacaggggagaacgcaagagccgagttcatagactatcagatacccattacccatgcaggtggggatgcgacggagaaatttttgcattctattggcatagggaaggaaactggacgtcacagttcatggcgccttgtgagagtaagcgataacttttatagttcccgagatttcgaaattcatgcggataacacagacggacgaacggactgagatacagatccattcagctagtgatatcttgatcagaatgggttggtcgccctttccaccttttacatgcttttcaatgaatctagtatacccttttacttcaatagtaacgggtgcaataaaggaatctcataaaaccagaaataattacatacaatttattcaagagctacgtatttgttgataagtgctatgacaaagtgcttggaaaaagtaattctatgtttgcgtattttaagagaacaatgcagacaaaccgaaaattgttaaaaataataataaaaatcttatcaatatctttgcagctatcaaatagttgagggagaaaaggagacaacagagagagagagagagagagtgaaaggaacagagagagaagagggagatagaacgaaaagtgggcgcagtttttgtgagttgaggggcaaccatcggtgatgtgggacacatcccgccacgggcaatgcaacaaccccaacgttatataccgtctgtatctgatctatatggcacggacgagatagaactgctgctggacgagattcgggagctggagctggagccggtctgctgtcagctggacgatgagcaggactttgaaatagctggcagcagggccggcgagctctcccactcgcactcgcactcgctgtccttggaatcccccctcggaacctgcacctcctgggactcccatgccaactacaagcagaggggcggccacacccccctgccctggggcgtcgcccttcactgtgatccgcaacacttgaaatcgcctacagggattgtgcgcatactattggtggtaagtgttggtggtcgagcgacccatcctgcccctgggcatgaatgctaacaagaaacctacctctttctatctaccagttatcctcggctgcctgcctggcctgtgaatgctccgcgggcaccgtacaggtgggcctctttctactgccactcatcggacgcctgaggctgatggtcttctgcgcgctcttttcgctactcatcacgtgtctcatgctctttctggatatatcgcatatagccctcatgttcccattcaactggacaaaagtggtgggtacaaaatgttataatgcagtagtgcgtatattaaatgtggaaatcttttcgcgcagaatacgtggatgtacctgagtgttggtttgatatttattttgagctccacactgcttgtccacatggtgctatatgcgactgaatacacatgggtatccaagcactccaaggacacgcttctggccactggggtaagatcgaaacgcccattaagttcgcttatatgaccagcactggtttcttccgctttcaaatagataattggctatctgtgcgccgtggaagcatttctactgtcgggcatcgcatcctggccgtggactcagtaccgccaggtgcccgacgatgccagcgaattgttcatcgaggatcgcgagatgacgccgatgagtcccattaattgtagcaccgatctgcaggcgacgccatatcatcacaatggcaatgcgaccacgtcggatttgtataaccaacaacaacaatcgtcctataatcaaaagccttatatacctggtaaggaatctatttaactacttctatttggggtgatgtgatggtaacatgtctcatttgcagccaaacgacccaatgagctcaacaatcagcgtccagcattgggtcacacacaaaccgcacggtcgaaacccaatcagcgctatcgagagggctaccactatcacacatcccgccagagtcccacattcgtgctgggcgatgatcagggtgccggtccatccacgtcccgttccaatgataactctagtgcgtgatagttcttaatgcctcagccagacgaaggacacagcagggagagcttggccaggcgtccaaggaaggggaatagttacagagatctctaagccattaaattcgggaaaatcaattggaagcatgttgcagcactttggtcgacgtagaaagtgaacgaacacaacggacaaaattgttaattagtttaaaaccacacgcgaaactcgtcggaattagaagttgagacaccaagagaggaaatatttaagcagccgagcaaagcaaacaataataaatttaatatatattgtgtgtatgtgtactacgagccgagagagaaatttaaagaatttaagccacaagaaatttgaaacgcagatcaacctgatctacgcccatttgattagttatacgaacaccaacacccttgaaattggtcaatgtcgagctataactaaaaaggatattaaattggtaactatacggtatcaaggtaacgcgcggaaattgcaagcaaaattgaagattagaattggaagattacaatgagcatggacatggaaatcaacttgttataaacgtagttttgcttattttttaataaaaacaactaattcaagaaaaacaaaatcaactaatttcacttgttctttttagaaatcaaatctatttctcttctgtttaaatgtgttcaaatgtgacaatcaaatcattataatgcaacaagattattctagtgcttcggaaatgcatgcaacaggcttagatttacttcagccccaggtccttttcaattgtatgcgagcagacggccatcatctgatccttgacgttgacgaagttgcgaatagcagcgggcttggcctctggccaaccagccagatcgcggtagatggggcgacagaacttcatgcggaagttggagttggcaaattcgaggatctcatccagacgttttatcaagcgtgcacggataatcaagcgattcaatcggaagcgaacctcggcgttcttcgaactcttcaggttgtatgtggattccagtagattaatcttgccttcgttcaaatcgacaatgtccttgctctcgatcagtttgcccaggaagtcaatgagctggtgaatggaaatggtcgtcttgatctccgcactgtcagccaattcagccacgctcttagagctccagagactggccaattccttggtcacattagcgagggattcatcgaagttcggaatgacgg

SEQ ID NO: 37490 - DNA, 1346 bp, DROSOPHILA
atgcaacaaccccaacgttatataccgtctgtatctgatctatatggcacggacgagatagaactgctgctggacgagattcgggagctggagctggagccggtctgctgtcagctggacgatgagcaggactttgaaatagctggcagcagggccggcgagctctcccactcgcactcgcactcgctgtccttggaatcccccctcggaacctgcacctcctgggactcccatgccaactacaagcagaggggcggccacacccccctgccctggggcgtcgcccttcactgtgatccgcaacacttgaaatcgcctacagggattgtgcgcatactattggtgttatcctcggctgcctgcctggcctgtgaatgctccgcgggcaccgtacaggtgggcctctttctactgccactcatcggacgcctgaggctgatggtcttctgcgcgctcttttcgctactcatcacgtgtctcatgctctttctggatatatcgcatatagccctcatgttcccattcaactggacaaaagtgaatacgtggatgtacctgagtgttggtttgatatttattttgagctccacactgcttgtccacatggtgctatatgcgactgaatacacatgggtatccaagcactccaaggacacgcttctggccactgggataattggctatctgtgcgccgtggaagcatttctactgtcgggcatcgcatcctggccgtggactcagtaccgccaggtgcccgacgatgccagcgaattgttcatcgaggatcgcgagatgacgccgatgagtcccattaattgtagcaccgatctgcaggcgacgccatatcatcacaatggcaatgcgaccacgtcggatttgtataaccaacaacaacaatcgtcctataatcaaaagccttatatacctgccaaacgacccaatgagctcaacaatcagcgtccagcattgggtcacacacaaaccgcacggtcgaaacccaatcagcgctatcgagagggctaccactatcacacatcccgccagagtcccacattcgtgctgggcgatgatcagggtgccggtccatccacgtcccgttccaatgataactctagtgcgtgatagttcttaatgcctcagccagacgaaggacacagcagggagagcttggccaggcgtccaaggaaggggaatagttacagagatctctaagccattaaattcgggaaaatcaattggaagcatgttgcagcactttggtcgacgtagaaagtgaacgaacacaacggacaaaattgttaattagtttaaaaccacacgcgaaactcgtcggaattagaagttga

SEQ ID NO: 37491 - protein, 373 aa, DROSOPHILA
MQQPQRYIPSVSDLYGTDEIELLLDEIRELELEPVCCQLDDEQDFEIAGSRAGELSHSHSHSLSLESPLGTCTSWDSHANYKQRGGHTPLPWGVALHCDPQHLKSPTGIVRILLVLSSAACLACECSAGTVQVGLFLLPLIGRLRLMVFCALFSLLITCLMLFLDISHIALMFPFNWTKVNTWMYLSVGLIFILSSTLLVHMVLYATEYTWVSKHSKDTLLATGIIGYLCAVEAFLLSGIASWPWTQYRQVPDDASELFIEDREMTPMSPINCSTDLQATPYHHNGNATTSDLYNQQQQSSYNQKPYIPAKRPNELNNQRPALGHTQTARSKPNQRYREGYHYHTSRQSPTFVLGDDQGAGPSTSRSNDNSSA

SEQ ID NO: 37492 - DNA, 2463 bp, DROSOPHILA
atgatctcctggcgccgattgaggatgtgcgtcagctcggagctgtccgtgttggtggtgctgctggggctgtccacgctgtccttgttggaggcggatgaggcgttcgaggaaacggacattgtgtcgctccttgttgactcgctttttagtgtgctggaatttccctttctgcccttttctgctgccttctcactctctcttccttttggcacacccacgcaaaaaggaccgtaaaagagatgtccggatacacacacaaatgcggcgatgcgccaggaaaacacacacggactcgttgcacgtaagcttttgtcgtggggagtggccctgagtccttttttggctttgaaaaaacagttgcaaggtgcgtttgaattgccggtctttttttttttttttgctgcaaattggctttcttattggacaactggtgttccgcttcgaccgccgcgactaccgaatcttctgaacgctgagagacgaatgaaagtgcgaccgtgacacgagcgttcaaatataccagcgggcgcggcggcatttttcgagtgaccgtgtgctgacaaataccaaagtcagctgaatttcgaggcaatatatataccttacaatttttttaattcattctgttactaataatgtatataatcattatttaaagctagctgatgaacagacggtttcaaattttacgaaagtttttaactttcttaagcaaaatatgtaaccgaatatttattgtatgtttatatagttataatataattatataattagtttgatcacaaaatcaatctttgtataattttaatgttgttcccaataaaatatttaaatttaagattcttaaatatattacggcatatgaggtatacagacaaccctaaactatcgtccaaagctcccagccctaggtgtgcccgcattttgatagcaatttagcaaaattttgtagaaaattgtaccgactgtgattgtaattcgtaattgttcaataaaaatgggcagtaaactgtttaacaaactcttgctaattgccggatttgccagcctggcacatgctgctttttctgctgcccatcgtaagttttcgtcactgttgtggtaaataaactttggaccactaagtgccgcatttactccacagatcgcacctatttgaggctgacggagcaggaatggaatagccttccattggacgtaggtttcggtgcatttagggtgcttgcatggttactcacgaaaagttttcctttatcaatccttagattatcctgcagaccgtcatcagtttggtgattgtgatttacaacatcatcgagatcgttggcaacttcaaggaaattcgcgccaccgtggacatgcaacagaaaacttgggacaccttgggcaacttcccctcgttctattccttcaatcaccgtggtcgtgccttaaatcctggatatacgcccccggaataagagacctttcttttaagttctgctatccttttatttatagtctcagcaagttacaatatagataacgctaaagatcaaccaaactccgtaacctgcattcgaaaatttgatggatattgcggaactcttgccttgcaacaaggacaatgccttggcctccagctcatagctggctcttaattcccggccaggactattattgcatgcctgactgtgacaagtgcgacaactgtcgaagtggttactccttaagagacattcgtagtatagctcgggattggaacgacatcctcttacaatttctttactgttgatgtcaaagtactccaagcaggccaattcttgatcctccggctcatttgctcgagccggacaaggcatagccgtttgtcccctggagatctcctcgcagtcctgcactcccctacactgatgacaccagaggcgctcctccggaaatgatcctttgttgcagaaacttccttcgcatagtcgacaactggccacatttgcggaagcacagctgaagtccgatttttggcaacctctcgcagtggtggcgttgttaaaggaaacaaccacacatggtgcagccggttcatcgcattcttcaatgtagatttcgccaggactttcccaatttgcacagcctgctcccgcttgatccgtgctgcattggtagcaccgggtgaaatccttactattacacccagcgccttcatcgcattcatagcacttggtgatttgaggattttccggcggtgctccacagcctcgctgaatactccagttggagtactcacaggagaaacaggaagaggcctcagcggagctacaagtgctattagctatagccgtaatatttgtccggcaaagttcctgatccacggagttgcatgtaaaacacttctgctgcgtaatgcatcctgcgttgcagtggtcactggtattacacttttctaattgctctacatacggctccaaatctgttggaatttta

SEQ ID NO: 37493 - DNA, 330 bp, DROSOPHILA
atgggcagtaaactgtttaacaaactcttgctaattgccggatttgccagcctggcacatgctgctttttctgctgcccatcatcgcacctatttgaggctgacggagcaggaatggaatagccttccattggacattatcctgcagaccgtcatcagtttggtgattgtgatttacaacatcatcgagatcgttggcaacttcaaggaaattcgcgccaccgtggacatgcaacagaaaacttgggacaccttgggcaacttcccctcgttctattccttcaatcaccgtggtcgtgccttaaatcctggatatacgcccccggaataa

SEQ ID NO: 37494 - protein, 109 aa, DROSOPHILA
MGSKLFNKLLLIAGFASLAHAAFSAAHHRTYLRLTEQEWNSLPLDIILQTVISLVIVIYNIIEIVGNFKEIRATVDMQQKTWDTLGNFPSFYSFNHRGRALNPGYTPPE

SEQ ID NO: 37495 - DNA, 3038 bp, DROSOPHILA
aaacaacggtctgctattaaaaaaaaaaacccctctaaggttacaacgcatttttccgtgggaaatcgcaggtagctcacatctcaggaggaccaggaaaaggaggagcaggtggtggaagcttgagtggcgatttgtctgcagtccacgcattttgacagctcataaagaatgtagtgcacctttgtttgcaaaattggaatccctaatctgtttatgacttatcagacaatataacaatgagttgatataggcgaactgttgataaggataagctggaaaaagccatttaactttaaaataaccaaacattatcatttaaataaaaagttacactcgctaaatgtgttcttaaattgccaccataaaaaacttacgttggtagaaattcttcaattattttaaggcttaaaatagagagttgcttgatgtcctaacgaaatcctttcgatatagataatttcccaaccacagttgtaaggttacccaactttattccggcatatgcataatggccaaaaatgtcatgaccataatgtgctctgtgccttgaccccattatcggagtgtcccataggttccatcgaaacgttcacatcatcaataatttaagggctcgcatttgttgcgggaaagtctggagctactcaaaagtgtgggtcaagggtccggcgaccgccccaacatatcgatttaatttagagaccggataattgcgtgacaatcagcggattcgagtacacataccacatgtccaggcggcttaatgaccatcgacctcagttgccagctaaacaggcacgggacaagtcgggaataacaaacccatcggtggccagaacggagcaaatacccatgcttgcagagctcttcaaaacggggataaaccgataacgaaagatacattctgataagcccatccactcggcgggttccgttcaagattcattcgccatccgagtcatacactctgcgaagctacaaccgatcggtgaccacgatgcggatgagattgctggtcatttggatttccctaactgctctccttgaatggagcagggcgcaggaggacaacattgaagagttcagcttaagcggcggactagcgggtgaaaagtcagaaaactcaggcattgaagccggtgaaaatgacacagaatccctaggacaaagtcacttatttttgaacacaacacaaagtccaactgatgaccctgagcctacacaggaactgtcatctattgaaagtcaagttggacaggtaggccaccagtctggagaggatgagaaggaaccggaaatcacaagcttagacactaattcggaaacggataacaaattagaaggggacaaagaagagccagaaaaggaatccaccgggaattccggtggctttgcgccaactcaagttcctcaaaccgacaaagtagaccaatcgtccggacatatggatacttcggactcgtcttcagactcttcagtgactcccgatactcgcccatcaacttcactagaggaggtcctggaaactcacccaacaaacaaaactgaggaaccaatgggaggatcgcccgattacccggctgatgggccccaggaggacaccacaactccacccccagaagaaacaaccttggcaccacacaagcccccagttgcagatccagaacagaaacccctaagctgctattcctgcatgttctgcaacaaaacgatcaccaatgaaacaaagtcaaactgcggcccgatacctggcaaaaggaatggatgtcgcaccatactgctcaacgatcccaatgtcgttccggggaagaagtacttcctgcatcggggctgtgtatccgagttagatatggagctatctcgctattgcgccgagaatgagaagctgtgtcccacgtgctacgaggacaattgtaatgttcacaacatgactgaatatgaagtcactccgggctctgcagcagtcacccatcatccgggggtgctattccttatctggagcatcggtttggttagctggcaggtggctttttaaaaatccacccacgctattctgagtcataacaattaaaaagtaaatggagattggcatacttaaaaatcgataggtatgactaatactgaaaatcgcagattatatcgctgtctgtctagataaattagtttatctatgaaatacataagcccaattaatataaatttctgttacgaaacttaatctatttgcagcgcgtggggattttcgttttctttcttaaatagtgaaatatactgtacttaatatgcaaatgtatataaaataaagcatttcaaggcgaaacatttgattgagaacataactagtacttatattacaagataattattgttcagcagctgcttaatggatcagggatactgggaacggtttttaaatttggtcccttgagtacgtttcctgaaaccatatcatttagaggatataaaatggctcaacagaacctagactgcagttggctaagtcatcgaagcgtgtctataagcacggatcagcggaaccaaaattgaatatatctagaaattaaatacgttttgtttaagaatgtgtctgctttccaataatattattctacttactatactgtcagtcctcgaagtccagggactttaccagcagcaaacaagtacagtgttacccaccgtaaagtccactatgagctcagaccataccaccggaatggaggaaagttcgtcacctgtcgaggaaacaacaacgctttctccgcctataagatgcctcagttgtaaattttgctcacccaatgaggggaaaaccagaactaggaagggcaaaaagatgtgccacataaagttaggcgaattgaacggttgcgtatctatgtacttcaacttcaacagcagtgctggaggaccagatggctttatggtgagaagctgcatttccgacatggacgagagttcactggaacactgcgagaaacatgcagaactctgtgagaggtgtttcgaagacgattgcaactatgtggaaatag

SEQ ID NO: 37496 - DNA, 1038 bp, DROSOPHILA
atgcggatgagattgctggtcatttggatttccctaactgctctccttgaatggagcagggcgcaggaggacaacattgaagagttcagcttaagcggcggactagcgggtgaaaagtcagaaaactcaggcattgaagccggtgaaaatgacacagaatccctaggacaaagtcacttatttttgaacacaacacaaagtccaactgatgaccctgagcctacacaggaactgtcatctattgaaagtcaagttggacaggtaggccaccagtctggagaggatgagaaggaaccggaaatcacaagcttagacactaattcggaaacggataacaaattagaaggggacaaagaagagccagaaaaggaatccaccgggaattccggtggctttgcgccaactcaagttcctcaaaccgacaaagtagaccaatcgtccggacatatggatacttcggactcgtcttcagactcttcagtgactcccgatactcgcccatcaacttcactagaggaggtcctggaaactcacccaacaaacaaaactgaggaaccaatgggaggatcgcccgattacccggctgatgggccccaggaggacaccacaactccacccccagaagaaacaaccttggcaccacacaagcccccagttgcagatccagaacagaaacccctaagctgctattcctgcatgttctgcaacaaaacgatcaccaatgaaacaaagtcaaactgcggcccgatacctggcaaaaggaatggatgtcgcaccatactgctcaacgatcccaatgtcgttccggggaagaagtacttcctgcatcggggctgtgtatccgagttagatatggagctatctcgctattgcgccgagaatgagaagctgtgtcccacgtgctacgaggacaattgtaatgttcacaacatgactgaatatgaagtcactccgggctctgcagcagtcacccatcatccgggggtgctattccttatctggagcatcggtttggttagctggcaggtggctttttaa

SEQ ID NO: 37497 - protein, 345 aa, DROSOPHILA
MRMRLLVIWISLTALLEWSRAQEDNIEEFSLSGGLAGEKSENSGIEAGENDTESLGQSHLFLNTTQSPTDDPEPTQELSSIESQVGQVGHQSGEDEKEPEITSLDTNSETDNKLEGDKEEPEKESTGNSGGFAPTQVPQTDKVDQSSGHMDTSDSSSDSSVTPDTRPSTSLEEVLETHPTNKTEEPMGGSPDYPADGPQEDTTTPPPEETTLAPHKPPVADPEQKPLSCYSCMFCNKTITNETKSNCGPIPGKRNGCRTILLNDPNVVPGKKYFLHRGCVSELDMELSRYCAENEKLCPTCYEDNCNVHNMTEYEVTPGSAAVTHHPGVLFLIWSIGLVSWQVAF

SEQ ID NO: 37498 - DNA, 3934 bp, DROSOPHILA
acgagcgttcaaatataccagcgggcgcggcggcatttttcgagtgaccgtgtgctgacaaataccaaagtcagctgaatttcgaggcaatatatataccttacaatttttttaattcattctgttactaataatgtatataatcattatttaaagctagctgatgaacagacggtttcaaattttacgaaagtttttaactttcttaagcaaaatatgtaaccgaatatttattgtatgtttatatagttataatataattatataattagtttgatcacaaaatcaatctttgtataattttaatgttgttcccaataaaatatttaaatttaagattcttaaatatattacggcatatgaggtatacagacaaccctaaactatcgtccaaagctcccagccctaggtgtgcccgcattttgatagcaatttagcaaaattttgtagaaaattgtaccgactgtgattgtaattcgtaattgttcaataaaaatgggcagtaaactgtttaacaaactcttgctaattgccggatttgccagcctggcacatgctgctttttctgctgcccatcgtaagttttcgtcactgttgtggtaaataaactttggaccactaagtgccgcatttactccacagatcgcacctatttgaggctgacggagcaggaatggaatagccttccattggacgtaggtttcggtgcatttagggtgcttgcatggttactcacgaaaagttttcctttatcaatccttagattatcctgcagaccgtcatcagtttggtgattgtgatttacaacatcatcgagatcgttggcaacttcaaggaaattcgcgccaccgtggacatgcaacagaaaacttgggacaccttgggcaacttcccctcgttctattccttcaatcaccgtggtcgtgccttaaatcctggatatacgcccccggaataagagacctttcttttaagttctgctatccttttatttatagtctcagcaagttacaatatagataacgctaaagatcaaccaaactccgtaacctgcattcgaaaatttgatggatattgcggaactcttgccttgcaacaaggacaatgccttggcctccagctcatagctggctcttaattcccggccaggactattattgcatgcctgactgtgacaagtgcgacaactgtcgaagtggttactccttaagagacattcgtagtatagctcgggattggaacgacatcctcttacaatttctttactgttgatgtcaaagtactccaagcaggccaattcttgatcctccggctcatttgctcgagccggacaaggcatagccgtttgtcccctggagatctcctcgcagtcctgcactcccctacactgatgacaccagaggcgctcctccggaaatgatcctttgttgcagaaacttccttcgcatagtcgacaactggccacatttgcggaagcacagctgaagtccgatttttggcaacctctcgcagtggtggcgttgttaaaggaaacaaccacacatggtgcagccggttcatcgcattcttcaatgtagatttcgccaggactttcccaatttgcacagcctgctcccgcttgatccgtgctgcattggtagcaccgggtgaaatccttactattacacccagcgccttcatcgcattcatagcacttggtgatttgaggattttccggcggtgctccacagcctcgctgaatactccagttggagtactcacaggagaaacaggaagaggcctcagcggagctacaagtgctattagctatagccgtaatatttgtccggcaaagttcctgatccacggagttgcatgtaaaacacttctgctgcgtaatgcatcctgcgttgcagtggtcactggtattacacttttctaattgctctacatacggctccaaatctgttggaattttagtagaacatcctctgacaacgcggcttagtctgcgaaagctgaagcagtacttatcctcttgctcacccaacagaacatcctgctggcattcctcgtataagctaacattgcacctgccggtgttgacctgaaagagatctatcttgcaaccccggccgattgctgaatcgcaggtggcgcagacttgggtccaagctccttgctcctcattgcagccattgatctcacacagttgggcggaagtggacagcgtgtgattctgctcggaggtacaacctctgtaggcatctgaagaacttatgacatccgtgtagcactgatcctcttccaaatgatagcgacagggttttggtttggatgctggagctgccacgcattcctgtccagcgcaatgatggcacttaagtcgtcccggcggatagacacccgcattgcacaggttcgttgagcaagtctttgagtaagtcgctccgatgatgggggtttctgctccgcagccgcggtatgtaatggagtccactaatttgtgtgcgattaatggtatagaaaatcggagttactaaatatttcaaatatgtatcaatcaatatcaatggtctttacctttgaaatattaatgaattgcaaaaatagattctataaaatggccgactatccgtcgatttagaaacaattacaaatcacatttaggttcacttaccaatggacatggcacacgtcagctcggtagcgcactccttgtagggaagaactcccacttctccgagggtctgggaacattccggcagggcaatggaatcgcagtggtagcaaacaatgccaaaacaacggtctgctattaaaaaaaaaaacccctctaaggttacaacgcatttttccgtgggaaatcgcaggtagctcacatctcaggaggaccaggaaaaggaggagcaggtggtggaagcttgagtggcgatttgtctgcagtccacgcattttgacagctcataaagaatgtagtgcacctttgtttgcaaaattggaatccctaatctgtttatgacttatcagacaatataacaatgagttgatataggcgaactgttgataaggataagctggaaaaagccatttaactttaaaataaccaaacattatcatttaaataaaaagttacactcgctaaatgtgttcttaaattgccaccataaaaaacttacgttggtagaaattcttcaattattttaaggcttaaaatagagagttgcttgatgtcctaacgaaatcctttcgatatagataatttcccaaccacagttgtaaggttacccaactttattccggcatatgcataatggccaaaaatgtcatgaccataatgtgctctgtgccttgaccccattatcggagtgtcccataggttccatcgaaacgttcacatcatcaataatttaagggctcgcatttgttgcgggaaagtctggagctactcaaaagtgtgggtcaagggtccggcgaccgccccaacatatcgatttaatttagagaccggataattgcgtgacaatcagcggattcgagtacacataccacatgtccaggcggcttaatgaccatcgacctcagttgccagctaaacaggcacgggacaagtcgggaataacaaacccatcggtggccagaacggagcaaatacccatgcttgcagagctcttcaaaacggggataaaccgataacgaaagatacattctgataagcccatccactcggcgggttccgttcaagattcattcgccatccgagtcatacactctgcgaagctacaaccgatcggtgaccacgatgcggatgagattgctggtcatttggatttccctaactgctctccttgaatggagcagggcgcaggaggacaacattgaagagttcagcttaagcggcggactagcgggtgaaaagtcagaaaactcaggcattgaagccggtgaaaatgac

SEQ ID NO: 37499 - DNA, 1686 bp, DROSOPHILA
atgcgtggactgcagacaaatcgccactcaagcttccaccacctgctcctccttttcctggtcctcctgagatcagaccgttgttttggcattgtttgctaccactgcgattccattgccctgccggaatgttcccagaccctcggagaagtgggagttcttccctacaaggagtgcgctaccgagctgacgtgtgccatgtccattgtggactccattacataccgcggctgcggagcagaaacccccatcatcggagcgacttactcaaagacttgctcaacgaacctgtgcaatgcgggtgtctatccgccgggacgacttaagtgccatcattgcgctggacaggaatgcgtggcagctccagcatccaaaccaaaaccctgtcgctatcatttggaagaggatcagtgctacacggatgtcataagttcttcagatgcctacagaggttgtacctccgagcagaatcacacgctgtccacttccgcccaactgtgtgagatcaatggctgcaatgaggagcaaggagcttggacccaagtctgcgccacctgcgattcagcaatcggccggggttgcaagatagatctctttcaggtcaacaccggcaggtgcaatgttagcttatacgaggaatgccagcaggatgttctgttgggtgagcaagaggataagtactgcttcagctttcgcagactaagccgcgttgtcagaggatgttctactaaaattccaacagatttggagccgtatgtagagcaattagaaaagtgtaataccagtgaccactgcaacgcaggatgcattacgcagcagaagtgttttacatgcaactccgtggatcaggaactttgccggacaaatattacggctatagctaatagcacttgtagctccgctgaggcctcttcctgtttctcctgtgagtactccaactggagtattcagcgaggctgtggagcaccgccggaaaatcctcaaatcaccaagtgctatgaatgcgatgaaggcgctgggtgtaatagtaaggatttcacccggtgctaccaatgcagcacggatcaagcgggagcaggctgtgcaaattgggaaagtcctggcgaaatctacattgaagaatgcgatgaaccggctgcaccatgtgtggttgtttcctttaacaacgccaccactgcgagaggttgccaaaaatcggacttcagctgtgcttccgcaaatgtggccagttgtcgactatgcgaaggaagtttctgcaacaaaggatcatttccggaggagcgcctctggtgtcatcagtgtaggggagtgcaggactgcgaggagatctccaggggacaaacggctatgccttgtccggctcgagcaaatgagccggaggatcaagaattggcctgcttggagtactttgacatcaacagtaaagaaattgtaagaggatgtcgttccaatcccgagctatactacgaatgtctcttaaggagtaaccacttcgacagttgtcgcacttgtcacagtcaggcatgcaataatagtcctggccgggaattaagagccagctatgagctggaggccaaggcattgtccttgttgcaaggcaagagttccgcaatatccatcaaattttcgaatgcaggttacggagtttggttgatctttagcgttatctatattgtaacttgctga

SEQ ID NO: 37500 - protein, 561 aa, DROSOPHILA
MRGLQTNRHSSFHHLLLLFLVLLRSDRCFGIVCYHCDSIALPECSQTLGEVGVLPYKECATELTCAMSIVDSITYRGCGAETPIIGATYSKTCSTNLCNAGVYPPGRLKCHHCAGQECVAAPASKPKPCRYHLEEDQCYTDVISSSDAYRGCTSEQNHTLSTSAQLCEINGCNEEQGAWTQVCATCDSAIGRGCKIDLFQVNTGRCNVSLYEECQQDVLLGEQEDKYCFSFRRLSRVVRGCSTKIPTDLEPYVEQLEKCNTSDHCNAGCITQQKCFTCNSVDQELCRTNITAIANSTCSSAEASSCFSCEYSNWSIQRGCGAPPENPQITKCYECDEGAGCNSKDFTRCYQCSTDQAGAGCANWESPGEIYIEECDEPAAPCVVVSFNNATTARGCQKSDFSCASANVASCRLCEGSFCNKGSFPEERLWCHQCRGVQDCEEISRGQTAMPCPARANEPEDQELACLEYFDINSKEIVRGCRSNPELYYECLLRSNHFDSCRTCHSQACNNSPGRELRASYELEAKALSLLQGKSSAISIKFSNAGYGVWLIFSVIYIVTC

SEQ ID NO: 37501 - DNA, 2348 bp, DROSOPHILA
acccaatgccaacccatggcccacagtcataaagttgcctgtttgggagtcctgagctcatcatcatcggctcgttgcgtgcgtgcgcactcgactcgcttccagacaatctgtggcctgggccggcttatgaatgatgcacaggctgctgctgctgccgctgccggacgggcaggagtgaacttttcagttcgggacttcaacacttcgattgtcgggctgtaattcaacgccatttacgtggccgcatgctgtcaggaatgattgccgcctgcaccaccgtgggtggtggcgcctcgtctgggtcgttacatcctccacctccactgtcctatcatttccattcccctggcgacgcgtgctgctgcacaaataagattcaacctttgacatagagtccggaaattctttcactagccggctgtcttgatggttggatgcttggctgctgggaagctgggatgctgggatctccttgccaatagccacgggggagctctgaacttcccccgcgaaattaagtccaagtcgctgcgatgatgaagttgcgaaatgctcatcgatctgtgtggctactggtctcccacatatagtaaaaggttctattataggattgacttaaatcatctccctgtggtagcttacgtgatatggatcgttagcaggacataaaatttaaggcaggattaggattttatattttattatccataaggttcagtctgtattttgaaccatttgcttgatagcaaattattgttatagatatatgccaatgtaacatagttttgactaaataatagcttctaatatttgtatcttatctagttaagacttacatattgaataatcagttcaataaatcacttcccacttgatctttgaaacagagatcgaaatatctgtgtgtttgctttaagtcacctacatccagacctacaaatacagcccccgccctatagttcacccaaatagggatccacttccgctcttggaagccatggcgtcaaacactgtgcagatgaccttcgatcggctggttcagctgccaggcgtgacgggggcaatcctgatcgatggcaatggagttccggtgcggaccaatttgccagcgaatgtggcccgcatatacgccgatcggatgaggccactggtgattctggcccgatccatggtgcaggatttggagaatggggacgagctgagttacgtgcggctgcgcacccgccgccaggagacgatggtggccaccgagaacgagcacacgatcattctgatccaggacaaccgtgtgctcgacgaatcctggaggagcagtgtcgcctcgcggagagcctcggcgctctaacggcttcgagttcagtagggatcgtaaaccagctgcgccagcgggtaacgaccacgtcctgatgtcctggctgagagaagtccttgcacggacgagctcacaaatccaaagtacagagctgaaattgtgagccgggacattgctgtgctggaagagcacgcaaaaataaaatccacatacaggcggggtaaattgtgtttgcgtaccctcattgggagtccagtaggctgttgtcgaaggtcgtgtgcctccaaattgttgtagatatcagtaagtaacagcaatacaaatattttattattatggtttggcaatatacgtaatttaaacattgatatattagctacacacccggaatatatggtttgaatttgaaaaccttgtagtatatggccgtaagtgatcctcgtagctttaccacttggcctagccgggattgggtatttctggattcggtctgcaggaaaaggaggaacacatccttccatcgagttcgtttcgattgctggcaacaaccggctgccgtcacgccatcaagcattcatgccaacagcaacaacagagtggatagaggggggatggcaggggctgaaggacccgcagagcagcctgtcgcctgcacacttacacatactcgtgggcacgcacacaccctcagcctcagcacacttacacagcaacacgccgggctttacacgcctccgcacgcgtcacacgaaagcacgaaaccaatttaagcacccacattctctcacccaattagtcgcacacagttcacccactcccacacccacccacaccacatccatatccttgtccacatcatggcatgacctcctcccactcgctcgtcccgcccacgcacactctgtcgagctggttgtcgtcctcgtcctcgtcctcgtcctcgtcctcgagtcgagcagagtcgagtcgagttgagtcgagtcgttatcctcgcgtgcgcacgctgcatgctttctggctgagctcgactact

SEQ ID NO: 37502 - DNA, 348 bp, DROSOPHILA
atggcgtcaaacactgtgcagatgaccttcgatcggctggttcagctgccaggcgtgacgggggcaatcctgatcgatggcaatggagttccggtgcggaccaatttgccagcgaatgtggcccgcatatacgccgatcggatgaggccactggtgattctggcccgatccatggtgcaggatttggagaatggggacgagctgagttacgtgcggctgcgcacccgccgccaggagacgatggtggccaccgagaacgagcacacgatcattctgatccaggacaaccgtgtgctcgacgaatcctggaggagcagtgtcgcctcgcggagagcctcggcgctctaa

SEQ ID NO: 37503 - protein, 115 aa, DROSOPHILA
MASNTVQMTFDRLVQLPGVTGAILIDGNGVPVRTNLPANVARIYADRMRPLVILARSMVQDLENGDELSYVRLRTRRQETMVATENEHTIILIQDNRVLDESWRSSVASRRASAL

SEQ ID NO: 37504 - DNA, 2348 bp, DROSOPHILA
acccagatactcgcacttgaacacacgcagaggagctccaataaaggcggagtggagcactgtggggaatttcacctgatttgttggcaaaaatgttattttgtaaaattttgaaatcatttataattgtttttctcgacggattaggggttatgttatgtaacgcaaatgtaaaattaacagtccaatgttacaaaataacagctgtaaaatcagcttttgtaaatataaagcacgtggcgtcggtgattttccttttgtagtgattacttaaattcatatatgtatgtacatattttcaaccacaaggccttaacaaatcaaatttgaattgaattctcattcctcaggtgtgtactatgtgtttttactaatatgttgcttattttgggcgtgtaaacttaaataacaatttgtgtattaatcaagtgatgtcctcgaccaacttctagaataaaatttcaacttttaatatagttaaaaacaagagaaaatactatagtcaagtttcccgactatcagatacccgttactctatctagtgtgaatgcaaacgagaaatttcataagttttctgggatatcttttttgaaattgttcaaaagtgggggcgcgaccggcttggtcgttttgtaggttaaaggaggggcgtggataccgtgttttcggtatacagatcaaaattggcgatacaaataataaaacgaagaaaaatctaaacacttttcaaaagtgcgggagtggcagttttggactgctttaaaatgggagtgacaaaaagttttttcgcaaatcgcaataaaaatttacagtaacgaaatctacgagcaacgggtataaaatatatacatatatgcactgcatttaccttcaaaataaagagctcactttcgtaatttttcgaattggttggtacagctgctttcaaattttgtaactatttaaagatttcaaaccacagagttatcgacattggaaaaggactgacaccttgaacaccatgtgttttaatgtactgggagtgagcaatctgctacccgattgcagcattgcaaaccgggtccatctgttctctttgctgcagcaactccagaaccaggagcgtcgtccggaggaagtgagtgacgagttgcgggatcgctacaacgtatttcgccaggttttgcccaactacccgccaccggaacagccagacgacgatatgctagcaaactttgatgagttattccaggagcagctttcaatatcgatcttcacagacactgaatcatccggcgaggagacctgcgaatccagtctggatagtgactccgagcagatcagcatcgggatggatcgtcatcattagaccacattcaattaaaaagtgaaattatgtctttcgtctaatgtctgccaagtggtcgagtaaatgaaagtaaaacgtagccactaattgttcgacaataaaaaagagtaaattcagcataaaattatttttcatttttattttaattacaatttggtagtcagtggtactagcaaggaatttaatgcgcgtttgtcgcgcttgttgtcctgcctaaaacactggaaccggctggccgtttgtccagtgaaatgagccagcttatcaaatctaaacaagaaatagataacgatatatttatttatgccaataaaacaggtgaaattacccatagtgcggcgtattgtacgtgctcttacaccgcacagtgtggcgcacttccttttgatttagtcatttttctctctttagccgacacaacggcaggagcaggtcgtgtcatggccctctgccaccagctcatgctacgcctcgtgtccttttcccctccgccacttgacaaactgccttccccaaccgccaccgaaccagcaaaccaacccgcccaccgcaccgctcgttcgttctggctgtcctgtcctgtcctgtgctgcttccgttgccattgcggcatggagcgcacttccgaagcttttcctgtggggctttcccttcactggtgcgccagtgcgattgtctgtgtgcgagcgagtcctttggtcctttttcccccgcagtttgattttcagttctgttttgccaccaataccttttcgcattgttattgttgttctcgctgccggtactgagcacgagatccgtctccagcctgctcctgccactgccaccgctcccttgtccttccgcccttcatccgttcccctttcgccgggctccggttgccactgctgtctgcgcttaacttgccttttatacctttgactccgactaccagtcgcagggaatgcacagaagcaaatttttctttaagggcatgttcattatattaataaagtagtta

SEQ ID NO: 37505 - DNA, 348 bp, DROSOPHILA
atgtgttttaatgtactgggagtgagcaatctgctacccgattgcagcattgcaaaccgggtccatctgttctctttgctgcagcaactccagaaccaggagcgtcgtccggaggaagtgagtgacgagttgcgggatcgctacaacgtatttcgccaggttttgcccaactacccgccaccggaacagccagacgacgatatgctagcaaactttgatgagttattccaggagcagctttcaatatcgatcttcacagacactgaatcatccggcgaggagacctgcgaatccagtctggatagtgactccgagcagatcagcatcgggatggatcgtcatcattag

SEQ ID NO: 37506 - protein, 115 aa, DROSOPHILA
MCFNVLGVSNLLPDCSIANRVHLFSLLQQLQNQERRPEEVSDELRDRYNVFRQVLPNYPPPEQPDDDMLANFDELFQEQLSISIFTDTESSGEETCESSLDSDSEQISIGMDRHH

SEQ ID NO: 37507 - DNA, 2683 bp, DROSOPHILA
tatgaacgccccattatttacttaacataacttgaacattcgccttcaaccccccacaaaaaaagaaaagaaaagaaagctcttcaagggggagcatcaaagttctaaaaaaaaaaaaaggaaagagaaaaaggaaaattcgaaggtgggtggttagaaaatggtggggaggtcgtcgcttggcttacctgccaaccaaccaaccagccagccggcagttggctagtcaaaaagctgtcgtcgatgctaagcgcagacccagaaagtcatcaaatatgcagaaggtggaaatgtgcagggaggctccaccatttcactaccatttgctatcccaactccccgtcaaccgaaaacggaaaaatggcgaaaaaatgatttatgtggacgccatggaggaacggagtggacggcaacgaaaagccaacaataaccgggaaaaataacagaatcaactgatttctcaacttggctctgagcctgcttttgtttgccagactttcgacggagagtgcggagcggggggccttggatagacccacaattttaccttccattcgggacttcattcttgtttttgccgcaatgaaaaatgctgaaagtgtgctccacagacagcggactccaatggtattggggtcaccgagaaggtataagatattgatgtacccaggggagctgcttttcctgtacagctctatttttggaaaaataacaagatcctcatagagaagctgcatgggatattagttttcatcggaagctctatttatgcagtaagctttcatatatatgtatatatgctctaataataaacaaggaagccctaccatatttgtcaaattcaactcgataattcatttacattccgttccttaaacatataacaaggacaccaatttcggtccgaaattcaaaattcaaaaaaaaaaaaaaaggtgaggacataaattatttcaatatagcttttctatatagtatatatacttcttttcacacagatgtccgatatcaatttgactgcctataacgcctttcgccgcgatttggccaggatatacaagacattcagttcgtatactcaaaccgattttactgaggattatggcaccaacacagacttcgattgcccagccgatgtggaatcaaatctttccaaactttacgatctcgaactggaatagtagttgcatgtggtagaagagagtttatccgattgagatggagaacagggtcaagggaacgcactcggagatctgtatggaatctagcagaataaggcatctgcaaccgctcagatcgcgatcccaggataacggaatcagattattagccgcaagaagcgatttggcgatgacaccatggtctctaccatcggaatctccatctgaatcggatgaatccgaatcccaaatctcaggttacaccacagagagtagctaccgaacggtgcctggttacgagctcctttcgcaaagtagttcgtatgccagcagacaaaatccctacgcgtatccgccagcggacttcctctgggagatctacgtgcccatccatagtggagccactgaggaggacatccagaccgttcatggggagttgcgggaattgctggccagcgagatgcatttaatcagaggcgcaaatggaccagtgatctatctaattgcatacagctacatgtgatcacttcttacacatttaaaatatataaaccacaataaaaataattattcaatccccatttgcagcatacagatttattattccatttaatatatttttttgagttataaaaatattgacctccggcaaatccagtccacaaaacataccaatatcttcaaagcgaattgagctcttttaaaaagtcatctacttaatcactttttcgactacaaatgatgggcttgccaaacttcgttcagccttttcaatggacaatcagttctcgagtgaagtgtttgcttgtactgcgtgatctgcgcctgttgacattatgacaaattacataagccaaaggcaacaattgccggaacccattccggaaacgcggggaaggaaggaaagagggaaggaaggaagggggaacaaaccgaaaacggatacgcttagaaggacttggagtggtggggggttttagggggtggttcgggctgtaggcacgttaataggaaagccacacaagaactgctaacgaaggacacgcggccggcggttgagcgacaagtgcgttgggaagaattccagtcacacacaggacacaaggacaacgaggtcctggcagcggggtggatcgtctgtttgccgagcactaagtgcgccgggcaagtggaaatgataaacatatttacacaatttttgacgggcgaacgggtgaaacaaaacacccgtgggtacagtcgtacccttcaccccttccccctctccctccaccacaccctccccgcagttttcccatttcttcgcttttctggtgcgcgtacgcacttgaaacaagcgaaaggaaaaccaaacccaaactcgataaatatgtttatgtgcaaataacaaaatatttgtcgattgcccgaaacgagtgatgggcggggtgatgggcggactttggcttcggggtagggcaggctctaaaggcagaggcagctccagggttttcaggggttccaggggttccatgggttcgaaa

SEQ ID NO: 37508 - DNA, 683 bp, DROSOPHILA
gtccgatatcaatttgactgcctataacgcctttcgccgcgatttggccaggatatacaagacattcagttcgtatactcaaaccgattttactgaggattatggcaccaacacagacttcgattgcccagccgatgtggaatcaaatctttccaaactttacgatctcgaactggaatagtagttgcatgtggtagaagagagtttatccgattgagatggagaacagggtcaagggaacgcactcggagatctgtatggaatctagcagaataaggcatctgcaaccgctcagatcgcgatcccaggataacggaatcagattattagccgcaagaagcgatttggcgatgacaccatggtctctaccatcggaatctccatctgaatcggatgaatccgaatcccaaatctcaggttacaccacagagagtagctaccgaacggtgcctggttacgagctcctttcgcaaagtagttcgtatgccagcagacaaaatccctacgcgtatccgccagcggacttcctctgggagatctacgtgcccatccatagtggagccactgaggaggacatccagaccgttcatggggagttgcgggaattgctggccagcgagatgcatttaatcagaggcgcaaatggaccagtgatctatctaattgcatacagctacatgtga

SEQ ID NO: 37509 - protein, 154 aa, DROSOPHILA
MENRVKGTHSEICMESSRIRHLQPLRSRSQDNGIRLLAARSDLAMTPWSLPSESPSESDESESQISGYTTESSYRTVPGYELLSQSSSYASRQNPYAYPPADFLWEIYVPIHSGATEEDIQTVHGELRELLASEMHLIRGANGPVIYLIAYSYM

SEQ ID NO: 37510 - DNA, 3248 bp, DROSOPHILA
atcatcatgatggcgaggagcatgaacatggtcacagccacgatatgagcattggtctgtgggtccttggaggaatcattgccttcctttcagtggagaaactggtacgcattctaaagggcggtcatggaggacacggccacagccatggagcaccaaagccaaaaccagtgcctgctaagaaaaagtcctctgacaaagaagacagcggagatggagacaaaccggcaaagccagccaagatcaagtccaagaaaccagaagcggagccagaaggcgaagtggagatttccggctacttgaatttggcggcggactttgctcacaacttcaccgatggcctggccatcggcgcctcctatttggcgggcaacagcattggcattgtgaccactatcactattctgctgcacgaagtgccccatgagattggtgactttgccattcttataaagtctggctgttccaggcgaaaggcaatgcttctgcagctcgtcacagcgctcggagctttggcgggcacagcgctagctcttctgggagctggaggcggggacggatcggccccatgggtcttgcccttcacagccggcggttttatttacatcgcaacagtgagtgtcctgccggagctgcttgaggagtctacgaaactgaaacagtcgctgaaggaaatctttgcgctgctaaccggcgtagccctaatgatcgttatcgccaagttcgagtaatatcaaaattgtggaaagttaacacaaaaaagatctaattgcatgtactgaaagtgtgccgcaaacaatttgaaagatttctgttcgttacctactcaaaacgatgagcaactacttaaatttcttatatttcaacagtcagtaaccgctattagttcccaatataaacaatgcggcgttatttaagattttttaagccttccaaatttgtgcttcacttcgaaatgaaatttttataaatagtcaaaattacactgtaaaaagaatcctcactggcgcttctctccattcagggttgtctttatctcgttgagacaatactcggcctgctctacggcatcgggattctggtgttgctttcccagtttccacgccagtcggcaagcgttctccgcctgcgacatcaggccctcgcgaagatacaccaaacccagatttgcctgcagaatgccttcctgggtggcatcctttagctccttagtcagctccatggcctccaaaagggtctcccttgcctcggcgtacttttccagctgtaattagtctaatgtgtttcaagtactttggaagaatagacgcacctacgtttacgtacgccacactgatgttatttaggatggttacagaggcgtcgttaacggcaccataaacatttatgagcgtgtcgaaggcctccttaaagaggtttttagcctccaggtattttccctgcttcatcagcagctgcccgaacctggaaaataaacataaggaaaagtattgaaaaaaggcttggttagcggcaatggaaacaccttcaataccaattctttgtcaagccatacagctccagtatgtccttgtcgtcgggcattttctccagtagcttagccaactgctgcaaggtccaagtgaacccttgaaagctcttttccagatccccttgcagctgagacatgtgtgctatcttggagctgatgtgaagtatctaaagatgaaagagatcttaactggttatggtgtctaagtgggtcacccaccttgggactctcttcggtgtgaccctcggcaaaaagccgtttcataacgtccgtgaatatcttctccgccttcttaaactgctcgcgttccatggccaaattggccatcagatcaaacacatatgtgatgccgtccttgctctgaatatcctgcgccattcgcagagccaggtgaagcatttgctcggccttgtcgtactgttccctctgaatgcacaggattgatcgtttgatggtcttgatcagtttttcctccggagtttcctctttttcgtcggcgccaccaaacagattcagagtgaaagcagcggaaaatgcccaaaacattccaccggaagagccagaagcgggcggagctgcccaggacacctcgtagcccgcagcattggagcacagcggtcgacatccgaattctgaccgttggtgataacggcttctcttcagcggcgcaagatgacagtaatctctgggattcacgacaacgcggaacctgcccataacttgcgtaaacttgcaaatatttctcactaacatgtttagggctttattaattatttaactaaaacctataatgttgcaggtatggtattaaaaattatgaaatagcacgtatgtagtgttgcaaagcgcggtaaagacgttttaaaagtacatttcgtaacgcttgattaagaacatagaagacttttaaataatttctactctatcatactttcgcaaatatatttatgtttcgttaagatttcgtaaacaaaggtttttaaattttttagagatgacactgtcaaacaaaactttatcggcaactttggtacctaacatttcgttcataagttaaatctgcgaacaaaaataaattgataagtagagttattaacaatctcgaataaaaaacatttaagtacatttgataaagtttttcgtaataaggtacttccttcccccatcgcatacgatactatcgatagccgtcagcggggcgatagaccgagagaaagcatccctgtatattgatggcggattgacgctctttcgcctagtaaaattatttttcttatcaagaaaaggtgcagaatataacgaggagtgaattcgcaaagcagtgcatgaaatagctgtgggtccgccggctgtacctacgttttatttcagatctttccagcgtcgcagcgagtttccagcgattttcggacagccatgagacgtcgcagcgagcgaaaaaagtcgtcgtcgcccgctccggtgccggtggcagttgcacggagaagtcgccgctcccgcaaggtgtcggagaacgagaagaccgaggtcgagactccggtcgtggcccaaaataatgaggccgaatgccccaaagtaccgccagcctctcaagaaatcaatgaggcgcgggcatccagtgaagaacgtgccggatctggagcatcgccagtgcgcaggagtcgcggcagccggacgacgcctagaaagcgcacggagtccaagggcggcgacaaga

SEQ ID NO: 37511 - DNA, 1074 bp, DROSOPHILA
atgggcaggttccgcgttgtcgtgaatcccagagattactgtcatcttgcgccgctgaagagaagccgttatcaccaacggtcagaattcggatgtcgaccgctgtgctccaatgctgcgggctacgaggtgtcctgggcagctccgcccgcttctggctcttccggtggaatgttttgggcattttccgctgctttcactctgaatctgtttggtggcgccgacgaaaaagaggaaactccggaggaaaaactgatcaagaccatcaaacgatcaatcctgtgcattcagagggaacagtacgacaaggccgagcaaatgcttcacctggctctgcgaatggcgcaggatattcagagcaaggacggcatcacatatgtgtttgatctgatggccaatttggccatggaacgcgagcagtttaagaaggcggagaagatattcacggacgttatgaaacggctttttgccgagggtcacaccgaagagagtcccaagatacttcacatcagctccaagatagcacacatgtctcagctgcaaggggatctggaaaagagctttcaagggttcacttggaccttgcagcagttggctaagctactggagaaaatgcccgacgacaaggacatactggagctgtatggcttgacaaagaattggttcgggcagctgctgatgaagcagggaaaatacctggaggctaaaaacctctttaaggaggccttcgacacgctcataaatgtttatggtgccgttaacgacgcctctgtaaccatcctaaataacatcagtgtggcgtacgtaaacctggaaaagtacgccgaggcaagggagacccttttggaggccatggagctgactaaggagctaaaggatgccacccaggaaggcattctgcaggcaaatctgggtttggtgtatcttcgcgagggcctgatgtcgcaggcggagaacgcttgccgactggcgtggaaactgggaaagcaacaccagaatcccgatgccgtagagcaggccgagtattgtctcaacgagataaagacaaccctgaatggagagaagcgccagtga

SEQ ID NO: 37512 - protein, 357 aa, DROSOPHILA
MGRFRVVVNPRDYCHLAPLKRSRYHQRSEFGCRPLCSNAAGYEVSWAAPPASGSSGGMFWAFSAAFTLNLFGGADEKEETPEEKLIKTIKRSILCIQREQYDKAEQMLHLALRMAQDIQSKDGITYVFDLMANLAMEREQFKKAEKIFTDVMKRLFAEGHTEESPKILHISSKIAHMSQLQGDLEKSFQGFTWTLQQLAKLLEKMPDDKDILELYGLTKNWFGQLLMKQGKYLEAKNLFKEAFDTLINVYGAVNDASVTILNNISVAYVNLEKYAEARETLLEAMELTKELKDATQEGILQANLGLVYLREGLMSQAENACRLAWKLGKQHQNPDAVEQAEYCLNEIKTTLNGEKRQ

SEQ ID NO: 37513 - DNA, 2396 bp, DROSOPHILA
agcggcgcgtgtccctgtccgatgtcatcttctccactctcgacgcgactcaacgcgactcgacgcgactcgactcgactccaatccgcagtcagttgtcaactttctgggctggcttttagtccggggattgccgattgatttggcgtgggattttcgagtgcggcacatgtatgaaacgaaatcataaatgtgacaggcctggatcataagcaactcgcacaaagaaatccctttgaccatccttgagccatctcaagcagcaataaatcatctccttcggagccattcaccatgcatatatcctcaaagaaaactttctgccggaactttgccagttatatatattgcaggaagtcccctcggaccatacatttattccgtggcggagtgcataaaaaagcaggcggtccaaccgagcagccgcaacactgagccctcctaaaagggcattcgaaatgagctgctcggagatgtggagatgtggagatgtgaagatggtggtctgccaccgggaaagctttcgtatttaattgaaaaacacttaagccccagttcggaggagccaaagccaaagccaggccaaccgcaaggctcttatgtgaccctaaaagaccgacctcataaccccaactcatcttcatcacaagacctttctggtcgctcataaaaacaaagggcgagcgcaaacaaaaactttgcataattaaggcgcggccaacacatgggcaaagtgtattcaaagggttaacttacagcagaagtgaaatatacggttttaacatgaaaactgtattctcaatatttactaaagcaaaattaagaaaccacgatattttttaatgtaaatacgactattctctctttcatttcaaaaattgataaattgataaataaaattcaaaaatgtaatctaagtttgaaaaccaaacattttaataatatactattcttggcaaacatttttgttcactgtgcaggaaaatctcctaggcagccttcagatggacaggactgaatcaaagatggcatgacttggccacttaccctcgagcgcccggttcctggaaattaaggcgagcaccagttcgggatttgggtcatcctggtcgacagccaggtgattgtggtgcggatgttgctgctgctgttgctgcccaccgaccaggtgagatgcctgcggcgtgggtggcaattgttgctgctgctgctgctgctgatggatatgcggctgatgttgctggtgattatccatggctgacaggtgctgttgctgctgcaacggatgttgcagctgctgatgcggatgtggctgctgctgaggcggatgctggagctggtgctgatgctggtggtgatgatgtagcggtggcggtggtttcagggtttgcatcattgctgaggggccggcgatttgaacacgcgtcgtatgagttatatgtatatttcagttagcttattccaattggcacacgtttgtatctttagccctgtttggtgtttaaaaagcaatctttgtgttagtttaccgcactcgtttcccgtttagcgtctaaacgagactccgctaggcgggatcgctgtctgctcgataactggcattggtttgtgcccaacagtggcccggttgactgtttttcccttatcgcggcggtctctttgggtttcggtttctacggtagaatctagattccagtcttgccactcggttgggctcgtgctcagtgctcggctgctctatcagttgaagtagccagggacttgaacaatttgaatttgtttgcgataccggggcacactagaccatctattgttcgggtgctttcgaccaagtgcaaggcgggtaaactttatgtaagccgaggatagggccaaactgatcggtagatattcaaaagaccgtttggcgcatatctattcatcgtctatcacgaggagaattctcgtgcgaagacaacaaatcggatgtgcactatactatctatcaaaaaacggtcaatgtccaaggtttttttatcaaaaacgaactgctaatggttcccaaatcaaacaaaatagttaaaaaaaatttttgtgaaatattataacgtagaatatttgatagcaaatatccatttaatagtttatcagtatttgaaaactagttaagattgaagataatttattttatagaaattcaaacaaacaaaataggtaaacaatttattttttgtgaaatattaaaacgtagaataattaatcggaaatttccatttaatagttcttcagtatttggaaactagttaagattgaagatcatatataaatgaaacaaaatactatgaaatttattttatagaaatttaattttaggagcaaagctcctaagattaaattgaaattaaaatggctaacat

SEQ ID NO: 37514 - DNA, 396 bp, DROSOPHILA
atgatgcaaaccctgaaaccaccgccaccgctacatcatcaccaccagcatcagcaccagctccagcatccgcctcagcagcagccacatccgcatcagcagctgcaacatccgttgcagcagcaacagcacctgtcagccatggataatcaccagcaacatcagccgcatatccatcagcagcagcagcagcagcaacaattgccacccacgccgcaggcatctcacctggtcggtgggcagcaacagcagcagcaacatccgcaccacaatcacctggctgtcgaccaggatgacccaaatcccgaactggtgctcgccttaatttccaggaaccgggcgctcgagggtaagtggccaagtcatgccatctttgattcagtcctgtccatctga

SEQ ID NO: 37515 - protein, 131 aa, DROSOPHILA
MMQTLKPPPPLHHHHQHQHQLQHPPQQQPHPHQQLQHPLQQQQHLSAMDNHQQHQPHIHQQQQQQQQLPPTPQASHLVGGQQQQQQHPHHNHLAVDQDDPNPELVLALISRNRALEGKWPSHAIFDSVLSI

SEQ ID NO: 37516 - DNA, 3566 bp, DROSOPHILA
catttttgagcacaaccaactgttttttttttctttgaattacatttaaactcgtcaagaagaaaattaaaatgtaatcataatcgtacttaattgaatacgatgtaattgaatgtgaacgttattaactcattaactattattactaactaagattccaactgtatgcgcattttatatataaacctatatatataaaacattaaggcaaacccaagataaaaactcattaatgtaatgtgtaagagaaacaaaaggtacttacggtaaattatatatgaatatttttatacatgtggaaaacgtaaaaacagagaagaaatcataataatttattaaaagctgaaatttgctagctagagtggcgagttcgggaatacctatttgaatttgatatgacaacagattttaaactgtgctcaaaatggcaaatccaatccaatggcaaagtcgacagcgtcagcgagaatttttgaaatataatatgagaaggaaataaaagtctttttaatgcttaggggccacaattttcgaagtaattaaaaaatgaaaaaaaaaaaatgaaattattattatattaaaatacggtattaattaacatttaaaaaatgttgtgtaacattaatattaaaccaaccaacaagaacaaccagcaacaacaattgtattgtaagaatttctatttccattaaacaacaataaaattattttgtttttaaataactcgaatgcgttttattattcgatcagtgagttttggcaagtttttgctacttggcaagcataaatgacttaaatgactttcttacttaatatatttagatctttgtttgtaaaatttgagattgcacattcctatctgatgccagcttaaaggtaaaatatattatgattataatcatgctaaaactagttttctgttgttccttttggtaacttttgagtcctgaaaataaagcatttaaataaatcgaataaactagattttctttactacaactcacataacgcgaagttcatccaacgttggaacattgaggcgagagggcaaccgtgctccatcctcctgctgaacttcctgcggatgtttcttgagcttgtgcgaccggcaattggcattacaggcaaaggacttgccacagtagttgcaaacgtacggtcgcagccccgtgtggctcagcaagtgggtcttgagagtctttgagcgcttgaagagagcgccgcagacatcacacttcaggcgccgctcctcggtgtgcacgaccttgtgcatgttccaggtgcgacgcgtttgcagcttcttgccgcaaatgttgcacacgaaactgggctccgcatggatttggtagtgggccttcagccgagcccgattcttaaagcccgccttgcagacggtgcactcgaagggacggctttccgtgtgaaccagcttgtgttcatttagtgctgttattgtcttcagttgcttgccgcaactatcgcagatatatggcttgacattctggtgtatgccctctttgtggagcttcagcgctgtggcggaggatagcgttttgttgcaaatatcacaggttgttgttgttttgtccactttcacacgccgctcgatccggcggcactcgcgttccaagtgtttctcgtatgaagcgcggtttctgtagaccttgccacatttctcgcagtccattcgaccccgtttggccttctcctcggcagttgattccagagtatttggcgtggttgccacagcgacgagatccattagctggccatctacgggcaggaaatcgtcgtctccttcacagctgtcaagcatttctgatttgacatcattctccattgaggccggagaggttgtgctgtcgaggcgcggttgcgatagttcctcctgaggcagttcgtctagcacatcctccatgtccagttgacttgtgttcttttccaacagaatgggacctaagtcgatgaattcttgcttgggtatctccatttctacgttctttttggtttgaattaagtgggttgttgttgtccttttcgatatttccatttcttggctgcttgtctccgccaaaggaaagtcctttaatagttcggcgggtttttgataaacattatcggactccatttcaagagcaggaattggctttataatgtgcgtccagtcgtcatcgcacagtccaaactgctgacgcagtgcagccacgtccatttcctggtccccatctgtttctgttcgccgcaggacctcaaagatgtcttgcactttggtcacatgctctgcaaaatcgattagttcgctaataagcgtatagcactccgtacacagcacgctgcttagctcgtcctccagttgcatctggcgaaaaaatatttcacataacagttactgaagcatatgtttcatatcacttacttgcacttcgaagtacttgcgaatggccattatcaggacattgtcccagtttccctgagaattctcattcatttgcaccttcacattgccgtgggcgtcgtccttggcgcacaggcgacaccagttcaaccagtggctgccgtccgtcatcttggcaatggaaccaagtggtcttatgggaacaccttatcgccgagaattagcagtttaattgtttacttttagtccagatttgattctttttcggggcagtgtgaccagatacaagttgtcgcaatcaaaccatggcaaattcttaacggcattttcgtttaacccttatgttaaacacaacacccaataagacccattcctgcagaccgtcgatttcaacttaattattattgtaatgtactagcaaatgaagaacaaactcaacccattctagtagattgtgcccatatgaactatgttgtgatatagttgggcttcaaatattgaataatcttaaaactggtatgaattgaattttattcctgcgtgctacttatccctcgttaggatacaatggctgcggggtaacaaggcatatcctccgttaggtggagtaagagtcattcctctcgcatctcctgtaagcgtctcgtgtccgtgatcttgactaaatggccctataaatgaatgttctacatttagccttctcgtcgatgtttgaccactaaatgaatacagaatttaagattacaatttgttcgtttggggtatctgttagtttatttcagtttttagttgtagacttgtgtaataattttggtgataatcagcaacggcatccagggctgctactgcatcccggaatgcaactacctcggcaacatggcactgcagcagttcccgtccagcagttgaaacaaaagttggtgcactggatgcaggagggcaggttgcagcagcctccaggattgcagcacatcttggataggattaggatatttgggtggaagtcaatggatggagagaatccacaaagtaaacaaggatcacggatacgcactcactcgagaaccgaaacgagaatattgtctggaaaatgtgtttaaattgagacttagatgaattttatttaaaatatatttagactgaccacgacaagaaatttatttccaaaagg

SEQ ID NO: 37517 - DNA, 1509 bp, DROSOPHILA
atgacggacggcagccactggttgaactggtgtcgcctgtgcgccaaggacgacgcccacggcaatgtgaaggtgcaaatgaatgagaattctcagggaaactgggacaatgtcctgataatggccattcgcaagtacttcgaagtgcaaatgcaactggaggacgagctaagcagcgtgctgtgtacggagtgctatacgcttattagcgaactaatcgattttgcagagcatgtgaccaaagtgcaagacatctttgaggtcctgcggcgaacagaaacagatggggaccaggaaatggacgtggctgcactgcgtcagcagtttggactgtgcgatgacgactggacgcacattataaagccaattcctgctcttgaaatggagtccgataatgtttatcaaaaacccgccgaactattaaaggactttcctttggcggagacaagcagccaagaaatggaaatatcgaaaaggacaacaacaacccacttaattcaaaccaaaaagaacgtagaaatggagatacccaagcaagaattcatcgacttaggtcccattctgttggaaaagaacacaagtcaactggacatggaggatgtgctagacgaactgcctcaggaggaactatcgcaaccgcgcctcgacagcacaacctctccggcctcaatggagaatgatgtcaaatcagaaatgcttgacagctgtgaaggagacgacgatttcctgcccgtagatggccagctaatggatctcgtcgctgtggcaaccacgccaaatactctggaatcaactgccgaggagaaggccaaacggggtcgaatggactgcgagaaatgtggcaaggtctacagaaaccgcgcttcatacgagaaacacttggaacgcgagtgccgccggatcgagcggcgtgtgaaagtggacaaaacaacaacaacctgtgatatttgcaacaaaacgctatcctccgccacagcgctgaagctccacaaagagggcatacaccagaatgtcaagccatatatctgcgatagttgcggcaagcaactgaagacaataacagcactaaatgaacacaagctggttcacacggaaagccgtcccttcgagtgcaccgtctgcaaggcgggctttaagaatcgggctcggctgaaggcccactaccaaatccatgcggagcccagtttcgtgtgcaacatttgcggcaagaagctgcaaacgcgtcgcacctggaacatgcacaaggtcgtgcacaccgaggagcggcgcctgaagtgtgatgtctgcggcgctctcttcaagcgctcaaagactctcaagacccacttgctgagccacacggggctgcgaccgtacgtttgcaactactgtggcaagtcctttgcctgtaatgccaattgccggtcgcacaagctcaagaaacatccgcaggaagttcagcaggaggatggagcacggttgccctctcgcctcaatgttccaacgttggatgaacttcgcgttatgtga

SEQ ID NO: 37518 - protein, 502 aa, DROSOPHILA
MTDGSHWLNWCRLCAKDDAHGNVKVQMNENSQGNWDNVLIMAIRKYFEVQMQLEDELSSVLCTECYTLISELIDFAEHVTKVQDIFEVLRRTETDGDQEMDVAALRQQFGLCDDDWTHIIKPIPALEMESDNVYQKPAELLKDFPLAETSSQEMEISKRTTTTHLIQTKKNVEMEIPKQEFIDLGPILLEKNTSQLDMEDVLDELPQEELSQPRLDSTTSPASMENDVKSEMLDSCEGDDDFLPVDGQLMDLVAVATTPNTLESTAEEKAKRGRMDCEKCGKVYRNRASYEKHLERECRRIERRVKVDKTTTTCDICNKTLSSATALKLHKEGIHQNVKPYICDSCGKQLKTITALNEHKLVHTESRPFECTVCKAGFKNRARLKAHYQIHAEPSFVCNICGKKLQTRRTWNMHKVVHTEERRLKCDVCGALFKRSKTLKTHLLSHTGLRPYVCNYCGKSFACNANCRSHKLKKHPQEVQQEDGARLPSRLNVPTLDELRVM

SEQ ID NO: 37519 - DNA, 2510 bp, DROSOPHILA
tgactaaatggccctataaatgaatgttctacatttagccttctcgtcgatgtttgaccactaaatgaatacagaatttaagattacaatttgttcgtttggggtatctgttagtttatttcagtttttagttgtagacttgtgtaataattttggtgataatcagcaacggcatccagggctgctactgcatcccggaatgcaactacctcggcaacatggcactgcagcagttcccgtccagcagttgaaacaaaagttggtgcactggatgcaggagggcaggttgcagcagcctccaggattgcagcacatcttggataggattaggatatttgggtggaagtcaatggatggagagaatccacaaagtaaacaaggatcacggatacgcactcactcgagaaccgaaacgagaatattgtctggaaaatgtgtttaaattgagacttagatgaattttatttaaaatatatttagactgaccacgacaagaaatttatttccaaaaggtgttggtcattgggattcctgttcctgtgttactttagatgtgttcaaaccgaggctgggggaaagaatgaatgtgatcccttctcgacatttggcatctccaaaactgttgacagatatccaattcaaagactactagattgattggctgttaatttgtctctttgaatatctctagaagttatgacagtcaaggaaaccactggcttaatttaaaacaccgaatttgtatagtgtctgttgacggcagccaacgtagtgacgaagcgcactgggaggatgtgcgaaggcgacacgaagttgtcggcagatcataagatcaaaccattctcaaattgcaaacgactttgctcgcatttgaatctccattttttccccacgaaaatataaatttcgagatcggactcgtctccaaatcaagcaggtttcaccttgagtacgctaaagcacggcgtcgaaatatagaattcatctttgacacaatctattaacatttataaaattcgtttattgggacatgttgggtatctacgagtgtttcaggtacaatatggttgaacgtgtttcggcacctggcacatccccacttcagcaacagcctcttggtccgcagggcataaatgagcactggatgtaggctggggtgcagggtacacagcagagttccacgcagcagttgtagcatccgccgcacggatcgcagcagcgaggtccacagggtccgcagcacatgatcttccaagtgaaaggaaagctaagaattaatcatataaattgttttcacttacgattttattttgtcttggggaaaagcgttcagggtatcctaatttccttctaaaagggcagctaagtggactttaaaccaaattagattgttctctatgcaatgtgaactaaacacttacatttggcctatttacagaaataggatcttagaaacaacaaaataggtaccggaaaacgtaagacacaaactattttcaaaggtgttaacacatcgaattttggaatacgaatggaaaattcatttcgctcagtctgttacggggaaatgtgaagtgacatgaaaaatcaaagccaatatgactataaaaatgtacacatatcaagatacatgtggatgtggaattagtgattgtgttgaccaactttaaactaactaacgaataagtaaattttagttattgtatatccttagttgaataaaaaaccctttttttcacacaaaagttgatatcagaacttttgtgtgttgaggtgtgatcgttactacttcctacctcgttcagagttatttttgcttgatttatgtaagttgaatcattcctggaaacttttataattcctaaattgattataaagtattttaaatacatatattattgttgataaaaaaaataaaaagtattgacggttgaattataaataattatcgattaaccggctttcgaagcttcgacagcaggactccactggggataatcgatctgggtggctgcctcatattcctgcaccaagcagtcaaccgtgtcccgtgcgatgtccagttcggtcaggtcgtcctggaacatggattcgcggcgaaagttgtcgaggaaggcgttgcgcttcctcagcttatcgtactgggccaaggccctcttgaagagcgaactgatacccgtgtgattggccatcatcaatccggataccttgtgggccgactgcacatagggcgagctgcgcggcagagccacttggatgctggccggaccccatggtatgaagttggccagctttcgctcgcggatgcgctgcagcgacttgtgcacctgggatggatccacctcgccctggatgatgttcagtatggagacgaagcactggcggctctgcttgtccgtcagcgcggaaaccatcatgttcttcggctgcagaaggcgacgcattacatccaaaacggtggtctttcgaacgcttgtcttggtctgaaagtggttgcctctttttatttg

SEQ ID NO: 37520 - DNA, 407 bp, DROSOPHILA
gttaacacctttgaaaatagtttgtgtcttacgttttccggtacctattttgttgtttctaagatcctatttctgtaaataggccaaattccacttagctgcccttttagaaggaaattaggataccctgaacgcttttccccaagacaaaataaaatcatcatgtgctgcggaccctgtggacctcgctgctgcgatccgtgcggcggatgctacaactgctgcgtggaactctgctgtgtaccctgcaccccagcctacatccagtgctcatttatgccctgcggaccaagaggctgttgctgaagtggggatgtgccaggtgccgaaacacgttcaaccatattgtacctgaaacactcgtagatacccaacatgtcccaataaacgaattttataaatgttaa

SEQ ID NO: 37521 - protein, 47 aa, DROSOPHILA
MCCGPCGPRCCDPCGGCYNCCVELCCVPCTPAYIQCSFMPCGPRGCC

SEQ ID NO: 37522 - DNA, 3742 bp, DROSOPHILA
gcatttgaatctccattttttccccacgaaaatataaatttcgagatcggactcgtctccaaatcaagcaggtttcaccttgagtacgctaaagcacggcgtcgaaatatagaattcatctttgacacaatctattaacatttataaaattcgtttattgggacatgttgggtatctacgagtgtttcaggtacaatatggttgaacgtgtttcggcacctggcacatccccacttcagcaacagcctcttggtccgcagggcataaatgagcactggatgtaggctggggtgcagggtacacagcagagttccacgcagcagttgtagcatccgccgcacggatcgcagcagcgaggtccacagggtccgcagcacatgatcttccaagtgaaaggaaagctaagaattaatcatataaattgttttcacttacgattttattttgtcttggggaaaagcgttcagggtatcctaatttccttctaaaagggcagctaagtggactttaaaccaaattagattgttctctatgcaatgtgaactaaacacttacatttggcctatttacagaaataggatcttagaaacaacaaaataggtaccggaaaacgtaagacacaaactattttcaaaggtgttaacacatcgaattttggaatacgaatggaaaattcatttcgctcagtctgttacggggaaatgtgaagtgacatgaaaaatcaaagccaatatgactataaaaatgtacacatatcaagatacatgtggatgtggaattagtgattgtgttgaccaactttaaactaactaacgaataagtaaattttagttattgtatatccttagttgaataaaaaaccctttttttcacacaaaagttgatatcagaacttttgtgtgttgaggtgtgatcgttactacttcctacctcgttcagagttatttttgcttgatttatgtaagttgaatcattcctggaaacttttataattcctaaattgattataaagtattttaaatacatatattattgttgataaaaaaaataaaaagtattgacggttgaattataaataattatcgattaaccggctttcgaagcttcgacagcaggactccactggggataatcgatctgggtggctgcctcatattcctgcaccaagcagtcaaccgtgtcccgtgcgatgtccagttcggtcaggtcgtcctggaacatggattcgcggcgaaagttgtcgaggaaggcgttgcgcttcctcagcttatcgtactgggccaaggccctcttgaagagcgaactgatacccgtgtgattggccatcatcaatccggataccttgtgggccgactgcacatagggcgagctgcgcggcagagccacttggatgctggccggaccccatggtatgaagttggccagctttcgctcgcggatgcgctgcagcgacttgtgcacctgggatggatccacctcgccctggatgatgttcagtatggagacgaagcactggcggctctgcttgtccgtcagcgcggaaaccatcatgttcttcggctgcagaaggcgacgcattacatccaaaacggtggtctttcgaacgcttgtcttggtctgaaagtggttgcctctttttatttgcattcccatttacatatgtcatatcatcatacctcgcagtcggacattagcggagtatatcccgtcatcaggaagtgcagctggggcgtgggaatgagcgaggcggtcagaccgatgaggttgttgttcatgtacgagggatatcgcagggtggtggtgctcagactcatgatggtggacaccagattgttgatctgcgtaaaagtgggcgtttggatgtgcaatctttcggtggcgatgcggttcagtgcggtattatccagcaccaccacactgtccgcgcacttggtcaaacgcttcagggtaaggatcgagttatatggctgcacaaccacgtcgctgatctcgtcctgattgggaaaaacgctgtacgtctgtatgagcttcttgggaaagcgttcggacagccgttccaggacatatgagcccattccggacccagttccgccggctatcgagtggcagagcacgaatccctccagcgaatcgctgccatcggcctcgcggtccagaatgtcgaacacctcctcctgcaccttctcaccctggctaaagccggacgcccagttgtttcctgctccaccgccgtgcttggagaggaacacattctcctggttgtacaactgcaaaggggaaacacatatccatctacatagttttttaaatgaaatacataaaataaagtagattagatcagaatccgatccaataagaccagtttccgcactgaccttggagtacggagaggtcatgatgttgttaatgactctgggctctaagtctatgagaacggcccgcggtatgtaatggttgtcgtccgcctggtaaaagaacacatccttgcgatcctgtccatcggtggcgaagtcttccaggacgccatccggggagatgccgtgctccaggcacaatctcttccagaactcgaaaccaactgcggaatggagtgatctcgatcaagccggagcttctcttaacttcgatttcgacgtgaagaacttactttgattgccacattggcccaattgaagggttataatctcgctgggcattttgctcgaattgcagtttagttaatttcgcttctttctcagtaaataataactgtgcatcgaaggccaactggagatggaagtggaagtcattaatatcgatatacaagaagtacaatacaacagtaagttattacctatttttctttactaatctttatgatttatttaatgttattggacttatagaaaatacttagaattaagatttgatccattttttttttaaatatttaggttcaaataaattagccatagttatatattttttatgttttcatttacataaaacattaactgttatttttttaaatttaaaggactagctttttcaattgtacagcacaccctgtggctgcgagtaacggttctcgggagtcgttattttctgagaagcgcgcaacgtgcacactggcaggctgattgaaaaaattcgttgcaaatgtttatgtacaaatattgaataaaaaataaaaatgctgcggcaggagaacttggcagccaacttctgcggtctcctggccagccagggctataaaggtgagttcgtatttcgccaatttactccgagcctcatggatgtccgtaaaaatcgcagagaaggcaaacgagtggcgcattttgggccaggaacaggatggatctctgctcacgtcctggatattcgagtacgcggacgaggatcagcgcaaggagacgtgcattggccactttcacgccaccaagaagcagctgcgactcctttggaccctcgacaattgccgtgagatcgtccaggcaacgattaacagcagtgtcacattgctgtccttcgtggagaaaactgagggcaagctctatcaggcctttgtcgtggaggtaaggagctccgaaggtggcacggccacgcccctcaactcggagccctccaaccgccagatgatgacgcagttcctgtggcgcgtcgagagtgccacgcgcacctgctggcaggacaagctactggtgctcacccacgaggaatgtaggtgtcatgtatatgtcattatccacctctaactcccatg

SEQ ID NO: 37523 - DNA, 1506 bp, DROSOPHILA
tttactgagaaagaagcgaaattaactaaactgcaattcgagcaaaatgcccagcgagattataacccttcaattgggccaatgtggcaatcaaattggtttcgagttctggaagagattgtgcctggagcacggcatctccccggatggcgtcctggaagacttcgccaccgatggacaggatcgcaaggatgtgttcttttaccaggcggacgacaaccattacataccgcgggccgttctcatagacttagagcccagagtcattaacaacatcatgacctctccgtactccaagttgtacaaccaggagaatgtgttcctctccaagcacggcggtggagcaggaaacaactgggcgtccggctttagccagggtgagaaggtgcaggaggaggtgttcgacattctggaccgcgaggccgatggcagcgattcgctggagggattcgtgctctgccactcgatagccggcggaactgggtccggaatgggctcatatgtcctggaacggctgtccgaacgctttcccaagaagctcatacagacgtacagcgtttttcccaatcaggacgagatcagcgacgtggttgtgcagccatataactcgatccttaccctgaagcgtttgaccaagtgcgcggacagtgtggtggtgctggataataccgcactgaaccgcatcgccaccgaaagattgcacatccaaacgcccacttttacgcagatcaacaatctggtgtccaccatcatgagtctgagcaccaccaccctgcgatatccctcgtacatgaacaacaacctcatcggtctgaccgcctcgctcattcccacgccccagctgcacttcctgatgacgggatatactccgctaatgtccgactgcgagaccaagacaagcgttcgaaagaccaccgttttggatgtaatgcgtcgccttctgcagccgaagaacatgatggtttccgcgctgacggacaagcagagccgccagtgcttcgtctccatactgaacatcatccagggcgaggtggatccatcccaggtgcacaagtcgctgcagcgcatccgcgagcgaaagctggccaacttcataccatggggtccggccagcatccaagtggctctgccgcgcagctcgccctatgtgcagtcggcccacaaggtatccggattgatgatggccaatcacacgggtatcagttcgctcttcaagagggccttggcccagtacgataagctgaggaagcgcaacgccttcctcgacaactttcgccgcgaatccatgttccaggacgacctgaccgaactggacatcgcacgggacacggttgactgcttggtgcaggaatatgaggcagccacccagatcgattatccccagtggagtcctgctgtcgaagcttcgaaagccggttaatcgataattatttataattcaaccgtcaatactttttattttttttatcaacaataatatatgtatttaaaatactttataatcaa

SEQ ID NO: 37524 - protein, 457 aa, DROSOPHILA
MPSEIITLQLGQCGNQIGFEFWKRLCLEHGISPDGVLEDFATDGQDRKDVFFYQADDNHYIPRAVLIDLEPRVINNIMTSPYSKLYNQENVFLSKHGGGAGNNWASGFSQGEKVQEEVFDILDREADGSDSLEGFVLCHSIAGGTGSGMGSYVLERLSERFPKKLIQTYSVFPNQDEISDVVVQPYNSILTLKRLTKCADSVVVLDNTALNRIATERLHIQTPTFTQINNLVSTIMSLSTTTLRYPSYMNNNLIGLTASLIPTPQLHFLMTGYTPLMSDCETKTSVRKTTVLDVMRRLLQPKNMMVSALTDKQSRQCFVSILNIIQGEVDPSQVHKSLQRIRERKLANFIPWGPASIQVALPRSSPYVQSAHKVSGLMMANHTGISSLFKRALAQYDKLRKRNAFLDNFRRESMFQDDLTELDIARDTVDCLVQEYEAATQIDYPQWSPAVEASKAG

SEQ ID NO: 37525 - DNA, 2579 bp, DROSOPHILA
tccgtcgttccgtccgccagtctgtccgtccatccgtccgtccatctatccatctgtccgtccggcagtgtgtcaggttgtcagttcgtcaagcccagcttggcagctgctcgtattgttgtgagccatttgcatagagcgtcttccgcataatttatcgacacttgagcaaaactttaattactccccagcccacaggatcaaaactgaatttttcgtctggtaatgtgcccggggcaaaatactatgagggaattccgaggagcagatgggtgaacgtggggcagattttcaccatgtgaatttgtgcatatggggtaaaaattccccacaagtctctgtcctttgtctgcgaaattcaatgcgtgtttccagtatatcctttggccatacatagcaccacattgcaatggatttgggcaaggggttggggtagtatttgatagctttctgtggactttcctcccccaaaccccttcacgcactgctgcctaatggcctttaattgagcgctgggaaaacgttcaagtgtttgcggctgttgaaaaatttttgggaaattcgatattgaaaataaagtggctgtaatgctgggccttggccaaaaacacacccaaacccattgattgcctaaggattctgtcattttttgcttgcgattgacactcacaatttgtttgctgattgctctgcattagcagaattatgaatgagtggcaaagtgtctaactttttacttttttacttacttttttaaatgttttggagtggaaagtctgccatcttaaaaggcttcttcagaggctgttcaaaaaacgcatttcgactgtaaactaacaaaaatgtagagtatgtattcgggtttcatcaatatggaaaagctgtcttgcataaaaaacttttttatgtcttgtttaatataaaacagatactccaaggagccaaacatattccatacacacataggtactttctcaaacacaaagacctccgatccagttcacgccagaatgcaatcgcacattcgctggcaaacgcgtttccggagattctcgacgcgcaggagcagtctgctgtgatcctcgttgtccttggagccggagagaagattctgcagctcctggacggctcccaggcaatcgcagtgctcggcgagtcggggattttggcacaagaagttggagcagtagatcggatcgcattggtgcctgggcgcccggtactctgtcttgcatcgatcccggatgtattcctgatggcgcatctggcggtaataggcacgcagctggcgcttctgctccacacgcctcatttcccgcatgaagggagcctcctgttcgttgaaagggcgatccatgaagtgacagatctcgcactggcaacctgccggtggacaaggtggacagactttcttgggcttatccttgcaaactttcttaatcctcttcattttctttttcttgggcggatcctttagcttacaagtcggagccgctggctcgtccctgacaatttctagggctggaaattcgtaatcttccaccctagttcctcttttgatagttttatcgaactccatatccacggggatatcgaagaatcgcgaggtcacttctggcaggttgctgttcggtttattttcttcaattttactatcttcgtttgatttatttttgttctttttattgtttggaattttaatatcatcacggtcatatttttcatattctaaatccatgtctttgattttatcttcatctttatatttttctttgtgtttttgttgctttttttctttgcccttttctggaaattgatcctttcctctgtttttgtcttccttttgttttccagtttcatgttccttgttaacttctttttctttcccctttcctttttctctttctttttcaattcctctttccctttctttttcttcttgctttcccttttcttccctttcttgttctcgttccattggcttatccttttcatgtggtctttccctttctttaaatttttctatttcctgttcctttccaagttctttttccttgttattttcattttctatttcgttttcttcttcttccttttctctttcttttctttcgccttcttctttttctcttggtctttcaattcctttataattttctttatctctttcccttgctttttcctttccttttcccgtttccttgttcttttctttctttttctttaccttttctctcttcttttctgtttctttatccttgccttttttcttttctttcgccttttccctttttttcttttctcgttctttttctttgtcctctttattcttgtatctatcctgatttttatatttattttcttcttgattaaaatttacgaccttgtctttatttttatcgttgttttgatcaccatcattatcattttccttaattgaaactcttggcttatctttattaacgaattgatttttatccttgtcattttctttgtcccctctatctccgtttccatcatctcgcactatagttactttatcttcctctcctggttcgcgatttccgtgtccaattgga

SEQ ID NO: 37526 - DNA, 579 bp, DROSOPHILA
atggagttcgataaaactatcaaaagaggaactagggtggaagattacgaatttccagccctagaaattgtcagggacgagccagcggctccgacttgtaagctaaaggatccgcccaagaaaaagaaaatgaagaggattaagaaagtttgcaaggataagcccaagaaagtctgtccaccttgtccaccggcaggttgccagtgcgagatctgtcacttcatggatcgccctttcaacgaacaggaggctcccttcatgcgggaaatgaggcgtgtggagcagaagcgccagctgcgtgcctattaccgccagatgcgccatcaggaatacatccgggatcgatgcaagacagagtaccgggcgcccaggcaccaatgcgatccgatctactgctccaacttcttgtgccaaaatccccgactcgccgagcactgcgattgcctgggagccgtccaggagctgcagaatcttctctccggctccaaggacaacgaggatcacagcagactgctcctgcgcgtcgagaatctccggaaacgcgtttgccagcgaatgtgcgattgcattctggcgtga

SEQ ID NO: 37527 - protein, 192 aa, DROSOPHILA
MEFDKTIKRGTRVEDYEFPALEIVRDEPAAPTCKLKDPPKKKKMKRIKKVCKDKPKKVCPPCPPAGCQCEICHFMDRPFNEQEAPFMREMRRVEQKRQLRAYYRQMRHQEYIRDRCKTEYRAPRHQCDPIYCSNFLCQNPRLAEHCDCLGAVQELQNLLSGSKDNEDHSRLLLRVENLRKRVCQRMCDCILA

SEQ ID NO: 37528 - DNA, 3231 bp, DROSOPHILA
tggcaacctgccggtggacaaggtggacagactttcttgggcttatccttgcaaactttcttaatcctcttcattttctttttcttgggcggatcctttagcttacaagtcggagccgctggctcgtccctgacaatttctagggctggaaattcgtaatcttccaccctagttcctcttttgatagttttatcgaactccatatccacggggatatcgaagaatcgcgaggtcacttctggcaggttgctgttcggtttattttcttcaattttactatcttcgtttgatttatttttgttctttttattgtttggaattttaatatcatcacggtcatatttttcatattctaaatccatgtctttgattttatcttcatctttatatttttctttgtgtttttgttgctttttttctttgcccttttctggaaattgatcctttcctctgtttttgtcttccttttgttttccagtttcatgttccttgttaacttctttttctttcccctttcctttttctctttctttttcaattcctctttccctttctttttcttcttgctttcccttttcttccctttcttgttctcgttccattggcttatccttttcatgtggtctttccctttctttaaatttttctatttcctgttcctttccaagttctttttccttgttattttcattttctatttcgttttcttcttcttccttttctctttcttttctttcgccttcttctttttctcttggtctttcaattcctttataattttctttatctctttcccttgctttttcctttccttttcccgtttccttgttcttttctttctttttctttaccttttctctcttcttttctgtttctttatccttgccttttttcttttctttcgccttttccctttttttcttttctcgttctttttctttgtcctctttattcttgtatctatcctgatttttatatttattttcttcttgattaaaatttacgaccttgtctttatttttatcgttgttttgatcaccatcattatcattttccttaattgaaactcttggcttatctttattaacgaattgatttttatccttgtcattttctttgtcccctctatctccgtttccatcatctcgcactatagttactttatcttcctctcctggttcgcgatttccgtgtccaattggattacctggatcgcccgaagactttgtgggcctactgggtcctttgggtatttgactgtcacctcctccttgattatcctttccatgggatcttttcggcttacagcacttctcatagggctcgcaaagcggatctggagaaggctttggctcaaagcacttaatgattctactatacagctgatcgtagttcagtggttccggactcttgtgttcatctttcccttgcggacaatgccgaaactcattgttattgggattaggatccagcttgcgcttggcccactcgtactgggtgcacccatggcgaggctccaagccatccggggggcagtaccactggggatggcgcagaccacgtgggtctttttttcttgctggctcaatgttagaaacttgatgtctggaaatgccggtgtacatctggcgtgccactctagtggaatcgtgaggaacttgattatgatcagtgcagtatagcgtcccgaaagcctgtcgcggatccagttgctgttgaacgtggggaatctgctgtagatcagactgcaatgcgtggcggtttaagacaaaaggcttgcaaatctgaggggtacggttcttttgcgctaacgtatcccttggggatggctttttatcctgtttagggatcctccgctgagtgccgccgccgttgaccttgaccaagcaggcggccaccacctggttgaacaccaccgactcgggctggtgggtgggcgatcctacgccatagaagcccaacgtgtccttgtgaggactttgctgccaagcgagcagcacgtcgtctttgaccatgtcgtagggtcgcccactgccatcggcctcgagggtgttggccaaccgtgtggtggcctcgttcttgttggggtcgcaatgtggctttccttttcggatcgagggatacgtctccgctcgttgggagcggttgtcctgccggtcgtgccttccgagctgtggtggatcgttttctcggccagcagagcgacgccgctgcaacgccttcctgcgcatttacgatgggatcggattggaccactcttaattttcatttactaataaaattttgtcgttatttatatttttacgccaaatttgaggacttcctgagagttgagagttttagcaaggtctcagagattaaacgttgatacatacgtgccgattacattcattaactgtaaaagtggctcaggacttgaattggtagccaaatagaacattcgacccaatgcttaaatccagtaacgagtacgaacttctatcatttttaaaacgggacctgcccagagaatgccatgcgtttgcagccatccaaatgaacctcaattaaagtttgcacactttggttttttggcccagttttaggccacaatgctgccccaatcgagccatgttggccatacaatttcccagcctttgccacataaattcgcacacgaaagagtctgacaaggctgtgctatttatggagcatttcctgttcaagcaaaaaggcacaaaatgcccaactcagctgcttttagcactggtggttggaagtgaataaagtacactaacacacacacaagcacacacagaggggcataaatccaaaattgtcttttgtcgcataaatattttactttgggcatttggagcgtcctggcgaccagagaagcagaagcaaggacatggacaataggccaagctggaataggacatgaaacgacattatttcttattattagaacagcgcaaataaatgagactcggaaggcgggtggcggacggatttccccacgatggcactttgtttgtcctgccagcaccgcaattcccacatgtctgtcttcataaatgctttatctgcggctggcacacacacactctgggtggctcagtgtgttggcttttgtaattatgtgcatataataaagttgacctaaataaaaataagcgccgactttagcgcgctaaacaaaggccatgcacacgggggacaatgagggggaaatattggccataactacaa

SEQ ID NO: 37529 - DNA, 1149 bp, DROSOPHILA
atgcgcaggaaggcgttgcagcggcgtcgctctgctggccgagaaaacgatccaccacagctcggaaggcacgaccggcaggacaaccgctcccaacgagcggagacgtatccctcgatccgaaaaggaaagccacattgcgaccccaacaagaacgaggccaccacacggttggccaacaccctcgaggccgatggcagtgggcgaccctacgacatggtcaaagacgacgtgctgctcgcttggcagcaaagtcctcacaaggacacgttgggcttctatggcgtaggatcgcccacccaccagcccgagtcggtggtgttcaaccaggtggtggccgcctgcttggtcaaggtcaacggcggcggcactcagcggaggatccctaaacaggataaaaagccatccccaagggatacgttagcgcaaaagaaccgtacccctcagatttgcaagccttttgtcttaaaccgccacgcattgcagtctgatctacagcagattccccacgttcaacagcaactggatccgcgacaggctttcgggacgctatactgcactgatcataatcaagttcctcacgattccactagagtggcacgccagatgtacaccggcatttccagacatcaagtttctaacattgagccagcaagaaaaaaagacccacgtggtctgcgccatccccagtggtactgccccccggatggcttggagcctcgccatgggtgcacccagtacgagtgggccaagcgcaagctggatcctaatcccaataacaatgagtttcggcattgtccgcaagggaaagatgaacacaagagtccggaaccactgaactacgatcagctgtatagtagaatcattaagtgctttgagccaaagccttctccagatccgctttgcgagccctatgagaagtgctgtaagccgaaaagatcccatggaaaggataatcaaggaggaggtgacagtcaaatacccaaaggacccagtaggcccacaaagtcttcgggcgatccaggtaatccaattggacacggaaatcgcgaaccaggagaggaagataaaataagccaagagtttcaattaaggaaaatgataatgatggtgatcaaaacaacgataaaaataaagacaaggtcgtaa

SEQ ID NO: 37530 - protein, 382 aa, DROSOPHILA
MRRKALQRRRSAGRENDPPQLGRHDRQDNRSQRAETYPSIRKGKPHCDPNKNEATTRLANTLEADGSGRPYDMVKDDVLLAWQQSPHKDTLGFYGVGSPTHQPESVVFNQVVAACLVKVNGGGTQRRIPKQDKKPSPRDTLAQKNRTPQICKPFVLNRHALQSDLQQIPHVQQQLDPRQAFGTLYCTDHNQVPHDSTRVARQMYTGISRHQVSNIEPARKKDPRGLRHPQWYCPPDGLEPRHGCTQYEWAKRKLDPNPNNNEFRHCPQGKDEHKSPEPLNYDQLYSRIIKCFEPKPSPDPLCEPYEKCCKPKRSHGKDNQGGGDSQIPKGPSRPTKSSGDPGNPIGHGNREPGEEDKISQEFQLRKMIMMVIKTTIKIKTRS

SEQ ID NO: 37531 - DNA, 3421 bp, DROSOPHILA
gaagaagtgcaaacttttggcagagcacaaattcaaatgtttaagccaattattttgccggtcaaagggattgtttttctagcatatgcataattaacacgatgacatctaaaaactgttttatcgaaattgttttatgcattttcgcatcaattattgaagttgaatctgtcagttagccggcattaaagttgcattgcagcaaaagtgttgagcccaaacccaacttgtgcatttgctgaaaaagcggaggtcgtgtcaagagttcgacaggttaaacgacgaatcgagactcctgtcaataaataattgaaaatcagagccgccggccgaatggtcgactattgttttttgtcaccgtctcttttcggtggtaattaaaaaagtttttccctgctgaaaaatagcaagaaaattttcaattgaccagagagcgggtttttttttttagaccggctaattgtcatgcagagcagtggtaagaggaacatttcccgggctgacgtaattaaaaagccgtcaagcgaagttggcgcagttagcgctaaatgtcgtccagttgatgcacagactctggagcttaagtactggccttccatcccgcctgcagatctctaattaaataagcaagtgtcacatttgtcttgagtgcccgacaattcggtgacttatgatgactgcagagcaggacgcgacgaaagccgctccaggaccccaattcggaccatccacttggacggaggcattgaggagcagcggagaagatttatgaggtaaaagcaattagaaagtggcattaacaaccgaatgcagagctcagcacaattaacaattgccacaagctgcaggagcaggctaagagcagcgaaccatcacacaaagcacttctttctatagaaacaaacaaacgttttaaaagtttcgcttttaataagcttttatagttgtaatagctgtgaggtgtgcctagtcttccctatgaactctttgaattttgatatccaattagcacagcgacttatctctggcttcctcgtgctttatcgagggatcagatgattcgatttcctttacaacgccagttaatatttccacttcgcccatgatggcatccaacaccttgtccaagtcgccgcgagcgggaaacgaatgtacatctaaaataataaaatgaataaattatttaataatagcaagattttttgactaacctcttcgccgtagaaggattcggtgaaggttggtaatcgcatctattgtgcgctccttgtccatgtagttgttgttgatggcgtccttggtcttggccaggatcttctcccatctgaggcactgcactctggactcgttgtaggatcgttccagtttggccagatcgttctttagacccagcacagttagagccgcatcatttgtgatctgcaccatacgctgccgcatgttctcgatgtcctggagcttttgatgctccaacttgttgatctccacttgagccagcactgtagaacaaaaaaaaattaataactttatttcattttataaattagcaatgctcactcagcgcatcacagcgatcggtgcagtcctttggcgagacgaatatgtcggataccttcaccacctcgtcgagcaccttctcgtagggctggaactcctgcacggtggccttgagagcctcccgaaaggccttgagttcgccgatcgagtccttgaagctctcaatgccctcgccgagctccttatggttgagcgtctccgcttgggcggtcttctcggccactctctttttgtccgcgcagtccttgatgaagctgttcacctcgatgaagcgccgcctcagccgctcctggatcttgtacatgttcctcacccgggcggagttcagcttggtctgccgcttggcactggtcagcatctcctcctgcagcttgagcatggcttcgtgctcgcggagattgttcacatatatcagttcgatggagtcgccggcagagtccgagttcggtggaattctacaggaagttacgaataggtcaaataattgataccagatagagacatccttgcaacagtaaattacgaagctgtaaaatttctcaaaaatctcaaactgcactaccaggatcattttaggattgggtacttctctttcagccttttttcagtgtgggattcactacttacacgaagaatttgttctgctgcttagagctgatatagtcccccacggcatcctccggccgcaggtccagatttcccagaacatcgagcttcttggtgggcttcacgcggggcatcttggatctctttgccgaaagtaaaagctcaagtgtacgtttttgttagttttttatatttttttttgctttggttaccgcgatacagcgcggattgtgcgttttgtagtagtagttgtgtgtgctgtgtgcttacttttcaaagtgtgttattgttttgtaataaaaattaacaagacctacttggaacatgttttttatttgggtgacacataaaaacaattggttgccaggaggttcttttattaccgtggcaatggttgagaaggtgtaaccagttttgtgtcatggtaactgcacaatttggtttctttcgaaaaaacaaaataggaagcttcttcggcaagccgaacctaatatactcttgatactcgatgatgattaatttttaatcaacaactatagaattatgatatcttttcaattgtttttacttgatttaacgactggtcgtacttatgaaggaaacgtcagcaattgcataaatatctgaatgtagtaataaaaaatggtttaatccttttatccttgactgtgctgtctgcccatatacatgtagaattactcatcacacatcgttctccaatagatattcccccaatatatatcaatatatttgaaaagattatattttaataggacaagatgccgcgacgtaagcccaccattaagaccgatgtgatcggggatctggacctcagtccagaggtcgccatcgatgactatcgcgtctctcgccagcaggaccaattcttcgtgtaagctaaaagagcaactacaatatgtaagtcatactattaatgaaacttggatggtctaggaaaccgcccaattgggattcggccggggataacatcgagatgctgtacatagccaatctccgggagtacgacgccatgaagcaggttcagatccagctactcaaagatgccaagcggcaagccgcattaaatgtgcagcgcattcgcaagatgtacaagattcaggagcgcctgcgcaaacgcttcgtcgaggtgaatggattcatcaaggattgtgcggacaaaaagcgcagtgcggataagtcgattcgcgaggagaccgttctccacgcggaggtcaccaaggagatagacgagttcaag

SEQ ID NO: 37532 - DNA, 1137 bp, DROSOPHILA
cacacacaactactactacaaaacgcacaatccgcgctgtatcgcggtaaccaaagcaaaaaaaaatataaaaaactaacaaaaacgtacacttgagcttttactttcggcaaagagatccaagatgccccgcgtgaagcccaccaagaagctcgatgttctgggaaatctggacctgcggccggaggatgccgtgggggactatatcagctctaagcagcagaacaaattcttcgtaattccaccgaactcggactctgccggcgactccatcgaactgatatatgtgaacaatctccgcgagcacgaagccatgctcaagctgcaggaggagatgctgaccagtgccaagcggcagaccaagctgaactccgcccgggtgaggaacatgtacaagatccaggagcggctgaggcggcgcttcatcgaggtgaacagcttcatcaaggactgcgcggacaaaaagagagtggccgagaagaccgcccaagcggagacgctcaaccataaggagctcggcgagggcattgagagcttcaaggactcgatcggcgaactcaaggcctttcgggaggctctcaaggccaccgtgcaggagttccagccctacgagaaggtgctcgacgaggtggtgaaggtatccgacatattcgtctcgccaaaggactgcaccgatcgctgtgatgcgctgatgctggctcaagtggagatcaacaagttggagcatcaaaagctccaggacatcgagaacatgcggcagcgtatggtgcagatcacaaatgatgcggctctaactgtgctgggtctaaagaacgatctggccaaactggaacgatcctacaacgagtccagagtgcagtgcctcagatgggagaagatcctggccaagaccaaggacgccatcaacaacaactacatggacaaggagcgcacaatagatgcgattaccaaccttcaccgaatccttctacggcgaagagatgtacattcgtttcccgctcgcggcgacttggacaaggtgttggatgccatcatgggcgaagtggaaatattaactggcgttgtaaaggaaatcgaatcatctgatccctcgataaagcacgaggaagccagagataagtcgctgtgctaattgga

SEQ ID NO: 37533 - protein, 335 aa, DROSOPHILA
MPRVKPTKKLDVLGNLDLRPEDAVGDYISSKQQNKFFVIPPNSDSAGDSIELIYVNNLREHEAMLKLQEEMLTSAKRQTKLNSARVRNMYKIQERLRRRFIEVNSFIKDCADKKRVAEKTAQAETLNHKELGEGIESFKDSIGELKAFREALKATVQEFQPYEKVLDEVVKVSDIFVSPKDCTDRCDALMLAQVEINKLEHQKLQDIENMRQRMVQITNDAALTVLGLKNDLAKLERSYNESRVQCLRWEKILAKTKDAINNNYMDKERTIDAITNLHRILLRRRDVHSFPARGDLDKVLDAIMGEVEILTGVVKEIESSDPSIKHEEARDKSLC

SEQ ID NO: 37534 - DNA, 2783 bp, DROSOPHILA
agagagtactgtgtaatggggcgtgtgtttcgggtgtgtgatgaaaatgcctaacttatgaggctctggcctgcttaaaagggtgagggttatgcaagacaaattgcaaatagattgggtaagtcgcagccgcagcctaaggattcgccgggaatgtaactggcgcaatttaaaagcgataaaacaacgccgcgacataaaaaatacatcagccacgctacatggactacatctgtcccccatttcgaataaatatttgaaacaaacccgcctgatgaaacacacaaaggctgagaaaaaagctgaaagctgtgcgcatgagaaacgcgaatataataatccaaacaaaagcgctgagatgggtgtaaagccttccatgtggaaattcgtcggaaatggctgtgtagccattttgtttggggtaacaaatgttcggaatctccttccctttgttgtataattgtatgcccccttcgaaacacactcacgcaagcacacactcacacgtgccacgcccaccgaaataccaaaaaaaatgaggaggcggctgagcagctcgacacggcataataacaataaaataagagtggatgatgaaggagagagggcggcaaggattcacgctccttaatgtctccacagttgacatcgccaagtgttggcggatttacaggcaagttgggctggattttggtatggacttttgattgatatattttacgtacggtgtttggaagagacttacggcataaatttgttaagcaagacaaatggcgcggaagcgaaattggaaacattttaattctcataaaacgcttaaagagggcaaccatatattttgtatttttgaaatccagaaaagcaggcgaaggaaacatatgccagctgcactagacatatccattaaatcattgtaactccttaatcgataatcaaacaatatcatatatccagtagtaaatcaaagtaaagagtaaatcaccgtgagcttccctgaaccatggaaaacctagactccactgtcgatagcaccgagaacagcaagttctcggccctgtacggtggattgattaaggagatcgctgcaacctcgaagatgtccaccttggacatcacctgtttgctttgcgtttactacaagttcgtcaggttcaacggacctggcgccaaacagatgaagaagaatcagttctaccagatctacttggtgctcttcaacgtggccaatgttcaggtgattgaacgctcccttctggccatcaccaaggataccaagtacgtgagtccccgtgcctgggttgatctctttgagctgtacaccacagaggatctggagcgccgtatgaagtttgcctttgaagtgggtaatggattgttaagcatttctagaaggctctaatagggttctttattaggtttatgacaccaagaacaccggagttatcgatcgcgagcaggtgggcgtggcatgcgagaaattcttccacgaaggcgacgacgaagatgaactaattgagctcagagcggtaagcttgcttatcaatttagaataatttaataaatttactcctcacaggacatgactgaatttattatgaagaagtttgatgtagacaaggatggagtcatttcgtttgaggactactcctcggttgtttcacaacaacccgttttggttgagttcttgggctggctatttccatcgaacgaagaaagggatcttatggcccatgttatcaacatggactccatgctcaattattgtaatccggacgcaaaataggcttgtcgtttgattaagcttgattatcccactgtgataataatcgaacgacaaacgacaatgaatgaggaccaaaaggatgccgccaaagtagttgatcaaaatttttgtatgatttcaaattaatcatttttataagcatgatatatcaaatttccaccaacactttgaaaataaagcaaaatgtttcgcgtgagctgtcttaaaaggacttgcgattggttcttgtgttaacttggtttatataaggcgatagagtgggcgactctttatgtgaactagcagacactgcgtatgcatcataagctctccaaaatctctgttcacattctgcacggggctctgatcaagtggatatgcacactttaaagaatactgtatgggtaacggcgctatgagccgttttggatacttatataattccgatagccaaaaacgaaaaaatgcgacgcaggagcctttgaacttatacgaaatagtttttaaacattgttattcaaaatccatctgccaacccgaacataacacaaaaatcacaaaaaaaaaaaaaaattagaaaaagaaaacacacacaaaaaaaaagtttcaaaataaggaaaaaaataacaaaaaaaactttacaaggaaataaaaaacattaaaaagaatttagttatggaaaacctagacgccaccatagatagcatggagaacagtcggtttgcagcgctctacgggagtttgatcaaggagttaaccctaacttcggagttgtcccagacggacatcacctgtttgctcgtcgtttattacaagttctcaaaggccaacggaccgcagtgcaagcagatgaccaagaagcagttctatcagatcttcttggtgctcttcaacgtggccagtgtccaggtgatcgaacgcactctgctcgcgatcacaaaagatacgaaatatgtcagtcccagggcctggatccacctcttcgatctctacacaaccaatgacattcaagtgcgaatgc

SEQ ID NO: 37535 - DNA, 678 bp, DROSOPHILA
atggaaaacctagactccactgtcgatagcaccgagaacagcaagttctcggccctgtacggtggattgattaaggagatcgctgcaacctcgaagatgtccaccttggacatcacctgtttgctttgcgtttactacaagttcgtcaggttcaacggacctggcgccaaacagatgaagaagaatcagttctaccagatctacttggtgctcttcaacgtggccaatgttcaggtgattgaacgctcccttctggccatcaccaaggataccaagtacgtgagtccccgtgcctgggttgatctctttgagctgtacaccacagaggatctggagcgccgtatgaagtttgcctttgaagtttatgacaccaagaacaccggagttatcgatcgcgagcaggtgggcgtggcatgcgagaaattcttccacgaaggcgacgacgaagatgaactaattgagctcagagcggacatgactgaatttattatgaagaagtttgatgtagacaaggatggagtcatttcgtttgaggactactcctcggttgtttcacaacaacccgttttggttgagttcttgggctggctatttccatcgaacgaagaaagggatcttatggcccatgttatcaacatggactccatgctcaattattgtaatccggacgcaaaatag

SEQ ID NO: 37536 - protein, 225 aa, DROSOPHILA
MENLDSTVDSTENSKFSALYGGLIKEIAATSKMSTLDITCLLCVYYKFVRFNGPGAKQMKKNQFYQIYLVLFNVANVQVIERSLLAITKDTKYVSPRAWVDLFELYTTEDLERRMKFAFEVYDTKNTGVIDREQVGVACEKFFHEGDDEDELIELRADMTEFIMKKFDVDKDGVISFEDYSSVVSQQPVLVEFLGWLFPSNEERDLMAHVINMDSMLNYCNPDAK

SEQ ID NO: 37537 - DNA, 2973 bp, DROSOPHILA
gagttatcgatcgcgagcaggtgggcgtggcatgcgagaaattcttccacgaaggcgacgacgaagatgaactaattgagctcagagcggtaagcttgcttatcaatttagaataatttaataaatttactcctcacaggacatgactgaatttattatgaagaagtttgatgtagacaaggatggagtcatttcgtttgaggactactcctcggttgtttcacaacaacccgttttggttgagttcttgggctggctatttccatcgaacgaagaaagggatcttatggcccatgttatcaacatggactccatgctcaattattgtaatccggacgcaaaataggcttgtcgtttgattaagcttgattatcccactgtgataataatcgaacgacaaacgacaatgaatgaggaccaaaaggatgccgccaaagtagttgatcaaaatttttgtatgatttcaaattaatcatttttataagcatgatatatcaaatttccaccaacactttgaaaataaagcaaaatgtttcgcgtgagctgtcttaaaaggacttgcgattggttcttgtgttaacttggtttatataaggcgatagagtgggcgactctttatgtgaactagcagacactgcgtatgcatcataagctctccaaaatctctgttcacattctgcacggggctctgatcaagtggatatgcacactttaaagaatactgtatgggtaacggcgctatgagccgttttggatacttatataattccgatagccaaaaacgaaaaaatgcgacgcaggagcctttgaacttatacgaaatagtttttaaacattgttattcaaaatccatctgccaacccgaacataacacaaaaatcacaaaaaaaaaaaaaaattagaaaaagaaaacacacacaaaaaaaaagtttcaaaataaggaaaaaaataacaaaaaaaactttacaaggaaataaaaaacattaaaaagaatttagttatggaaaacctagacgccaccatagatagcatggagaacagtcggtttgcagcgctctacgggagtttgatcaaggagttaaccctaacttcggagttgtcccagacggacatcacctgtttgctcgtcgtttattacaagttctcaaaggccaacggaccgcagtgcaagcagatgaccaagaagcagttctatcagatcttcttggtgctcttcaacgtggccagtgtccaggtgatcgaacgcactctgctcgcgatcacaaaagatacgaaatatgtcagtcccagggcctggatccacctcttcgatctctacacaaccaatgacattcaagtgcgaatgcgatttgctttcgaggtcagtcctgctatccttaagtaaatttgtatcgaaaatacgttttcccataggtctatgataccaaaggcactggcgttattgatcgcgagcaagttggcacggcttgtgaaaaatttttttacggcgaagacgaagatgaacttaatgaacttaaggcggtaagtaaacataattactctttaatcgtagtagtaattaaaacagtttaatggatattactaattaactatctgtctgattgtttaggatatgaccgagttcctaatgaagaagtttgatctggacaaggacggagtcatttcctacgaggactattctactgtcgtggaacagcagccaattttagtggagttcttaggttggttatttccatcaaaagaggacaaagatcttatggcccattgcattaacctgcaacttaaaatgaattaaatataatgttggtggtcttgaaaaagtgtttactgaatagtttccttttatcgaatgctagaaatccaccctgaaaaggcatctaaacattgagcgacacgttatttttaaatttaggccttaaaatgccaatcttaaatattgctcttgaccagcagcatctgaattaaagcgataactcctgccgtggcttatagtggcctaagctcaccttcacttcgggcatttgtggtcggctggggtcctcgacccagttgaaggcatctcataattatatgattcaccacagccacacattccacagtggatagtattgcagtgcctgtcggaagtggaagtcggttaagtagctcattaacttcaatacgtttgattacattacgtacggttttgtgcggtgttcaggccaaacaatttgagaattgtgtgtaatgtgctctggcttttccgcctgccctcttcatctgataatttgcccgattcaattggcatttgcaagtatttgggacacggctaagccactgaatgctcacgtatttgccatgatttggcatttatgcagtggcattatgtgattcgaattgatttacattaattgctgccagcgggcggcttagtttcgcaccaaatacccaaaaatctgcactcgacaccatagttaagtcacagcaacttctagtttcatttaaactacgaaaacggattgtcttgatcgactcgcctggctgcagttgacaacttccagtctggaaaccccttatcaacggtctaagccaggatgtggcctcaggacttgagttggccagaactcctggccctcccagttggccttttgttgaacagtccgccgtcaacatgtttgagtctcgctggcatcaacattaattatccctgatagtaatcatgcaatttgtacgtgagcctgagcctcaaccgagctagcgctcctccggccatcggcatccatgctgcggtctttattgtggcattaacagcagcatccgcatggcctgcagccccggcagcatcattacgctcattattgtcgtcaaaggcgtgcagggcgttccgtcggaggccaggagaaccgtggaaccggagaaccagtgaggtggagaccagcagacctggaggagtggcaatcggtctggagatccggggacaatgcgcgtttgatg

SEQ ID NO: 37538 - DNA, 600 bp, DROSOPHILA
atggaaaacctagacgccaccatagatagcatggagaacagtcggtttgcagcgctctacgggagtttgatcaaggagttaaccctaacttcggagttgtcccagacggacatcacctgtttgctcgtcgtttattacaagttctcaaaggccaacggaccgcagtgcaagcagatgaccaagaagcagttctatcagatcttcttggtgctcttcaacgtggccagtgtccaggtgatcgaacgcactctgctcgcgatcacaaaagatacgaaatatgtcagtcccagggcctggatccacctcttcgatctctacacaaccaatgacattcaagtgcgaatgcgatttgctttcgaggtctatgataccaaaggcactggcgttattgatcgcgagcaagttggcacggcttgtgaaaaatttttttacggcgaagacgaagatgaacttaatgaacttaaggcggatatgaccgagttcctaatgaagaagtttgatctggacaaggacggagtcatttcctacgaggactattctactgtcgtggaacagcagccaattttagtggagttcttagcatctgaattaaagcgataa

SEQ ID NO: 37539 - protein, 199 aa, DROSOPHILA
MENLDATIDSMENSRFAALYGSLIKELTLTSELSQTDITCLLVVYYKFSKANGPQCKQMTKKQFYQIFLVLFNVASVQVIERTLLAITKDTKYVSPRAWIHLFDLYTTNDIQVRMRFAFEVYDTKGTGVIDREQVGTACEKFFYGEDEDELNELKADMTEFLMKKFDLDKDGVISYEDYSTVVEQQPILVEFLASELKR

SEQ ID NO: 37540 - DNA, 2776 bp, DROSOPHILA
caccaaattgttgtgccaagcaatccgatttctggcatctctctgattgccccacacacaacttgatggccaactttcagttctgcgctctcgatttcgaggttacccatacgccccgtcgcacgcgcagcaattgatagatggttagaaatctgtggcaggcccaatgtcagaggaaggcaaccgcagtatagaacttgtagtgtctcgtcttagaaatgttcttaaacaattcgcccaactgtcggagaactgccacaaaattccagctgacaggattggtttctgcggagaacaaggcatttggatatcacatccgttatatagtttctactttatgtttggtaattattctgaatctaccaacttgcgattggcccatttcgtatatgtaatgggcttaatgctaacaacaatccaaaagcaaagtaatgcattttttcgaagccaattttagtccgacagttttcgaggaccaaatttgctattatttttccataggttccctttaacaaacttacgtttgaaattcgttttctttcatctcccacctccatagatataatttttgggggaacttaattagaattttgctgagtctgtgagtttttcttgttttgcctccggtgcccgcatatgttgcgcaaatttaattgctctacaaagccgcaaaatagacaaacaaaagttcccgcaccgcccacacacaatcgaaaagcatttggaaggagttgaacatgaacacaagacacagatttcgggacaaaaaacaaaacagtggagcccgcagtggcagtcgcagtctgcggaggcaatttcaacttttcccagtgtgtacttaatggaaaatgactttattgtaagccggcttgcaggcctctaagcgccaattttcaacacttgcgctattttatgaaagctttccttagcaggctgagaatgtatacaattatgcaaaatacgaagaattttccacaaggaacagcctcctttctttcttttaatataaaccttctggcggaaacatagactcaatgttgtggcagtacgccaccagtgatctgtccttgtcatccgggaatattttacccaaaaactcgagcaatccaggctgattctgtacaatttcggcgtactcttcaaacgctatcaccccatccttgtcagtgtcgaattttccgaatatgaactcgcacatgtcctgctcggaaacggtgctgaaatgcaagcataattgtcaataatgtcagtacactcaccgctcgcaattcgttgacctcgtcgtcgtcatcgccagtgaagaattgttcaatggccacgccgaccacctcgcgattcagaaccacagcaccaccgcttgtataaacctgtagtccatggggaaatttaataaaggagtagccacgatttcggagcaaccacctcaaatgcgaacttcattcgctcctgcagacttccgttgaagaacacacagaacagccgcatccaggcttctggagagactgatcggccatcctgcgtgatattcatcgaaatccggtcgatgatggtcacgtcgaagatcccaaagctgacgaggaatagattgtacagctggctggtggacatcatgcgggacctgttgttcagggcgtacttgtaaaacacgatcagcaagctgaccacttcgttggtggaaaactccgtggaggcagcgaagctcttgatcaaagtactgtacatggtgaggaacttgttgttggccatgtcgtccagggtaaggtcgatgcggttcattgtgttttttaatggcaatggtaaacaagtaattattatttaaaatgttttttaagagagtactgtgtaatggggcgtgtgtttcgggtgtgtgatgaaaatgcctaacttatgaggctctggcctgcttaaaagggtgagggttatgcaagacaaattgcaaatagattgggtaagtcgcagccgcagcctaaggattcgccgggaatgtaactggcgcaatttaaaagcgataaaacaacgccgcgacataaaaaatacatcagccacgctacatggactacatctgtcccccatttcgaataaatatttgaaacaaacccgcctgatgaaacacacaaaggctgagaaaaaagctgaaagctgtgcgcatgagaaacgcgaatataataatccaaacaaaagcgctgagatgggtgtaaagccttccatgtggaaattcgtcggaaatggctgtgtagccattttgtttggggtaacaaatgttcggaatctccttccctttgttgtataattgtatgcccccttcgaaacacactcacgcaagcacacactcacacgtgccacgcccaccgaaataccaaaaaaaatgaggaggcggctgagcagctcgacacggcataataacaataaaataagagtggatgatgaaggagagagggcggcaaggattcacgctccttaatgtctccacagttgacatcgccaagtgttggcggatttacaggcaagttgggctggattttggtatggacttttgattgatatattttacgtacggtgtttggaagagacttacggcataaatttgttaagcaagacaaatggcgcggaagcgaaattggaaacattttaattctcataaaacgcttaaagagggcaaccatatattttgtatttttgaaatccagaaaagcaggcgaaggaaacatatgccagctgcactagacatatccattaaatcattgtaactccttaatcgataatcaaacaatatcat

SEQ ID NO: 37541 - DNA, 663 bp, DROSOPHILA
atgaaccgcatcgaccttaccctggacgacatggccaacaacaagttcctcaccatgtacagtactttgatcaagagcttcgctgcctccacggagttttccaccaacgaagtggtcagcttgctgatcgtgttttacaagtacgccctgaacaacaggtcccgcatgatgtccaccagccagctgtacaatctattcctcgtcagctttgggatcttcgacgtgaccatcatcgaccggatttcgatgaatatcacgcaggatggccgatcagtctctccagaagcctggatgcggctgttctgtgtgttcttcaacggaagtctgcaggagcgaatgaagttcgcatttgaggtttatacaagcggtggtgctgtggttctgaatcgcgaggtggtcggcgtggccattgaacaattcttcactggcgatgacgacgacgaggtcaacgaattgcgagcggacatgtgcgagttcatattcggaaaattcgacactgacaaggatggggtgatagcgtttgaagagtacgccgaaattgtacagaatcagcctggattgctcgagtttttgggtaaaatattcccggatgacaaggacagatcactggtggcgtactgccacaacattgagtctatgtttccgccagaaggtttatattaa

SEQ ID NO: 37542 - protein, 220 aa, DROSOPHILA
MNRIDLTLDDMANNKFLTMYSTLIKSFAASTEFSTNEVVSLLIVFYKYALNNRSRMMSTSQLYNLFLVSFGIFDVTIIDRISMNITQDGRSVSPEAWMRLFCVFFNGSLQERMKFAFEVYTSGGAVVLNREVVGVAIEQFFTGDDDDEVNELRADMCEFIFGKFDTDKDGVIAFEEYAEIVQNQPGLLEFLGKIFPDDKDRSLVAYCHNIESMFPPEGLY

SEQ ID NO: 37543 - DNA, 2686 bp, DROSOPHILA
caaattctgcttctcatttctttttttctctgtaaatatggggcaccattaagctccattttgatacttaaaactttgcggcattgctgcttgtggcagccgcagcagcagcaacatccgcagctgcagctgcagcagcaactccaacgacgacagcaactacaactcgcgcccagcgaaaggcgacgtaatttttaatagtttcgcaattaaatcgtaaaatttaacaactttgcgcacttcttaacgaaattgcgcagccagcgaaactgacactgatgcatttccggttagccagcaggactacggggacgtggagggggtaagcggcgtagggagtggcaaactgcattgcgcttaatgagaaaatttcgcccgaaaaaacttttttaccccacgcgcttttcatgctgtttgcgttgatgcgttgtttgcttgtttgtttgttgctgtcgctgctcaacttttaactttcgctttcacatctttattttcgaattactttgctgctacgcttacgtatttttaaacaagcgccacattaattatttcactccaacaaaacagagttgaaaacactgaagaaacttgtagttttttgctgttcatgaatcaaattgaaaatttacatcaaaagtcgaaggaaaattagacatttatattttacttacttattatattgtagcggatggatttaacaatattttcaattgaacactaaattctccatgtttttgctcgcagtaagcattgttacgcctatcagaattagtctgaaaagcacaaagtccatatgtagaaactaagtaacaaggtgcccgttgaaaagtccaaggaaatgagccaaatcagcaaactaacccacataagccgcataagccaaaacaatcagtcggacgggagtgatgaggataagtttcgccgtgcgaattttccggtttacccaaaaccgctacctgatcgagatttgagctacaaagctgacgaaaatgagttcacaatggtggagaaggcgtccttgcggaatgcctggcgtttaattgagccatttcagcgccgatttggcaaggaaaatttttacaggtattctgcactgatttgacttactagctcacatctcatttgagcgacctagtttccttacgaggaacgaggatctcataaactttttcaggaaagatggaaagattaacctgagtaagctgcacgggcatgccatggcaatgatgaagctgatgtcaaagctggtccaaacactggattgcaatctagctttccgcttggccttggatgagaatcttcccacacatctgaagaatggcatcgatccggattatatgagggtaattatttttttaaacactcatgcactttcagtaaaatcaggaaatccaatttaagagtgaatacttgtgagggttttacacttttgtttcaatgtttccttcttctccttaaattaaattcaagatgctggccaccgcactgaagagttatatccttgcgtcttccgttatcgaaaatcacaactcatgttcactaagcaatggtctggcccgtctggtggagatcgtcggtgagtacgccgttgtggatgaggctagaaaaagagccatgtccactgcccttaggacgactgttgacgatgctggcaatcgcattgtcaaggttgctttaggcacttaaacgggaacaaaaataatgtaaatacctatattgtacagacattgcttgcagtaaaaagaaaattaaaatgtgaattcgaatttatgagcttactattgtacttcttaagagaaatcatattgcatgaaaggaaaaatttcaaatgcaagctatttaattttaccaatagtgtggtagatgttttggtagaatgttttggaaattttgaaattttaaaaatgtagaaagaaacgatagattttgttagaacccttgatttaagccaatccttggttttccatactttgccccagactcagattgccttgcatccctggacaaaggaaacgagattttttttggaaatctccccgtgccatgcatcacagagggaccgttgcgaattggcaactaatctaaggcctccgcactcgcatgcatataaatccagcaaccacagacagattttgccacagttacaggcggtgaccgggcaggcacctcaaattaaattaagccataatttatttcccatggagacgggcgaggagacaccagcccacagagctcaaaattcaaatgcccaacaaaaatatggcactaagagctgctgcttctgcagcggttaaaacacgcacacacacaaagacactcggggaaacgaggagccagctgagaggaggatttattggaattccatcaatggcgaggcaggaactcctctgttcccgattcgcatggcaggcatcccactgtgaccagcacgaactctaactgcaggacatgctttggacatcagtgatgcgaagtggcgactacgaaaggaagctgaccggaaggacagcaaatagcaatctcgctaaccttttcaaaaacgtgcaacatgaatgtactatgtgtacattgaaacgaatttgaatatcatatgattatcatcatgaagtaatctttactgatgttcaaggatcgctcctccccaacaccttttgatcaactgtctgtgcttaaaaaaaggactaaa

SEQ ID NO: 37544 - DNA, 468 bp, DROSOPHILA
atggtggagaaggcgtccttgcggaatgcctggcgtttaattgagccatttcagcgccgatttggcaaggaaaatttttacaggaaagatggaaagattaacctgagtaagctgcacgggcatgccatggcaatgatgaagctgatgtcaaagctggtccaaacactggattgcaatctagctttccgcttggccttggatgagaatcttcccacacatctgaagaatggcatcgatccggattatatgaggatgctggccaccgcactgaagagttatatccttgcgtcttccgttatcgaaaatcacaactcatgttcactaagcaatggtctggcccgtctggtggagatcgtcggtgagtacgccgttgtggatgaggctagaaaaagagccatgtccactgcccttaggacgactgttgacgatgctggcaatcgcattgtcaaggttgctttaggcacttaa

SEQ ID NO: 37545 - protein, 155 aa, DROSOPHILA
MVEKASLRNAWRLIEPFQRRFGKENFYRKDGKINLSKLHGHAMAMMKLMSKLVQTLDCNLAFRLALDENLPTHLKNGIDPDYMRMLATALKSYILASSVIENHNSCSLSNGLARLVEIVGEYAVVDEARKRAMSTALRTTVDDAGNRIVKVALGT

SEQ ID NO: 37546 - DNA, 2495 bp, DROSOPHILA
aataaaggaccagagggataaaatcaattgctttggttaagagtaagggagattcgatgggtctggctcggttcgttttggatcagccaaaattgccagttaattggcaattcagcaaatagcatgcgttttagcggacctttcgcattccgccaactcatcgacatggctgcgtcccttggacgttggacaatatttggacccacagggggtggaaagcatcgccagccgacccgccaaacaacaatcaattttaatgaacggcattcattaaaaaactttgctgtggtgcgaaaatcatgatggtgacgttgtcgcccgccagccacttaaacgtcattgattcatttgaaaccgaaaactggcatttgccaaacagacaagtacgagtgtgtatctgaagctcggatgggttgggaaaggcaaccgcaggacgggccatcagatgcagaggtggtcaccacccacttgaacggccagtgtggttagacctccttcttcgcctgctcctgacttggcggctttgtgtgtatctggcttaaacaccatacactcatttgccacatttccggcaaacgatgttaacttgtcgctgctggcttcacttttgctttttgtttttaccaccagggcggtgggaggtaatcatttagttatggaaacttgaggaccttgcaagcacagatgcgtcttcaatggcttataaagtatttaagaaatatgtatagtagatcattttcaattgaccattttattcattaagactatttatttagcaaagaaaaagcaaccagccacaccccaaaaaacaattaaatttaagcaattttctgcgcgagttttaaactttatttccctctttccattttgacatctatgtacatacatatgtatgcaaattaaagctggatgtttgcctccagctttaatacccaatcaactaacacagaccacccaaaatgtcctcctcccgaacacaaacacccgaaccagtagcgccatgtacgtgacatgtgctttggtgaaatcgaagcccgaaattgtcatttcgattaacaagaaatccactttcctcttactttttctcccgcttctctgggccgcccccaaatcaattttagcatcgcacacacagacgtcggcggaggcggcaggcggtcgggtatctggacccggagcaggaacatcagaaggagcaggaacctcatcggcatcggcagcctccacggccatcagctccgatgagagcggcgacccatcatcggcgaccgcgttctccagtttggctcaagtgtcctcgcttctgccggaggcatccgctctgtcggcgacatcgggactcgtggagccctatctggatggctacgccacttccaatgtgaccactcagatcgggacacacgcgtatctgccctgtcgggtgagtgccgctccagctaaaccatttcatctccaccccacatcccatctcaatttgccaagccaaacgagctaaagcgacagaaaaataaattcataatttacatctttattgtacagtcgtcactgcctaacccccctaactgaactaaaaacttaatttatgtttatacaaaagcagaatttaatttgttagcatataagttttaaattatatttcattcttttttatttcgtaaaagtaagaaatattacacagatcgtgcccataaataactgcaagttttcgaaagttcaggctaaccaaagcttccggttccacacacttggttcgccgtaggcgatttcacccgtacattcgcaaacaaagttgcgtgctgttttgcggaggtgcgtgcgtgtttttatttgtaattattactactattgttgttgtgactgccctcatcaccgtgacctgcccgaggtccacatagaaaacccattaaattttattgcgcaaatatttgtgggatggccggaacattttggaggggcgcagcacgatggcggtgacagcgacgaggatgaggtgtgaccgaccacagactgtgcatttaacgcaaggctcaaaaacaaatgccaaacaaacgtggccaaggcgctctcaggcgatttctcacacgctttcccattgtttgcgcaggtgtttaaaggccaacggaaagatccggggaaaagccatggtcaggggcgtggtggaatgtaaagtgccaggggcacgcagtcgagcaaattgtttgcttacaagttgtaaatattttatttagcataaatgaaaagtgaaaattaaatttcaacaaattacttttatggcatcgcaattggtgccacgttttcggagtctaggtcagccacgttacgtgaccaatttgccaatggtcctgctaattattcagtatttatttaatttgggcattggggcaggtgtgatcgtctttcaaaatacctcagacactcgtttgaagattggggaatatacaaacacgaaatgtgtagattgccggtagaaccctcgagcatagcgctgggattaa

SEQ ID NO: 37547 - DNA, 495 bp, DROSOPHILA
atgtacgtgacatgtgctttggtgaaatcgaagcccgaaattgtcatttcgattaacaagaaatccactttcctcttactttttctcccgcttctctgggccgcccccaaatcaattttagcatcgcacacacagacgtcggcggaggcggcaggcggtcgggtatctggacccggagcaggaacatcagaaggagcaggaacctcatcggcatcggcagcctccacggccatcagctccgatgagagcggcgacccatcatcggcgaccgcgttctccagtttggctcaagtgtcctcgcttctgccggaggcatccgctctgtcggcgacatcgggactcgtggagccctatctggatggctacgccacttccaatgtgaccactcagatcgggacacacgcgtatctgccctgtcgggtgagtgccgctccagctaaaccatttcatctccaccccacatcccatctcaatttgccaagccaaacgagctaa

SEQ ID NO: 37548 - protein, 164 aa, DROSOPHILA
MYVTCALVKSKPEIVISINKKSTFLLLFLPLLWAAPKSILASHTQTSAEAAGGRVSGPGAGTSEGAGTSSASAASTAISSDESGDPSSATAFSSLAQVSSLLPEASALSATSGLVEPYLDGYATSNVTTQIGTHAYLPCRVSAAPAKPFHLHPTSHLNLPSQTS

SEQ ID NO: 37549 - DNA, 2695 bp, DROSOPHILA
taatattcttttttgtgagccccaaaactccattcaaatggaccgaaaatcccttgggatcagcgtatgattagcccactttgggagcactcttgcttgcacccaaccaagcggagtattcaagtggccaatatcagtggaaaggaaggaggaccatcatacagcttcctccacaacaataaactgcaaatggtaactcatgccgggtcgggtcacttcgtagtacttgaaaaacgagcagagagaccgtggaaagccacaaaatacgggcagggaaaaaggagttgctgcaaaatatacggcaaataggggacaacaaaaagtaggagcccaggaagagtcgagggcgctgagaaactttaaaatgaaatgaaaattataaagtaactacaaaatcttgataagacatacagcgcggggtgcacagtttaggtggggaggacaaacgggacaccgaggaaatggcaaaagtcataaaatgtcgagttttacgagtgcaaaacgcaagggtctaatctgggtttagcatcaaaacttgttagtggggtggaactgggcgaggagggtcacacaataagcaatgtcaacgcatgtgtgcagtgggcgtggccattcgctgcattttagccaaatgacggaaacatttttgcactttaggcaaagtgcagggggcaattcggtagcctagagtcccggaggggcacacaactaggaagaaggaacaaaaatatcgcaacaatgacattaaacgcaacttattttactactgacttcggccgctccccgcacaaaaacatttgcatgctgcctgccccaaacacgcaactttgttgtcaactctttcccccccaacactcgccgtctctttcgctagttgccgcttaaatgccgcaactaaataactttgagtgtcttttgagtggccattagtagcggacttagcgaggactccgctaagtggctctgccgccattgttcgtttgcttagaatttatgctatatggcgcatgggtacttaaagtcagtccaaatggactcaggttggcggcttcctggagttttcaaaaaaataataatggtgtggctcagttttccaggctaagcttgtgtggtttttcacctctggccataaaggtttttaaaaaaagtaattatgccatttataaagtgacggattatttcaatatgactatcattgtagcataataacttggttattttgtaagattattaaacctgcatatatttgagctttagtgtgaataaatcagttaataaatcctatttaccggttttaaataagtattcaatgaatcttgcctaagacacacgcaaactcagttagcaaataagctgtgcccacgttctcatgattcaaacatgtgcaacaagtgtgaatattcaaccacatacatgtatgcttctgtgaaacactgaaattaaattaaaacttataacttgcgactaatttgaattttgcataccgctttcagggccgtcttcatagccgaccagcgattcctggccatcaagcagccggacaagtactggaccctgcagattaagtacgtccaggcccgggacgccggctcctacgagtgccaggtctctacggagcccaaagtcagcgcccgtgtccagctgcaagttgtgggtaagtcaaaaccaagaccaagtccgagaccaagaccgtgaacatgagcactaaatgccagggcttatgaatatgagttcgcacttggacagtggaagttgggttctgggtgagttgagcgcataatttgcgggtatcagggggtaaaggtcaaacggcagcatatgcgaaaacttttcagcccgcttacaaaaggcagaacagagcagagccacacatgggccgagatctttgcatgtttcatgcggcaactgcatttcaaatttctcactaaattgcattcaaattgcggctgctgaccattggccattgaaatgctcgaaaaacgagtgctaaaaaaaagtaaagcagagcacacagacggaacatttctttggtcagtcaagttttttaacgagaaaacttttacgtgctgggctctggtttcgttttggtttcccagacacacaaacacacacacacacccaagcacccgagcaccgagtaaaaagttaattaaatttcatgtttgcataccggaagaaacagcatcagcaggccaaatgaacaatgtaaatgtcagtcgagggcatccgaggatgttctgggccctgtaattgatatgaaatttcccggctgtggctatggctcacatatctggccggcacaataacaaccgcattgcttggggctatgacacggaaatcagtgcgaatatattttggccacggctattgggcttcggattcgaattcggtttcagcaacggattttatctatgacacggatgcattcatttgaaacgattccggctgcaacttcgccagcattgatatgtatgtatactgatgcccgtcctgcggctggaggtttggtttacgaaaaacaacgtccttcgaccagaattacaccatcatttcaaattctttgacaatttaaggtcaatttagcccagctcagatggcaacgaaaagaagaacgccaggcagtgaaagtaaaaagtcaatttgcatttgaagccaacaaattgaatttccttttatccaactaacactttggttt

SEQ ID NO: 37550 - DNA, 213 bp, DROSOPHILA
atggcgcatggggccgtcttcatagccgaccagcgattcctggccatcaagcagccggacaagtactggaccctgcagattaagtacgtccaggcccgggacgccggctcctacgagtgccaggtctctacggagcccaaagtcagcgcccgtgtccagctgcaagttgtgggtaagtcaaaaccaagaccaagtccgagaccaagaccgtga

SEQ ID NO: 37551 - protein, 70 aa, DROSOPHILA
MAHGAVFIADQRFLAIKQPDKYWTLQIKYVQARDAGSYECQVSTEPKVSARVQLQVVGKSKPRPSPRPRP

SEQ ID NO: 37552 - DNA, 3394 bp, DROSOPHILA
ctttgcattttacacaattgattacagaaatttttatttattttttttcatttttactataaaactatttcattttccattccattttccatttcattttccgagtgttaatttacatcttttgtaattaccagcctttgttatccgattttgccagggtaccacagaaatacatagttgcacttcgttgtacttgtgaaaatgaattttaaactgctgcttttacatctccgagacttaattagagccatgtgacagtcgcaatttgctgactggaatattattccctcaccggcggagataaaaagttgcgtgggtgataaagtggaacggttgctaataatattgcacttgctgctgcttcagctgccgcacttcgtatactgttagtccattttttgcatatgtattttttgctgctgtgtcgcgaatctccagtcaagcagctggaaaacaaacatgcaacaacatgacgattttgacaagctgacacaatttggtgtcaaaccaaaacgtggcgcgtgctccccaactacagtacgtactggtactacactgccatgcaggagcccacagatacagatactctggggcatagtcgggcattttgtgtaaattctcggcgcactcattttgcacatttttgtgtaacagcagtgaaaactcggcgtatacgtgattttgtcaaatttcaaagctcacgtcgctccacgctgccctagcaatgaagacgcccagttttcccgcttttccagggtgccgaggggatggtgacgccgcggggcggcggaaggtcgtgtgaaaatgtatgcgccaacatttccaactttttcgtttgtgtgtgtgctctccctattcaccgtcttttttgctgattttcttcaatttttgtttgacacaactcttagtttgttatgcatgtgcgtgtctgttggccaaaaaatcacccgggtgccctgaactggagcagtctgtaagggtagggggggggggggggagaatgggcgtagttcaagctggaatcagtaagtgaaaaattgaaaagtggattttctttggaggcggagtgtcgccctgccacagccagatttacgtgtgcgacgtgactcgtagctgttaattcaatagattagcgaaatgacacaatttcagagcgccgaatttgccacttccacttatccgcactgttcttctacactcttccccgcatgccgcagttcctcgcacggagatcctaggagagccggaccgctacgtgaaggcgggcagcaacgtggtgctccgctgtatcgtgcgcggagccttggagccgcccacgttcatcatgtggtaccacggcgccgagcagctggcggccgactcccggcgccaccgcacgcaactggatcccaacctgccggaggcctccggcgaaggacagagcacggtaagtgcacagtggatacttatttgttatttacttgtgtagaccataacatttttgagatcctaattaatagcatcaaactaaactaataactttatgccattatgataaatttatcactttaaaaatagagtatccttgaaattattcacttaccgagaaattttattgatgtaaattatttaatttccgtatcactatggtaatgaaattaaaacttatgccatccgtagctcaaagcatcttccacttggccaggtccaaaagattcccttgttaattttaatttaattacactcaacttcgaatggattcttggctgccgttggcaagcgagaaatattataatattgttacgcaaagtttcagttgtgtcgcatttctcctaattgcctggccataactttctttccctgccgcggggcaaaacgtcagttccggcacatggccgatatttggagtacgtgtgcccatgtccgagtgaaaactgcctgtgtttatctttttctcttccgaacttttccttggctcttaaaatatagtacgtaactcagtgggcctgtgctgttttttctctcctccagattggctcattaatcatcgagtcggccaagaagcgcgatacaggcaattacacatgtagcccgtcgaatagccccagtgcgaccgtaacgctgaacataataaatggtgagttgcagtccaggcatttgctcgcaaaaaacttccaatagaagcaaagtatagatattaaagtcgtactgcattgctatacaaagttttccaaaatattatcagaatgccttaatgttagtgtcagtgtgtgattgctccctctaattgttttcccaggcgaatcgtcggcctcggcggtaacatcctcggcagccaccacccgggcctacgccctcagcatcctggcgctcctgcttagcgtcatcctcatcggagtgggccaccgcacatgacatgtcaatgccagcaagccaaactgaatggccggagcgaaagcagctactagacagtgagaagatgggggaatcccaacactctgccaacgtaaaaagtaaaaaccaaatacattcgataggcccaaatagcaaaagcgagaagaaaggagagatttaacgtaataaccgagtgcatgttgtaagctagttgattttatccactaactctattaaccaatacatatagaggatgagtccgtatcccagacagttttgaaaatcccgagccccagttaatcgtaagttctatcggctctaagcgaactagttagtaagcccctagtcttaggctgactcctaactgaatttgttacgtagttacgtttgggtttttctgttcagttcgtttcggatcggtattgtttggttgcgggaatggcggggcctatgttttgtggaaaataccgagtaagtttgcataaatgaataacagtaaatatttatgcagtccgatgtgaaactgcatcgatatcctgaaaccattcggaccgcatgggcgagccggtcaggaaggggaatcgggatctgggaaattcctgccatcaaacgaatgccattttggaaaaatgctactcgaattcatttgcatggcaatttgagtctggaacaacatttgctgtctcctttctatgcggcgacatgctgaacttttcaattagccatatctcccgcacttctcgcacagttttcgtccaccacctcctcgttctctctctctctctctctttctctctcactcacacacggatgccggacagttttgaatatttattatttttagcaaatactagactctggccggtgacctcgtttctggtcaggggaaataaaacttcttacgccaataaatttgaaaaattgaataggccgtcccagggatcggagaagttctgaatgatttccaaggagtatattcagcattatctttggcaaacatagcacccacatattcggagtc

SEQ ID NO: 37553 - DNA, 456 bp, DROSOPHILA
atgggcgtagttcaagctggaatcattcctcgcacggagatcctaggagagccggaccgctacgtgaaggcgggcagcaacgtggtgctccgctgtatcgtgcgcggagccttggagccgcccacgttcatcatgtggtaccacggcgccgagcagctggcggccgactcccggcgccaccgcacgcaactggatcccaacctgccggaggcctccggcgaaggacagagcacgattggctcattaatcatcgagtcggccaagaagcgcgatacaggcaattacacatgtagcccgtcgaatagccccagtgcgaccgtaacgctgaacataataaatggcgaatcgtcggcctcggcggtaacatcctcggcagccaccacccgggcctacgccctcagcatcctggcgctcctgcttagcgtcatcctcatcggagtgggccaccgcacatga

SEQ ID NO: 37554 - protein, 151 aa, DROSOPHILA
MGVVQAGIIPRTEILGEPDRYVKAGSNVVLRCIVRGALEPPTFIMWYHGAEQLAADSRRHRTQLDPNLPEASGEGQSTIGSLIIESAKKRDTGNYTCSPSNSPSATVTLNIINGESSASAVTSSAATTRAYALSILALLLSVILIGVGHRT

SEQ ID NO: 37555 - DNA, 3190 bp, DROSOPHILA
agcattttaatcgttgctccttgctgcaagccctggcatttatgtacttatataccctgccggcagcccgctgctctgcgatccggccactttgccagccagtgggctgtggtgaaggaataattggatatccttgttacttatttacagtccttctcggcactgcactgcaactgccccactctgacagctccgactcggacttggactcttgcagctccgagggctgcgactgacgttgacgtttgttagcttttcaaaatgctttaagtaagtttaatggcttccctaagctgtcccgaaagtgctgcaaagtatccatggcaatggagcaagctgggccgtaaatgtttcactagatgggcgtttttcatttcctactaggcagccattttatacactatttattaccgtctactcatgtgaaataattttgtgtctataatgtacctgttttttattcggaataaacttaaatgtacttcatttcaaccatagtttaatcaacaacttatcttaaattaaattgaatggtttgatagtgatgtattgaatgcaaggataggtcccaatagtgaagtataaaaatgtactggactactaataatattttcattgggattagattagaatttattagatttttgtgcagatatttctaaccttttattattaagaggcccaattatcattaatttttaaaggcaattcgctttcttttgagttctttactttgtagtaccctttacatattccccatcacctttcccaatagcaaacatctgttgactttatttattatcctgtgcaatccactgggtcaatgatacgtgcctcgggcagtgtgtcttccaatgcactgtaaaattcagttgattgcttcccatgtttgtatcctcgtttcctcgtgccgtccacacccgctgcagaaatccggcaggatgacaaacaaagacgccaattccagatatttttttaccaactcgctgtgcttccgtgtttagcagttctcggcttccgctgttgcttcacttgctccctgctgctcctcggaatgctcctccgcccgcacccacatccatactattccgatgcgcttttccagcccgcaggatgttggctggggacgaagacgaggtcgttcagcaggggcgacaatctcaaatgggaattagcgcggtctataataaggatcgccgacgcaatcgccgggcgcacaatcattggcctgtgtaaacctgcacttacgagtcctgcatcctgcggaaacgccactgtgcatcccagctgggcgcaaatggtggcacgctttgtggagctttcgcctcgcgggctaattcccaaatggatgtttagtgtaagtcgacccacttcgcccctttccttttacagggtactcgaggcactaagagacttactatggttgcggaatgattttaaaaaccaatgcattacttatgcttcggcgtattaaatgtagtaacttatggtaaatatggtaacttatgtatggcctatcaaatgtagtaactaaatagggcaaatacaaatcaacaatgatttcttaaattatgaaaattggcccaatcttttcgtcttaaaatgcttttagtgtcacaaaaccctattaagagagtggttattttctagctacaaataatttattttatagccataaatcacttatgcagaatatgatgtaagatggaacgattatggtaggaacgattttgacagttatttcatttgttttaaaaattgattgtcaactacacgttttataaaggtaaagaaattcaatcattaagaaataaatgttttatgttattgccttctgattcctctattgaccaagacccactataaagtacagggtatcccactgttggatcacttcccctcaaccttcttgggtgtctccacgcgggcattcctgtcgccagtcgccattgttcgcagctttagccgcgtcctctttatgttttgcttaatttctctttctctttcgcttgcttttgtttttgtggcggctttgggtccagtcttggatccagcgtaattacgttgcttgttattgttgacaaagtcgccatcgccatccccgccattcccgtgaccattcccaacggcatcgccatcgccatcgagtccctccttcacagatttagagacccaactcgagtcgcacattgttgcttatttctgcttaaaacttaatgacacttttagttaattatcgcggtggatttgcaaaattaagcgattcgggcataattacaagggattatgtggccagattttttccactcctccctttaagcccacgatcgcagtggttgaaggacctgggacagcagatttccattttgatggggcataaattaattctgccttttcggttaaacacaatttgccattaatttaaaaggtttgtttttaaagtagcttgactctaaatattttaccacaccttggccctttaacattttcctctctttgtcctctttcttggccaagagtgcagcaagggcaacttgagcaaataatttgtgcgttaagcttaacgcaaacccacacaaaaaagagaaaacctgaaaccgcaggagaaactttttagacaacaatttcgcaaaacttttcacaagtgctgcaagtcgtacctccagcagaggagaagaaggatgttggcaaaaatgccaaatgtcgatgtggatgtggatgtggctgcagatgcgaatgagaatgcggcaacttgtatttgcccacttagacaacgaacgagttaaaatttataggtatttcggccaaaatctcgccgagtataaaccacttaggctggggccccgaaattgggcgtggccagccacttttcgagcattctcttacctcgaagcagcagcacttttggctgccgctgcactcgcagcgcataaatcagccatgaggagcaaccaagtggcaggaccccggctcacgcgtatgtggttatgtgagtgtccacgttcgtgttaccaaaaggcaggtggcacagccgaaatggttcttaagactgccgagatatgcttaaatgcagatgcgtgcagttgcagcactaccatacccagtgattttatttcaggataagtaaaggttttaagtgatggttaactttctctgcaagcgtattgaaacacatgatagcaaaaataat

SEQ ID NO: 37556 - DNA, 501 bp, DROSOPHILA
atgtgcgactcgagttgggtctctaaatctgtgaaggagggactcgatggcgatggcgatgccgttgggaatggtcacgggaatggcggggatggcgatggcgactttgtcaacaataacaagcaacgtaattacgctggatccaagactggacccaaagccgccacaaaaacaaaagcaagcgaaagagaaagagaaattaagcaaaacataaagaggacgcggctaaagctgcgaacaatggcgactggcgacaggaatgcccgcgtggagacacccaagaaggttgaggggaacccgcgaggcgaaagctccacaaagcgtgccaccatttgcgcccagctgggatgcacagtggcgtttccgcaggatgcaggactcccaacatcctgcgggctggaaaagcgcatcggaatagtatggatgtgggtgcgggcggaggagcattccgaggagcagcagggagcaagtgaagcaacagcggaagccgagaactgctaa

SEQ ID NO: 37557 - protein, 166 aa, DROSOPHILA
MCDSSWVSKSVKEGLDGDGDAVGNGHGNGGDGDGDFVNNNKQRNYAGSKTGPKAATKTKASEREREIKQNIKRTRLKLRTMATGDRNARVETPKKVEGNPRGESSTKRATICAQLGCTVAFPQDAGLPTSCGLEKRIGIVWMWVRAEEHSEEQQGASEATAEAENC

SEQ ID NO: 37558 - DNA, 3029 bp, DROSOPHILA
tgacagtttgttagacctaagcggcgtacatatatgaccataggcaagtacgatacaaatcgaaatcaaaatacatttctaagctcttaagtgtttttcatcaactcgattaacgtgtagacgccattcgtgtaattatcaacacccgactaattgtaaataaatcgcattaaacgcaaaagtcccaaattcgcagaggtgtggacgttaccttttaaagacagacactcgaacacacgtgtactcatgatatagcaaagtttaatgttaagtaccgactaataacgaaaatacttacatacacatatacatatgtaaacgaaactaagaactatgtgaactttaactgacaaatttattgcattacatacaataaaataatacaattgaataacttaaagaagtcttttcattggagtttaagaaaaaaaaagtccaacacttatggtaagtacaaatttaaaaaaaaattattcatttatttatttatttaatcataagcaagatttattatacatctggtacatacagcaatgtgcaaaatagttaaaatttttatatgcaaaccacattttaaagcattcatttagttatctgaaaatctaagcttaaaatgcctttttttttaagccacagaattatttatcattactagtttttttcccatacatcttaaaaataaaacatttcaaaattcactgacgggacagtttttgattttctcttcttatctttaaaaccttatatgattaataaaaaataatcacatagtgttcattataggaacccatttctgataacaacatgttaaaacaaagcctgtatattttaattttaaaaaattgacagacaccttaaaagttacaaggacaaccgttattttatcacttatattcagttttctggttattcttgtgttaccttcccaaatgctcaaactagccacacatgatgatatgatgaaaatatgaaattgattcgatgcgatgccggggaactattagtttggaatttggttcaccacggaaagaacggggcaggtctttttgataatgatacgacggaggtggtcgttgatggcaaatccgcgaatgacgttattgagcattatgcctaacacctcgcctgtgctgtcatcggtcatggtctgaggaacgaagtggttcacggcatatgccattacaacggccgacttcctgtccatgacaatggcggccaccaggcgaccgatgctctgcggtctgctctggggagtttccccatcggtcatgaattccttggccaaggcgagacccttggcaacaaaagcaatcgtgtcgtcgtgcacataagcgggggcctctaaataggcggccgccgaatgcagcaggatgcaggacacctcctccatttcggcccagaagacgtttcgtgaggttttgaagtgacgaggacaatggtcggcatgcaagctggggatcgatggcggcgagtatgcctggaagacgaagtcatggctgtgataacagattacgcctgtcacatcggtcacttctccaggtgaatggctaatagtatcagacgcgatcgtcttgtaggttacattgtttgcattcaagttatctccctgctctgcaaagaatcccgaatctggaaacgtgaaatttggaccgtgaatgtagaccataagtttttctggttgaaagagctcggtattctggattagggccgaaacgtctacatcgtaagtgacattttttttcctcgaatcgtggtctacgacctcgtttaaattctcttctggagtcatttcattctcgctatccgagatttcgtaaattataggagtgtccattacttcctctaaagctccgtagtctttgacgtcggctagaatctcttctggggtcacgtcctcttcgctttgccagacgtcatcatagattggggcaggatcctccccgaaattaatttcattgtcgtaaataagtaacaattcatcttcagcatgcgcaataaagacttggtcacaaacaatgtgggtatccattgtataagctatttatagtattaattatcttattgtcaaaaaaaaactttcttccgaaacgtgctatagccagggatggagatacccacttatcgataaaactatttttctgggtgaatggcgatattggggattagttatataatttaatttgtaaagttagaaaaaacaaatattgcgtttttcatacactgttaaatatgtgattccttggaaatttaacagcgattgttatcatttttacaagcctgctacacgaagttataaacacggccatattgtttacgaaagaactagtttcttaagagttttctccacatctcaattttataagatgacaacactgcttaatcgattttaaaagcagaggtgatgaatagcaaattgaccaaatatgagatttaacaatcatcaatttaacgcaatagtgcaacaatcatctgagtggtagaaatattttaagcttggtgtttgaaaaacgaataatgaaatgttaaaacattagtgtcggaatgtgaatggaaccagttttgggtgtatttacaacggaaatataaaattaagccatccgagccaacggggtggacaatggagtcaacagtcgggtcaaggtcgactcgttgtctaattccaggcgaggcaacaaggacaaacgtgactgaaaggattgagggtttgatccggccattttccattaggacagccgacgtcctgcaattgttgtcgaccgcattgtgtctggcaaataaattaaaacggggaacatcgagagatttacaataatagtagcccagaacattaataaaacggataaagttcgtaatctgttggcatgcatgtatgtatattaggaaacgtaatagaaacaaaatatatgtagttcgttcttctggaactatagcattcattttcatttattgattattttccagtgaaatttaatttactgtaagttacttgaacgttacttgagagattcagagatccttgaacatatttt

SEQ ID NO: 37559 - DNA, 1029 bp, DROSOPHILA
atggatacccacattgtttgtgaccaagtctttattgcgcatgctgaagatgaattgttacttatttacgacaatgaaattaatttcggggaggatcctgccccaatctatgatgacgtctggcaaagcgaagaggacgtgaccccagaagagattctagccgacgtcaaagactacggagctttagaggaagtaatggacactcctataatttacgaaatctcggatagcgagaatgaaatgactccagaagagaatttaaacgaggtcgtagaccacgattcgaggaaaaaaaatgtcacttacgatgtagacgtttcggccctaatccagaataccgagctctttcaaccagaaaaacttatggtctacattcacggtccaaatttcacgtttccagattcgggattctttgcagagcagggagataacttgaatgcaaacaatgtaacctacaagacgatcgcgtctgatactattagccattcacctggagaagtgaccgatgtgacaggcgtaatctgttatcacagccatgacttcgtcttccaggcatactcgccgccatcgatccccagcttgcatgccgaccattgtcctcgtcacttcaaaacctcacgaaacgtcttctgggccgaaatggaggaggtgtcctgcatcctgctgcattcggcggccgcctatttagaggcccccgcttatgtgcacgacgacacgattgcttttgttgccaagggtctcgccttggccaaggaattcatgaccgatggggaaactccccagagcagaccgcagagcatcggtcgcctggtggccgccattgtcatggacaggaagtcggccgttgtaatggcatatgccgtgaaccacttcgttcctcagaccatgaccgatgacagcacaggcgaggtgttaggcataatgctcaataacgtcattcgcggatttgccatcaacgaccacctccgtcgtatcattatcaaaaagacctgccccgttctttccgtggtgaaccaaattccaaactaa

SEQ ID NO: 37560 - protein, 342 aa, DROSOPHILA
MDTHIVCDQVFIAHAEDELLLIYDNEINFGEDPAPIYDDVWQSEEDVTPEEILADVKDYGALEEVMDTPIIYEISDSENEMTPEENLNEVVDHDSRKKNVTYDVDVSALIQNTELFQPEKLMVYIHGPNFTFPDSGFFAEQGDNLNANNVTYKTIASDTISHSPGEVTDVTGVICYHSHDFVFQAYSPPSIPSLHADHCPRHFKTSRNVFWAEMEEVSCILLHSAAAYLEAPAYVHDDTIAFVAKGLALAKEFMTDGETPQSRPQSIGRLVAAIVMDRKSAVVMAYAVNHFVPQTMTDDSTGEVLGIMLNNVIRGFAINDHLRRIIIKKTCPVLSVVNQIPN

SEQ ID NO: 37561 - DNA, 6621 bp, DROSOPHILA
agagcggctaacaagcgtgaaatgaaattttgccggaaaagttctgacgcgggaattcaaatgtaggagcagagccgataaaaagtcaattatcctaccataatttaagcttgagatagcataattaaacgataagtgccacaaacattacctaataatatgccgcaaatttgttttcaacttctagatattctttcagacatacatatttactcattcagaccacaagaataccataaataattttctattttgtatttctgatttgcattctctccgaattcagaaacaattataacataactttgtttgtagaatttacatgacttctattcgggaccaacatttaaatgctacaacttaattgtttttaacgtaatatgtacaacatagatcggggttgattttgacttgcattggttaaattaataactttccaaaatgggttttgtacttagttcctagaaacaaaatgctgctccgcttttgtttcacaatctatccttacttagccatatacaaacacgttaagtggatatatgagaatttagaaatgtacactcctttgtggaattcagtataattcacttagccgtaaaaacaatgccgtaattaaatcgaataaaatcaggtgagacaagtagctattgaaatttataattttcttttactcaatcccaaataataaaatacaaactataatatgtacgtttaacttcactgagttatgattctaaaaatcccatacttgttagcaaataatttttaataattggaaaatcattttcaactcaatactcaaatgctgtggcattttaattatttatcgaatgtggcatgcgtttgttttgattttgggtaattatttgtacacaaacgtgtatgctaactcataattaacacccattcaatccttaattttttttgattgattctgatagctaagtgaactatattgagttttgttcctggacggtagctgatgatacctcgcgccaatctataggcatccattgccccagcagccgcaccacggtattttgccgcccgtgtgcgaactgaccgagatcttccggcgattggagcgcatgctgaagctagtggaggactcgcgggaggaggcgaagctgttggagttgcgatcggacagcgaggtgaccgtctcgtggttgctgtcctggtgggaatggtggctgtggtgcgggttgctgctgatcaccattccgctgtgcgggtggtggtggctgtggctgtgatggtggtgtccacctcctgctcctccgctggcagcactgttccggtggacggtgtgaacggtgccctcggagtgccgcctggagcacttggtccgactaacagtggccgtcataggaaccggatcactgccctccttgcgatggtggtgatgatgggtggtgctgggcggtgccgatgcagtggcccctacttcggggtgtccactgctcaccggtattcccggtggagctgacatcgagttactgttggtgcgacgacgcgaggaatgcggcgagttgggggtgctgtgactcatcttgaaagccttgattgccggatgagtgagcactgtgctcaggtccacacaactggaggtagccatgggcacggtagtaacgggcgtggtcacgtggtcgtcctgctggcctccctgtccggatccacaaacgatggatacgcgtcgtgcctttcgccgcgtcaactcgtccatctgaaagggtttccagagtttaatagtctcttgatacaaataattaaagtttaatgaatatataaaatgtggaaaacgcataaggttctgattctgataattctgatatttccgcagggaataaaaatttactggattataatttcgtaaatattgcgttattattactcacatttgcagcagctgacgactggtcacctgccacgcccacctccccatccggtacagcgggatccacgtccagggatctggttaactgcgacggcgatgagcgaaagatggctcttttggcagccgccgaggcgagagtcttgtacaggtggctcttgttgggcggcagaccgattacgccggaagcggaagtggtaggaggtggcgagggaggtggttcagtaggcatggttggcctgcgggctggtggcagcgggggcggtggtttcagcggtacattcggcttggctgcgatgggaggcctctggtcattcggcgattggggaggcactccggacccagctgccgcctgattaagctgctcgaatccgaggtaggtgcatttgtcgggaaacggtgccatggggtccggaatgtgcggtgcagggctgtcggtgtgttccctctccaaggatcgggtgcgtcgcactaatttattgctcccactatttcccgattcgctggacgtggtcaccgccggtgtagttgttccgacttccgttgtttgggtgtccgtggtggcgggtgaaatggtcggatttgtgccgtcatactgcagatacaggttcatttcagagcgatagggtttcttcgccctctcatcgtccttgttattattgtggcttaggttgtcccttgacttgctcttttcgagctgaatggccaatatatcctccgaaatcgtctcgatgtcgttcagaatggactccaagttgaccgaatccgtctgcagataattaagttactaaattagttttatgtactaatgagtttctgaatttaggcaaaaacattgtaacctttttttaggatggggagggttatgacttcccaatttcgaaactaaacgagaattatttttataaaattaatattccgatatgtacaccacatctacggaaactatacaaatcatttcttatcctaaatttttaagttcatatttactgggaacaaaacggaaatctaatgaattccaactaattttaaaaatatccatttaaaaaataccccgtttcttaacgtcaatgaaaaatatacaatggggtactatatgtttttgatcaaatctataaaatcataaatacatataacacttaataataacattctaagatccaaaaaatgttatattcatcaaagatggatgaataatattttaaaaaactatataaagttgataagcaaaaacaaaatattggttaatgaaacacgaaaagggaatttttctaataatcgggattgagatcgaaactaacaaaactaaacaccgattctacgccagagagtgatgagcgggtccggagatggctatgacacgaggatgatcatctgatggccagaggatccctcacctgactgacgttctccgcggacttggccgcccccttggcctcgccaacggccttcgctcgactggccaatcttttgggcgaaggccacctagtggtggtggtcttgttggattgggtggtgatggtcatcaccggctgtgtgacagacgtggccgagatgcacatattttgacacggcttttgtgctgtggcgtagatgggctcgacggatctggccgccggaagcggtgagcacctgacggcagcggctgccgccagagcagcggtgtatatatcgaggacactggagcccgaatgcggacccacctcccccaatcccacggcagcggccacgtccaccacagcccgatgcagggaacagtggcttggctgtgggcgttggcggctacgctggtggctgcgggcgtggcaatgcgaatgagtggaccgtcggtgacgaggacttacttgtggggacacttggcgctgatagggtgaggccagggcgttattcacgaagatatccggtggatctcgcaagggcggcggcggtgaacccggcggtagatcgtcctgctcgagatcctgtccctgattggccagcttggtgttgagcttcaaacgcggcttgatcggcgcaaagaagtgcttcggactgttgagcgcatgctgcgcggcattcgtggtgatggccaccgtttggatgtcgccaccatccgccagatgtggttgtggaggggcattcagggcgatcttgggcatcgtttgcagggtggacgtgggtacaaatgtggtcatcgtgctcacaggtggcggcggcgagcgggacggtgacgacggatcgttgtacttgcgctgcgtgaagggcgattgcagattgtagtcccacccattcgtatgccgcatcgtcttgccggtggtggtgctcgaactggtccccaactccggagagggcgtttgggctgcaagtattttagtttttaggagatgttcattaaataaaattaattaagccgccctattacccacctgcatttcgtgctcccatatgctgcgacaggatgttctcaaagtaggacaatggtggcaccatcgcctgcaggtcgttcagctgattggccacaagttcgatgggcgtcaggggggtaagcggtcccatcatgctgggcagcgtgctctgcgatccgtgggcgtctgttggggggaatatcgtaaggtgctcctgctgctggacgtgcatcagctccgggttactcagcgtctcctcggagaccaccgacaggtgatcaaagtgcatgggctgtggctccttggtctggttgctactgttaccatcctcgtttttagattgggatgagtggctgggcacctccggcggaagtggaggctttggcggcccacaggatccaccctcctggcagcactcgtcgctgcagtgcccgtcgtctgccccgcgacacgtatcacaagagtcagagtccttaagggaaaaggaaacattttagaacaaggattataacaattatcaaaagagagttttaagagaaattggaactaattcttccagatcgaatcaaaaactaagcggagaatctatagagcaaatactgataccacttacatcactattagcatcacaacctccgctcccacgcccaccgccgctgcaccggtaggcgtggcatgtaccgccactgcccccgctgcccctgcatccaccaaactcgtgctcgttgagcttcgccttgaagcgtttgtttagcctatcgcactcgtcccgcaaggtccagatctcccgacgcagttgctcattctcccgccgcaggcgcttgatgtccgattgccctgaaaagtggaggacgcataagtttgactaaatagggaacccagaatgggcagaaaagactcaataggatttggccgagtctaaagaacagcacgtggacatcatgcagagccgtcagaccattagacacctcaaatcgcattgtttacattcgcttatcttctgttttggcaatgaaaacatttttattgaatattccgacagatatacacgaagaggtgggcagatatttatgtacgagtaggtgcgtgtagagatatttctctagctatattatgtaggattattttggtttgctagccaccatctaatgtctttttaattggctgttatcaggttgtttttgggccatttgtttaacgattatttgatttcctgtgtgttgcggtacatgtacatttctgaccagcttttgattagctattatcgtatttggcgtacctcgttccacttctgcattaatattaatggtgcgcagcctgagctcctcattttcgtatatcatgccccgcgaagactttctgtccaatctgaaaggatgcaaattaatttagtaaatatgcctaaaatgccttcgggtcgtttaactaaagctaatcattgccttcgagtgctaagcggttgccattgcgaacggcagccgatcaacattccaaactctttcccaacttggtttaaccgaaaaatatctaaatccccaaaaatgtgggtcgttcttcaacgaatgctgtaagtcaactgaaccagataggtccagcattgctaccaattgttagacgttctcctcgactatatggccgcgggctttcaacactcgccacgtataaataaataataataaaaaagaggcgttgaaggaaaaaaaaataaatataaatatatcaccgatttggtacgcttcgaggtgctgctagagaaaaaacatcaaggaaaaggaaaataagcacagcagagctataaattacaactacgaagcataaataatttattaaatccaatcaacggctgttggcatacgtaaaatcgttaggtaatttttttaccagaatttgttaggcaaataaatatgcacggagatcttcaaaaagagtattccaaagtttcccttgactatataacgcacttcctctttcctctgcaaatcaaattaggcatttaaaagatctattcaaatcccaaatgatccataaaaatgggattctgtgcagattttccataacttacgttttttataccaagcgatatgacactgctgtctgcgttgagaattttttacaaactgccgatcgcttcggagacctcagctcttcgagccatcttgcataaaaaatatttatgaacaaaaagacccacatatatttcaacttacatatcttgtctgggagactgtctcccaaacgaattgtggaatgcgtagatctgaaaacatcgccccgtatttataaggcgtcagaatttttgttctacaaaaatttagccgccaatttcaactcagacaagtgtca

SEQ ID NO: 37562 - DNA, 3171 bp, DROSOPHILA
atgatatacgaaaatgaggagctcaggctgcgcaccattaatattaatgcagaagtggaacgagggcaatcggacatcaagcgcctgcggcgggagaatgagcaactgcgtcgggagatctggaccttgcgggacgagtgcgataggctaaacaaacgcttcaaggcgaagctcaacgagcacgagtttggtggatgcaggggcagcgggggcagtggcggtacatgccacgcctaccggtgcagcggcggtgggcgtgggagcggaggttgtgatgctaatagtgatgactctgactcttgtgatacgtgtcgcggggcagacgacgggcactgcagcgacgagtgctgccaggagggtggatcctgtgggccgccaaagcctccacttccgccggaggtgcccagccactcatcccaatctaaaaacgaggatggtaacagtagcaaccagaccaaggagccacagcccatgcactttgatcacctgtcggtggtctccgaggagacgctgagtaacccggagctgatgcacgtccagcagcaggagcaccttacgatattccccccaacagacgcccacggatcgcagagcacgctgcccagcatgatgggaccgcttacccccctgacgcccatcgaacttgtggccaatcagctgaacgacctgcaggcgatggtgccaccattgtcctactttgagaacatcctgtcgcagcatatgggagcacgaaatgcagcccaaacgccctctccggagttggggaccagttcgagcaccaccaccggcaagacgatgcggcatacgaatgggtgggactacaatctgcaatcgcccttcacgcagcgcaagtacaacgatccgtcgtcaccgtcccgctcgccgccgccacctgtgagcacgatgaccacatttgtacccacgtccaccctgcaaacgatgcccaagatcgccctgaatgcccctccacaaccacatctggcggatggtggcgacatccaaacggtggccatcaccacgaatgccgcgcagcatgcgctcaacagtccgaagcacttctttgcgccgatcaagccgcgtttgaagctcaacaccaagctggccaatcagggacaggatctcgagcaggacgatctaccgccgggttcaccgccgccgcccttgcgagatccaccggatatcttcgtgaataacgccctggcctcaccctatcagcgccaagtgtccccacaagtaagtcctcgtcaccgacggtccactcattcgcattgccacgcccgcagccaccagcgtagccgccaacgcccacagccaagccactgttccctgcatcgggctgtggtggacgtggccgctgccgtgggattgggggaggtgggtccgcattcgggctccagtgtcctcgatatatacaccgctgctctggcggcagccgctgccgtcaggtgctcaccgcttccggcggccagatccgtcgagcccatctacgccacagcacaaaagccgtgtcaaaatatgtgcatctcggccacgtctgtcacacagccggtgatgaccatcaccacccaatccaacaagaccaccaccactaggtggccttcgcccaaaagattggccagtcgagcgaaggccgttggcgaggccaagggggcggccaagtccgcggagaacgtcagtcagacggattcggtcaacttggagtccattctgaacgacatcgagacgatttcggaggatatattggccattcagctcgaaaagagcaagtcaagggacaacctaagccacaataataacaaggacgatgagagggcgaagaaaccctatcgctctgaaatgaacctgtatctgcagtatgacggcacaaatccgaccatttcacccgccaccacggacacccaaacaacggaagtcggaacaactacaccggcggtgaccacgtccagcgaatcgggaaatagtgggagcaataaattagtgcgacgcacccgatccttggagagggaacacaccgacagccctgcaccgcacattccggaccccatggcaccgtttcccgacaaatgcacctacctcggattcgagcagcttaatcaggcggcagctgggtccggagtgcctccccaatcgccgaatgaccagaggcctcccatcgcagccaagccgaatgtaccgctgaaaccaccgcccccgctgccaccagcccgcaggccaaccatgcctactgaaccacctccctcgccacctcctaccacttccgcttccggcgtaatcggtctgccgcccaacaagagccacctgtacaagactctcgcctcggcggctgccaaaagagccatctttcgctcatcgccgtcgcagttaaccagatccctggacgtggatcccgctgtaccggatggggaggtgggcgtggcaggtgaccagtcgtcagctgctgcaaatatggacgagttgacgcggcgaaaggcacgacgcgtatccatcgtttgtggatccggacagggaggccagcaggacgaccacgtgaccacgcccgttactaccgtgcccatggctacctccagttgtgtggacctgagcacagtgctcactcatccggcaatcaaggctttcaagatgagtcacagcacccccaactcgccgcattcctcgcgtcgtcgcaccaacagtaactcgatgtcagctccaccgggaataccggtgagcagtggacaccccgaagtaggggccactgcatcggcaccgcccagcaccacccatcatcaccaccatcgcaaggagggcagtgatccggttcctatgacggccactgttagtcggaccaagtgctccaggcggcactccgagggcaccgttcacaccgtccaccggaacagtgctgccagcggaggagcaggaggtggacaccaccatcacagccacagccaccaccacccgcacagcggaatggtgatcagcagcaacccgcaccacagccaccattcccaccaggacagcaaccacgagacggtcacctcgctgtccgatcgcaactccaacagcttcgcctcctcccgcgagtcctccactagcttcagcatgcgctccaatcgccggaagatctcggtcagttcgcacacgggcggcaaaataccgtggtgcggctgctggggcaatggatgcctatag

SEQ ID NO: 37563 - protein, 1056 aa, DROSOPHILA
MIYENEELRLRTININAEVERGQSDIKRLRRENEQLRREIWTLRDECDRLNKRFKAKLNEHEFGGCRGSGGSGGTCHAYRCSGGGRGSGGCDANSDDSDSCDTCRGADDGHCSDECCQEGGSCGPPKPPLPPEVPSHSSQSKNEDGNSSNQTKEPQPMHFDHLSVVSEETLSNPELMHVQQQEHLTIFPPTDAHGSQSTLPSMMGPLTPLTPIELVANQLNDLQAMVPPLSYFENILSQHMGARNAAQTPSPELGTSSSTTTGKTMRHTNGWDYNLQSPFTQRKYNDPSSPSRSPPPPVSTMTTFVPTSTLQTMPKIALNAPPQPHLADGGDIQTVAITTNAAQHALNSPKHFFAPIKPRLKLNTKLANQGQDLEQDDLPPGSPPPPLRDPPDIFVNNALASPYQRQVSPQVSPRHRRSTHSHCHARSHQRSRQRPQPSHCSLHRAVVDVAAAVGLGEVGPHSGSSVLDIYTAALAAAAAVRCSPLPAARSVEPIYATAQKPCQNMCISATSVTQPVMTITTQSNKTTTTRWPSPKRLASRAKAVGEAKGAAKSAENVSQTDSVNLESILNDIETISEDILAIQLEKSKSRDNLSHNNNKDDERAKKPYRSEMNLYLQYDGTNPTISPATTDTQTTEVGTTTPAVTTSSESGNSGSNKLVRRTRSLEREHTDSPAPHIPDPMAPFPDKCTYLGFEQLNQAAAGSGVPPQSPNDQRPPIAAKPNVPLKPPPPLPPARRPTMPTEPPPSPPPTTSASGVIGLPPNKSHLYKTLASAAAKRAIFRSSPSQLTRSLDVDPAVPDGEVGVAGDQSSAAANMDELTRRKARRVSIVCGSGQGGQQDDHVTTPVTTVPMATSSCVDLSTVLTHPAIKAFKMSHSTPNSPHSSRRRTNSNSMSAPPGIPVSSGHPEVGATASAPPSTTHHHHHRKEGSDPVPMTATVSRTKCSRRHSEGTVHTVHRNSAASGGAGGGHHHHSHSHHHPHSGMVISSNPHHSHHSHQDSNHETVTSLSDRNSNSFASSRESSTSFSMRSNRRKISVSSHTGGKIPWCGCWGNGCL

SEQ ID NO: 37564 - DNA, 8402 bp, DROSOPHILA
aatgagtgcagtccgttcagcttctcctccacgttcgcctgctgcaggtgaacgcaaatcgcctcgatgggtccgcagccctccgcttcgcccgctgattccacatcgatttccgccgaggtgtccacgccggatggcgtccgtgtttttacttttcgaacttttcccattgcaacaaaacacaactgcacgtgtttactaatggggctggaacaaaaggcggcggctttttgtgctatcgatgtttccagatagttggcagcatcgaacatttgcctacccttatcgatttcattttatgcatttcgcattcagtgatcactggtcacgttaaggagcacaggtattccataaaaaacttttacaatagctacatggatgtattgtcttttatttccacctcataatttaaaaaatatgtggcacaaaacagtatatgagtcttttgctgcacgttgtcttaagaaatttccaatttatttatataaatatttatttcttacaaatttatttctttatattcctatacatatatgtatctcttcttttgttggaaaaataaacgtgtatgataataacaaatttttttttctgctgaccgtttaattatttggtagttgaatcgttgagttaagcgattcctctagatggtaacaaaatagcgtgagagtgctcccaggtctaaaaagagtggcataataggcgagtgacgattagatgcgcaagggagagagaagttattagcaacgagtgttctcgttaacagattagagatagtaccgaaacacttcgatttgaactcttgccccgatcgggtcatgctgagctaattataaagcagactttgaaaatacgatcagatatattcatatttattgctaagcaaaatgtaactctttgtaaacgtgataaaataacgtcccttagtagcggactggcaacgacattcatgtgctgccacatagcctttcttattcgataattcgataagtcgagtaaactggattgtattcacatctctagcggcagaaaagtgtagaaaattttcaggggtttttaaaacgaaaagtaagaggttgcgtacagttagatttgtgtgccatggatgcgagcttagaggagagcatggatagcgatggcgccagttcgccgattaccaagacggaggcaacggaatctccgccagaagcgggtctcaatggaaacggcagtggtagtggtagtaccagccaggagaccccaaattatggcgttgctatactcaaggaaaaacccagcgaggcccataggtgcgttgtcatggaaaatccggtgttttaatgctataaagttgttttaccttgacccaattacaggagcaagcccttcaatgcgtttagtggtcgtcccatcggggagcacaccgcccagcagcaggcgctgcagcaacaacaactgcagcaacaacaacagccacagcagccgcagcaacaagctccttccggagcaaatggagtcacaggacccccggaaatctgggtggaaaccaaggcggaggacggtcgctcatattattaccatgcggtaactagggaaaccacttggtctcgacccgatggccccgctgtcaagataatgacccaggcagaggtggaggagatggccaagcgacctgcccaggccgcgaaaacggaagccaaggcaggcgagacgtcggtcgagattccgccagtgtcgtcacatcttacctcacaacctccgccgcacctgatgagccagccaccacccaatgcggcagcaccgctgctttcccagccaccacccaatgtacggcaacagccaccaccaatgttccagccacctggaatgcaggcgcctcctgggttcggacagccgccgttttgtatgccacctccaacttacggatttcctggaggaccggcaccagctggggcaccttggggcgtgggcattccgccttggcagcaacagcagcacatgcaagacaagccagccaagtcgctaatcattaagccgggtgttatcgatccggcggttatagcgcgagcagcagagtggtcagagcatcgtgctcccgatggaagaccgtactatttccacgccggtcgaggagagagtgtctgggagaaaccgcaggcgctgagggacatggaggccgctcgcatggctgcccactcgggcgttgcgcccgctgtggcaacagctccgtcgggactaccaccacacttgctacccaaccctatgatgcatatgccaccaggatcagggccgccgggatttgatccgcatgctgcttttgcggctgctgctgcagcaatgaaagccaattcggaaaacactaaggctgcacaggcagctgctttggagaaagaggctaaaaaggcggcggaggagaagcgaaaaaaggaggaggagcagaagaaggctgcggcatcagccaagcaaacggacaagagtcgacctgtgacaagtacgcccatcgctggaacgccatggtgtgtcgtatggactggagattcccgcgtcttcttttacaatccgtcaactaggacttcggtttgggatcgccccgaggacttgttgaatcgtgaggacgttgacaaagcggtaaacgaacgtccggagcaactgaagactccgcaagagaagtcggctgaagccgaacagaagtccggcgaggaagcaaatcaagagcaggctaaatcgcaagttcaagcccagcaactggatcaggtgcagagggtggatgcggatgatgatgacgacgacgaggttatcaagatacgcacagagtctgagtctagtgtggaagaggtgccaaccaaacgagttcgaatgagtaagttacgggcggttgtgatcatataaaggatacctgtcacacctttcgtatcattagtttccaagtcgaagcgggcagaggatgccgccctagaggctgagcagcgggcggccaaggagcgggccttagtaccactagaaatgcgcgtcacccaattcaaggaaatgcttcgagagaaggacgtatcggctttcagcacttgggagaaggagcttcacaagatcgtgttcgacccgcggtatcttctgctgacttcgaaggaacgcaaacaggtatttgaaaagtatgtgaaggatcgggccgaggaggagcgtaaggagaagcggaacaagatgcgccagaagcgggaggacttccgcagcctaatggaagaagccaggctgcacggaaagtgagtattgccggctatcatttatggttattaggttttacgtaagagtgccgaaagggtatactagattcgttgaatagtatgtaacagtagaagtaaccgtttccgaccctataaggtatatttattcttgaacaggatcactaaacgagctgcccttgacttcgccgccgttgggatgtgaagaggttttctttggcttcctttttcctggcttattacgtctggtgtttcgcatagggggccctaaccgaccttgtaggagctaaaggtttaattttgctttccaagttgctactcattaaggttgtcgaccaaccgggagtttcgtggtggctgtggtttggtacccatatcgcctgtaatgtcgatctttgatttacggcgtaacgggtgcgtaaaactagggtgctgtgacctatagatcagcagcaagcggtaaaccgggttgtttacttagtgcacggcaatatcttcttgtccggtaatcccttcgaggtggaacacaaattcggagggatccgagtcccattttagagacgtaaacgcatcgcaagtatgttctagaagatgtagaagatttagaagatccaacgcccggaaacctcaagaagaagtgaccccaccacttttaaaaaatgctttgatttttttatttctaaaatagtgaaatataattttcccactagatgagtaacgagatgatgttttattactgggtaggattgtaatcctatatttattcgtatattgttcatgaaacgttctcgttgatattttgaattccaaactctttcagatcctcattctcggagtttagccagaggaacgccaaggatgaacggtatcgggccatcgagaaggttcgcgaacgagagagtctcttcaacgagtacatcgtggaggtgcggcgccgcgaaaaggaggacaagctgttgaagaaagagcaggtaggcctagggtatgctggagccccttaccccatcaccttacgtatcttgatgtttaaacataaatgcatatctttatatatatatttaataacttacccgtatgccaaacgtatttacataatgtgattgattttctgttaactcttaaaccataaacaacgtgtgaatcgaaaccgaaacaaaccaaactgaaaatgaaaccgaatccgaaccctgaccgaatgcattatccctcaatgtgttgggttccggtggtttgccacccgataccttagccactagctagcaggttacagcacaaatgcaccacccaaaacaccaaaatacacaagagcaacagcatcgagaaccacctgtacaacactctcgacggtctattccgcccgccgtctgccatcgccgtccactgatctacttgaccacgcacatgtttgcaatctgtgtggtgagttacttgaaacataacaagcaaaaacatttaaatttgtttttctgcaataagagacaaatttggaaaaaaaaaaaacaattataaaaccaatataaacaaaactatcgaaaggttgccaaactgaaaattacctgataatcgttggtgtgatttccacttcccgaactacgccccacgtcgcccctctcggatgttttatgcgatgtgatgtgatgaagaggatgttgcgatgatgtgattggcattgggatcatgattgatgatgtttgaagttcgcgatgggctctcggagggatgtcgccgagcaggaagcaggcagaaagggattgttccagagatccggagcgactgcagttcgtgtgcaggtgtctgcggcgctaagcaaacagtatgaataatacttaatttaattaacccactattttcgttttgtttacaaataatgtacacactcagcagtttgtcacctgaccgaggcaagccgaaggaaccgaactcagccccatccccacctgcacagaccaaagacgaacgatattctaaagctatctaaagccaaaatatccagatctttgctctggcaggtctaggcagcggcccaagtcgctggaaggctctctgccccatattcttaccatttaccatatttttactgtagatctattgactattgtacccttcggccgtgctgaagtctgaacatcaaggcctgcttttgtatagagaaattaatgggttaggtggtccgttcgttataatttttgctttctcctctgcatctataaaaaatgtttgtagcaaaagataacataacaaatattcgatctggccgtgtccgtcgacgagatctctgaaactaaaaaagctggaaatttgatattagttttggatgatttttgtcgatgccaaaacatgaaattcgtaaaacttgtacccgtaatccactcagataggttagggatatctgataatggaggaaatcgacttgatttaagatgtccaaatttgttttctgtgtgtcgcttgagacagacccaaattctctacgccagcaggacttgaattaatccaacgttcttttccagttaagtctgaaatcgctaaccaaacccgctctctttcaggcacaaatcgtgtaactatgttctatagcttaagaaaaataagtctaagtcttaagttaggcaattaagcatagagttttaagtgaagccgcaacaattcgagacccctctaattcgatctgtttgtcgcatttctcttctcttccgcatggctgtcatgtcaatattactttcacaaacactttaaaactctagatccgcaaggactttctggatatgctgcgagagcgtcacgacatcgagcgccacaccaggtggtacgacatcaaaaagaagtttgagtcggatccacgctaccgtatggtggactccatgtaccgggaggagtacttcgaggattacctgcacattatgaaggaggagaagcgaaaggagcgggagatgcgtgagcaacgggaacgggagcgacatcgcgaacttaaatctgatcggaaggagaaggacaaggaaaaggacaagggtcggaaggatcgaggacgcagccgttcgaaagacaaggaccgcgagcacaagtcatccaaagaaaaggataaagacaaggaggaaaaaagcaagtcggagaaaagcaagaaacgagataccaccccagtgagtctataatcgttttaagcgttttagatcggtattctaatcagcatattttaattttttgcctttcataggaggagggtgaacatcgtgaagagtcagaaagggaagaacgagccggcagcgacgacagcgaggtggctcgccaacgggagaacgaggctgagcaaaagcagaaggaacgcgagaagaagctaagggtagagcagagtataagggaacgagagaaggaggtgcagcgaaccctggccggtcatttgagggatcgggacaaggagcgcgagcatcacatgcgcgaggagtgcattggtcactttaccgctttgctgacagatctggtgcgaacgccggacttcacgtggaaggaggtcaagcgacaattgcggaaggatcatcgctgggaactaatagaaagccttgatcgcgaggatcgcgagcggtaaggcattaacattgttaaaaattctatttatttatattcaataaatttaatatcgttgcagaaaattcaacgagcacattgacaatctgatgaagaagaagagggagcgattccgcgaaatgctcgacgagattagcactcttcagcttactagcacttggaaagagattaagaagctgatcaaagaagatccgcgatacctaaaatacaattcggacaagggcgagcgcgagttccgggactacatcaaagataaaacgatgacagcgaagacttctcttcgggaactcctgcaagagtgcaaatttattactcacaagagcagcgatctcatcaaggaaaatccaaaccatctcaaagagattcaggacattttgaagaacgacaagcggtaaatagaaataaactcaatatttgtcaaaactgcgataactttagagctttgctaattacattttgtgtttcatcttgtgattcttactagctatttggtgctcgatcacatggaggaggagaggaacactattgtgctcggctttttggaggagctcaacaaacgcggcccgccgccaccacccacagcatctgagtcaacgcgccgcaacaagtagagtggcattttaaataaactaatcaattaaatcataacaattaaattattatactaagacgaagttccgcatcttcgaatattttaattgaataaaatacacacattaaagcgatttgaaagtgacatataaccgatttttcattcataaatatttattgatcatacgttatgatagagttgtgatttcatctatgtatttatcttaatttaccatttgtttttgcaatcctatataattctatatgttctgtttacccattcatcggttcgcctaaacgtgaccgttattgtttaatacacattcttgctgcactgtagccgagttttctaatgcctaaaaataaatacaaatacaataatccgtaatgttattcgtttcaaagccagacttccttccatccatatggaaattgttgtagtattaggaactaatattgaaaataatgtctcccaaacaaatctttttcctctcgtttgtataaaaatcccttttttttggtgttttaacatattaggacgagctcaactaacctaatagcacgtcgataatgggtacgatcggtaaatagcaagacagtttccgcttatgatttatcatgcaggctctggatgttacaaaatgtttcaattgaacacctctaaccattagattacaaaatcgacaaacaaatttagattgcgagtaatgttaatataaaaaagtttaaataattcaggattcaagcattacaattttgtgcatttgtattcttcgaaatgcccaattaatatgaaaaatatttaaaattaaacgtgactgaacaaaaaaaaaactttttcacaaaagataagtcatgttgttattaataattgaaagtaaagaaggtagacaatcttatttcttcccatccattcagcacccgtccaatcaatatacacgcacccactcaagcatctaactattttagctggtgttttagttgactggtctacgatctagaatttcgattctctatgtt

SEQ ID NO: 37565 - DNA, 3602 bp, DROSOPHILA
ctggattgtattcacatctctagcggcagaaaagtgtagaaaattttcaggggtttttaaaacgaaaagtaagaggttgcgtacagttagatttgtgtgccatggatgcgagcttagaggagagcatggatagcgatggcgccagttcgccgattaccaagacggaggcaacggaatctccgccagaagcgggtctcaatggaaacggcagtggtagtggtagtaccagccaggagaccccaaattatggcgttgctatactcaaggaaaaacccagcgaggcccataggagcaagcccttcaatgcgtttagtggtcgtcccatcggggagcacaccgcccagcagcaggcgctgcagcaacaacaactgcagcaacaacaacagccacagcagccgcagcaacaagctccttccggagcaaatggagtcacaggacccccggaaatctgggtggaaaccaaggcggaggacggtcgctcatattattaccatgcggtaactagggaaaccacttggtctcgacccgatggccccgctgtcaagataatgacccaggcagaggtggaggagatggccaagcgacctgcccaggccgcgaaaacggaagccaaggcaggcgagacgtcggtcgagattccgccagtgtcgtcacatcttacctcacaacctccgccgcacctgatgagccagccaccacccaatgcggcagcaccgctgctttcccagccaccacccaatgtacggcaacagccaccaccaatgttccagccacctggaatgcaggcgcctcctgggttcggacagccgccgttttgtatgccacctccaacttacggatttcctggaggaccggcaccagctggggcaccttggggcgtgggcattccgccttggcagcaacagcagcacatgcaagacaagccagccaagtcgctaatcattaagccgggtgttatcgatccggcggttatagcgcgagcagcagagtggtcagagcatcgtgctcccgatggaagaccgtactatttccacgccggtcgaggagagagtgtctgggagaaaccgcaggcgctgagggacatggaggccgctcgcatggctgcccactcgggcgttgcgcccgctgtggcaacagctccgtcgggactaccaccacacttgctacccaaccctatgatgcatatgccaccaggatcagggccgccgggatttgatccgcatgctgcttttgcggctgctgctgcagcaatgaaagccaattcggaaaacactaaggctgcacaggcagctgctttggagaaagaggctaaaaaggcggcggaggagaagcgaaaaaaggaggaggagcagaagaaggctgcggcatcagccaagcaaacggacaagagtcgacctgtgacaagtacgcccatcgctggaacgccatggtgtgtcgtatggactggagattcccgcgtcttcttttacaatccgtcaactaggacttcggtttgggatcgccccgaggacttgttgaatcgtgaggacgttgacaaagcggtaaacgaacgtccggagcaactgaagactccgcaagagaagtcggctgaagccgaacagaagtccggcgaggaagcaaatcaagagcaggctaaatcgcaagttcaagcccagcaactggatcaggtgcagagggtggatgcggatgatgatgacgacgacgaggttatcaagatacgcacagagtctgagtctagtgtggaagaggtgccaaccaaacgagttcgaatgatttccaagtcgaagcgggcagaggatgccgccctagaggctgagcagcgggcggccaaggagcgggccttagtaccactagaaatgcgcgtcacccaattcaaggaaatgcttcgagagaaggacgtatcggctttcagcacttgggagaaggagcttcacaagatcgtgttcgacccgcggtatcttctgctgacttcgaaggaacgcaaacaggtatttgaaaagtatgtgaaggatcgggccgaggaggagcgtaaggagaagcggaacaagatgcgccagaagcgggaggacttccgcagcctaatggaagaagccaggctgcacggaaagatcactaaacgagctgcccttgacttcgccgccgttgggatgttgtcgaccaaccgggagtttcgtggtggctgtggtttggtacccatatcgcctgtaatgtcgatctttgatttacggcgtaacggatcctcattctcggagtttagccagaggaacgccaaggatgaacggtatcgggccatcgagaaggttcgcgaacgagagagtctcttcaacgagtacatcgtggaggtgcggcgccgcgaaaaggaggacaagctgttgaagaaagagcagatccgcaaggactttctggatatgctgcgagagcgtcacgacatcgagcgccacaccaggtggtacgacatcaaaaagaagtttgagtcggatccacgctaccgtatggtggactccatgtaccgggaggagtacttcgaggattacctgcacattatgaaggaggagaagcgaaaggagcgggagatgcgtgagcaacgggaacgggagcgacatcgcgaacttaaatctgatcggaaggagaaggacaaggaaaaggacaagggtcggaaggatcgaggacgcagccgttcgaaagacaaggaccgcgagcacaagtcatccaaagaaaaggataaagacaaggaggaaaaaagcaagtcggagaaaagcaagaaacgagataccaccccagaggagggtgaacatcgtgaagagtcagaaagggaagaacgagccggcagcgacgacagcgaggtggctcgccaacgggagaacgaggctgagcaaaagcagaaggaacgcgagaagaagctaagggtagagcagagtataagggaacgagagaaggaggtgcagcgaaccctggccggtcatttgagggatcgggacaaggagcgcgagcatcacatgcgcgaggagtgcattggtcactttaccgctttgctgacagatctggtgcgaacgccggacttcacgtggaaggaggtcaagcgacaattgcggaaggatcatcgctgggaactaatagaaagccttgatcgcgaggatcgcgagcgaaaattcaacgagcacattgacaatctgatgaagaagaagagggagcgattccgcgaaatgctcgacgagattagcactcttcagcttactagcacttggaaagagattaagaagctgatcaaagaagatccgcgatacctaaaatacaattcggacaagggcgagcgcgagttccgggactacatcaaagataaaacgatgacagcgaagacttctcttcgggaactcctgcaagagtgcaaatttattactcacaagagcagcgatctcatcaaggaaaatccaaaccatctcaaagagattcaggacattttgaagaacgacaagcgctatttggtgctcgatcacatggaggaggagaggaacactattgtgctcggctttttggaggagctcaacaaacgcggcccgccgccaccacccacagcatctgagtcaacgcgccgcaacaagtag

SEQ ID NO: 37566 - protein, 1166 aa, DROSOPHILA
MDASLEESMDSDGASSPITKTEATESPPEAGLNGNGSGSGSTSQETPNYGVAILKEKPSEAHRSKPFNAFSGRPIGEHTAQQQALQQQQLQQQQQPQQPQQQAPSGANGVTGPPEIWVETKAEDGRSYYYHAVTRETTWSRPDGPAVKIMTQAEVEEMAKRPAQAAKTEAKAGETSVEIPPVSSHLTSQPPPHLMSQPPPNAAAPLLSQPPPNVRQQPPPMFQPPGMQAPPGFGQPPFCMPPPTYGFPGGPAPAGAPWGVGIPPWQQQQHMQDKPAKSLIIKPGVIDPAVIARAAEWSEHRAPDGRPYYFHAGRGESVWEKPQALRDMEAARMAAHSGVAPAVATAPSGLPPHLLPNPMMHMPPGSGPPGFDPHAAFAAAAAAMKANSENTKAAQAAALEKEAKKAAEEKRKKEEEQKKAAASAKQTDKSRPVTSTPIAGTPWCVVWTGDSRVFFYNPSTRTSVWDRPEDLLNREDVDKAVNERPEQLKTPQEKSAEAEQKSGEEANQEQAKSQVQAQQLDQVQRVDADDDDDDEVIKIRTESESSVEEVPTKRVRMISKSKRAEDAALEAEQRAAKERALVPLEMRVTQFKEMLREKDVSAFSTWEKELHKIVFDPRYLLLTSKERKQVFEKYVKDRAEEERKEKRNKMRQKREDFRSLMEEARLHGKITKRAALDFAAVGMLSTNREFRGGCGLVPISPVMSIFDLRRNGSSFSEFSQRNAKDERYRAIEKVRERESLFNEYIVEVRRREKEDKLLKKEQIRKDFLDMLRERHDIERHTRWYDIKKKFESDPRYRMVDSMYREEYFEDYLHIMKEEKRKEREMREQRERERHRELKSDRKEKDKEKDKGRKDRGRSRSKDKDREHKSSKEKDKDKEEKSKSEKSKKRDTTPEEGEHREESEREERAGSDDSEVARQRENEAEQKQKEREKKLRVEQSIREREKEVQRTLAGHLRDRDKEREHHMREECIGHFTALLTDLVRTPDFTWKEVKRQLRKDHRWELIESLDREDRERKFNEHIDNLMKKKRERFREMLDEISTLQLTSTWKEIKKLIKEDPRYLKYNSDKGEREFRDYIKDKTMTAKTSLRELLQECKFITHKSSDLIKENPNHLKEIQDILKNDKRYLVLDHMEEERNTIVLGFLEELNKRGPPPPPTASESTRRNK

SEQ ID NO: 37567 - DNA, 2909 bp, DROSOPHILA
tatcacatccaaggacctcatgatcttgctcacttccgtatccgactgatgaactcctctagttgatttgaggctcaagcttggcgcgaatcgcatgaaaagtaggatacatatgctagccaacattgtgaaccaagtctttcactgacttcaaattggctgattgctggctttaaatacccattgcatctaacatatgttttctgcctggccaattaagcagcaaacacagatgtcagttccattaagttaaggtactttgcaacttccttacaacttcataaaacaaattgtcgtgtctcaggccaattaatggttcactaccaccacccacagcagttgcgtgctggcgagttctgtaaacatacactataaaatcagttagtacctcgtttagttgactattatgctacgtgacccctcatttacttgccattgcccagagcacttcataagtaaggcacatcaatgaatttacttaaaattctattatattatatacacccagagaaaagcccgctgtcaacgatcgcgatctatccaagatcgaatcataattagatcgagatcgaatcattctcagattgcaaatgaccttgcacaaaatataataaatattaagttattatatcttatttaatttaccaatttccgtaccaaaaaacgttgatgaatgttttaaatttttgcatttttaataaattaaataaatattaattaaattcagtttttggtcgttttgtgacaaagaaacgaaggcaaaaggacgaagagtcaatgagaaagaagatggtatgaagaagatggtaaaatcaggctaagtggggatgtggttagagctgaagaatggctaaaactctcgcgttcctaaccctaacaactacaattatggcctggggcaggttccggttccatttggtctgtgtgactcgcagccatccttcctgggaaggatcgcaaattccttggtatgtacaattgggcgaatgactttccccgtttaggaggacgagctgtagctggacgaagaacccgaggatcccgacgaggatcccgaggagtaggacgacgagctgctaggatggtacgagctgtaggccaggttctgcgagtcccaacgggcatagggacctccgctcatgggctcccagctgctgggatcgtaggatgaggcggtggtgctgggcactccgtattcgctggccggaactggggcgggcatgggcaccatgttcatcttcatgcctcccaacttctggataaggttgtagatcaggaagcccagcaccagcttgatggcaatcttggacagaatcagagccttggtggccttcagaccgatcagagccagcaagatgggcatgatcaccttcagcttgaacttcatcagcagcagcaggggcaggaacagcttgtccttgttcttcttctcagcgcgacctaaaggaattacttataattacaatcgcattacatataaagggtgattttagcatgactactgaccctcatccttgggcaactccagatcaaaaccgcgatccgagcgataggtcaccacggaaccagcgaagaaggtctgtggcagctgcaacctcatctcgttggtgttcagaatgcggcccaggcggtccacaatgaccttgtcgattacatcgtcacccagggcgcgtccgctgacctcctcctccacattggctaccgtgtccaggtaggtgagcaccttctccttcaggcaatgcatcgcattggcatggaagcacttatccacaattgtcgagatcagctcgtcggagctgtggatccgcggggtcaccgcgttctcgatggcagcaccggacacggatgtggaggccaccagcagcagcgcacaaccgaacgcgagcaaggacgtggagcggaaagccattgtgtttccaatcgaaaaagatacaactagatattactgacactaccagagcgcgtagtgttcactgtggagtcgatgcggcgacaatgttggatgattcgccgtttggttcgcgttttatactgccgctcccccaaagcgccaaagagacccgtgctggttttttggagtgcacaactcggtttttggacagtccaacgcggcgcactcgccactgcgagcaacgaaagtcgagccacgggccaagtccacggaaagcaagtggccaaagtttttcaccaaaaaaagtgaaaagaaaacaagaacgctgtgggcgagtgtcatgaatgctaagtactcccatttgccacaccaatccatgcaacaagttggttttgaactatctatgaaggacttgtaccatacttgtactgtacttgagctgtaaacctatgatgtgttacgtatttgaaataagctaagcagaggaaactacaatatttcaaaactattctgacatttaagcgaatattgtacaagaagtgtaggagaaggagaagaaatcattaaaggtttggatgagctccgcaagatattggggtatagttaggctatcaaatcgtttaatccagatggcttcttaacaatataaccttaaagaaacagacaatggtattaatcttctaacatatttagtatatacccttaacgccctttcatacccagtcgaaagacagtagcctctcctccgttaactgggttgcccctcgagctttctcgctttccatatcggcctcagacacctagcccacctggccctcccaccagccgaagttgcattattgacgcctcgatggaaataactttggttggccattagtatgcaggcccattgctcttacgcggccaaacacaagaaagccaaatcgaagacacgtacatacttcggcgtattgtgtcaaatttcgatacaagaaatcagtacggaactcaactacgatttggttgcaatatccactcc

SEQ ID NO: 37568 - DNA, 843 bp, DROSOPHILA
atggctttccgctccacgtccttgctcgcgttcggttgtgcgctgctgctggtggcctccacatccgtgtccggtgctgccatcgagaacgcggtgaccccgcggatccacagctccgacgagctgatctcgacaattgtggataagtgcttccatgccaatgcgatgcattgcctgaaggagaaggtgctcacctacctggacacggtagccaatgtggaggaggaggtcagcggacgcgccctgggtgacgatgtaatcgacaaggtcattgtggaccgcctgggccgcattctgaacaccaacgagatgaggttgcagctgccacagaccttcttcgctggttccgtggtgacctatcgctcggatcgcggttttgatctggagttgcccaaggatgagggtcgcgctgagaagaagaacaaggacaagctgttcctgcccctgctgctgctgatgaagttcaagctgaaggtgatcatgcccatcttgctggctctgatcggtctgaaggccaccaaggctctgattctgtccaagattgccatcaagctggtgctgggcttcctgatctacaaccttatccagaagttgggaggcatgaagatgaacatggtgcccatgcccgccccagttccggccagcgaatacggagtgcccagcaccaccgcctcatcctacgatcccagcagctgggagcccatgagcggaggtccctatgcccgttgggactcgcagaacctggcctacagctcgtaccatcctagcagctcgtcgtcctactcctcgggatcctcgtcgggatcctcgggttcttcgtccagctacagctcgtcctcctaa

SEQ ID NO: 37569 - protein, 280 aa, DROSOPHILA
MAFRSTSLLAFGCALLLVASTSVSGAAIENAVTPRIHSSDELISTIVDKCFHANAMHCLKEKVLTYLDTVANVEEEVSGRALGDDVIDKVIVDRLGRILNTNEMRLQLPQTFFAGSVVTYRSDRGFDLELPKDEGRAEKKNKDKLFLPLLLLMKFKLKVIMPILLALIGLKATKALILSKIAIKLVLGFLIYNLIQKLGGMKMNMVPMPAPVPASEYGVPSTTASSYDPSSWEPMSGGPYARWDSQNLAYSSYHPSSSSSYSSGSSSGSSGSSSSYSSSS

SEQ ID NO: 37570 - DNA, 3442 bp, DROSOPHILA
ttactttaaaatttaaaatccaaaatagtagtatgccctttaatgtagaaagtcgaattagtggaattcaaatagaatgtccaaatagaattccacatgtgaattccgggaggagcttcccggtgcatttgagcgtagacaaatctgaggcttgctttcatgacagggatttattgcgagtttttattttccatttgggccacccatcgattcatgtctacagcaagacgtacaatacgcttcggcgagccgcttttctatcggaaaatggccctgatccattggcacttggtcccttttttctggagctatgggtggtagggaagactttcacttttcgacgcctggcgactttcgcgcaagtgaaaagaggaaatttaaatttttaaattatgtgcagttaatcaatttaatcgactcttccagccgggcctcaaacacgacttgagtggaatatttaattggattggccgccgagggtcggcgtttgctgcggattaaatatggctaattaggacacaattgctgttccggcgatggctcatacatattgtatgccaagcgaaattggccgagacgctcagaatgccgccgaggggtggaaacgttaattaggcctgttggctcaggaattcaagcggtgcggtcttagccccaggctgcttttggccggatgtcgtgggctaactctgtgatctggacctagagatgttgacctttggcttcaatgaacaatatcgatttcagcatattcaaggcatttatttgtctactttattttggtgtttgcttctctgcttgcttaaggtcttgttttcaataaatagttaataaatattataattaaagtctaatgaagtgggcggcagcactggaagtgtgaaacagtggctcaaagtcaccgaatattcctaacagttaacaaatgattctgtgcttttgagcccactagctggctccaaactgctcctctgggctctcaggggttcatccttgtggtctaagcgtaggcctggtaagccagggcttgccccaacttctggggctgctcgacaacgggggcaggaacggagctaaaggtgcggccgtcccaaggaccatgggcggtgatgtgggcggtgtgatggtgatcatgagcaatctgggggacaaaacaggcgtggaattagaaacctagaatccgatcggagttgaacgtatatattcgatatgctagtgatggttgggtagtcagttttgtggtttggttgggaagcgggagagtgtgggcgaggattctggctcgacttaccctgctgctgccgccctctcgacttcttatacatacatacatgcactacaaacgactctaaattgatattcgaactttgaactccacgcccaacatcatcccaacacacaaaacgctgactaattaccacatccagcgaatgcctggaagacaattggagatgcgttttagtatggccgccggcttacctttttgcacaattggaaaatggccaaaccaaccgagacaatgaaggagaagaagcccagggccagggcgttgaaggccttgatcttcaggatgccaatggccatggggatcactgtgatggccttcagcaggatgagcaccaggatgggcatggccagcttgcggagacggtgtttcttgcctgcaaaattcacacaattcccagttgtagtaggtgctaaccagttggagtggcgttaaggcatgcggaaagtgaacccacccttcttgaagatgttgcccttcttacccctggcttcgacatcggtgccctcatcgccatcgtcgccgttcagctggaggttcaggctcagctgattgttaaccaggttgcgggccgagacggtgaccttggcatcggccaagggcaagtccatgctcacgtcgtgtccacggatatagttctcaatggcgtccagaaatccgtcggcactgctggcacgagcttcgttgataggcgtggtcttctctccattggagcggacttccaggttggaaacctattaaagcgatgtacatagaatgaattcatgttttaatgacgatctcaagttatatatgctaactaatatgctcataatcatgcagaatatgataagtattttgtgtttcaccaacttaaggtaaatatttcaattagtgaagtgtgaagtaaaaggaccgattgtataatatttaaataataattttaattaattttaggtacaacaaagagattatctcctctttcatttatccctcccttcattaactcaattcaaagtagttataagctcacctggaagctgtctttgctcatcacgttgtccacaaaccgcatggcccgctctttgatgcaggccatcgagtcttggccactggcgcacttgttttgctcctcggcgataagcctctgcatcttttcggtggagccaccggccgcctgtcccgctgccactagggccgccacaccaacgatcacaaggagcaacttggccattttgatgttcgagttctttaattcgaggttcgctggtcaacggacaactggcctctgcgctggcacaaatgcgtttaataatcgtttttctattgttcacgatttttatactcactggatctttaactcgttcgctgccgaatggccgggcaaaagaaatggccggagaagacatgaatgaagcgaacgcgacagagctgctccaagtttgttatttttgcctgtgtgcgtgcctcggcgcaccacgtgtcgtatgcttaatgcggctttatttcgaacgcgtgccactcgcatccgacagttttttatgtgggtgaatggatgcacttgaaataatttatatctaaagtacctgcgatgctttttaagctgctcttcattttcgaaaatggtttaaattaaatgttctccaaaatataaaatgtttgttctggttgtcctggttttgtattattgtataagacatgtggaaaatcatctataaaggaaattttgattacatatacgctagtaagctataaatgaatcgcatcttattaagaactaaacgtagacaatacacattttttcccattatagtaccaattccttatattggtttgcaaaaattttcaacaatttcagaatttacaagaccttgaaaatgcttgctgtgaattaattaagtatatttatttattattattatttattatttattatttattatttattatttattatttattatttattatttattatttattatttattatttattatttattatttattatttattatttattatttattatttattatttattatttattatttattatttattatttattatttattatttattatttattatttattatttattatttattatttattatttattatttattatttattatttattattatattatttattatttattattta

SEQ ID NO: 37571 - DNA, 801 bp, DROSOPHILA
atggccaagttgctccttgtgatcgttggtgtggcggccctagtggcagcgggacaggcggccggtggctccaccgaaaagatgcagaggcttatcgccgaggagcaaaacaagtgcgccagtggccaagactcgatggcctgcatcaaagagcgggccatgcggtttgtggacaacgtgatgagcaaagacagcttccaggtttccaacctggaagtccgctccaatggagagaagaccacgcctatcaacgaagctcgtgccagcagtgccgacggatttctggacgccattgagaactatatccgtggacacgacgtgagcatggacttgcccttggccgatgccaaggtcaccgtctcggcccgcaacctggttaacaatcagctgagcctgaacctccagctgaacggcgacgatggcgatgagggcaccgatgtcgaagccaggggtaagaagggcaacatcttcaagaagggcaagaaacaccgtctccgcaagctggccatgcccatcctggtgctcatcctgctgaaggccatcacagtgatccccatggccattggcatcctgaagatcaaggccttcaacgccctggccctgggcttcttctccttcattgtctcggttggtttggccattttccaattgtgcaaaaagattgctcatgatcaccatcacaccgcccacatcaccgcccatggtccttgggacggccgcacctttagctccgttcctgcccccgttgtcgagcagccccagaagttggggcaagccctggcttaccaggcctacgcttag

SEQ ID NO: 37572 - protein, 266 aa, DROSOPHILA
MAKLLLVIVGVAALVAAGQAAGGSTEKMQRLIAEEQNKCASGQDSMACIKERAMRFVDNVMSKDSFQVSNLEVRSNGEKTTPINEARASSADGFLDAIENYIRGHDVSMDLPLADAKVTVSARNLVNNQLSLNLQLNGDDGDEGTDVEARGKKGNIFKKGKKHRLRKLAMPILVLILLKAITVIPMAIGILKIKAFNALALGFFSFIVSVGLAIFQLCKKIAHDHHHTAHITAHGPWDGRTFSSVPAPVVEQPQKLGQALAYQAYA

SEQ ID NO: 37573 - DNA, 2504 bp, DROSOPHILA
gaaaaaaagcacgttgtgtaaatacttttgaccacctctgtatgcttgtaagtttataaggtgcaagtgaataaatacatgaatatagattcagtatacctttaacttcagtacctttctatttattttttttttacgatttttgataacccctttgatgcaaccgtcctctaaaaataattttcttacttactttacatcctttatggcatccacagcggctcttgacgagagcgtttgttgcttcgccttctccaggaaaaattgttcgaacctttgatgagcagactcgcaattagcagcgtagcccacagcccggactgctgttgatggtcttgcaagacctgatttatcgcctcctgttgcccgactgctggccagattgccgcgctgaattacagaaattacacagcgttttaaattttttttttttcaaaactcactgaaaaaagctgtgaagtggggggtctgggtctgcccgccgccgtgggtgggggaggcggaaccgcttcatgttcggaaacaggctccggtaatctttgcgttccgttagcagttatttgagaagtcatttttgtctcaccgcactacacgcgtataataaggttctcaatcaatatgaacggttttgggggttggtctttgttttggttgagttgccttggtgatcacgtataagcagcacatgcgtaaaagaggtgaataaataccaattaaatgtataatgtaagaaggttgcggtatttattaaaccaaatcattttggtttattttatcattttatactaagacatttctataaaagtttgaataagtttagttaattgttatctgatttaatataaaacataaaacccaatttcaattgttaaaatattattatcagtcggaaacgcttccttctgtctgttacatacttttcaacgaatctagtatacccttttactctacgagaaacgggtatggaccataccgtatggtttacctccaccttctgcgcttataaccgagctcgtgtcttgttcgttgtctggtgcacgtcgatttcgccacattgttgaatcggctcagcctgctgttgaagtttaatgatattcgtctcactctccatatccgattctattgcttcggtttggacatcacaaagtctccgaaaggctaactttactttctccacatcgcccaaggcgaagtagcagagtaagaggtgaatgctacttctaatgtttgcccgctccgtcatgatgaactcaaagctagaagcagcatctgaataagagcccatgcgaataaaaaggattccaatgttttcacggatctttagccttaactgacttaagctctttggtacagaatcaagggccatgcggtacattttaaccgccttttggtaaatacccatgctgtagtagatgttacccatatttagttttagctgattgacgtgtggaaacatcttgtttttggccataatgctgtaggtattgagggcttcgatgtgcatctcactccgttcgtattgctccgcgagattaaaaaaaacctatagtccatatatattaaagttttaaattatccttctagtcgtgcttaccgcatatgtcaaatcgaagttgtgataaacattttcaccgtgctggtctcgaaattggtgtaatgttctatccaatgagaatgcttctttggctttactcaatgcctcggccaattttgtatccaggttcaataatttattgggtgagcgttgccaggccaaaactatagatgactccaagagcttcacaattttttcctctagatttttatacattatttgtggtctatagtttgtattatgtaaaacgtaatataagttggctagtattcagactttggttaactcgctacataataatcgactaaaaggcaggagtagatcattgcttgttcctgataagcttggaaatgcttaagactttatatacatacatatatgctcgaatatagcattctcccttgtttttttttttgtagagtttacagagagaagaatgaaaaaagacagaataaaaagacagttttaaagcccactttatgtttaaaatttttccaataaaataaatataaatttctttagtacactcaggggtatcattcgggatttgacccaaacattaagagcaagacacctacacattgctgacgtatcacaatcacaactacatcaaatattgttaatttcaattttcaaaatttcaatatttggaagcaaactagcgctgcgggtttgtctctagaaaattcatgcttaatcctgagatctccacgctcatacggacagacagacagacggacattactcggctattgatcctgatcaagaatacagatacatgtacattataatgtcggaaacgcttcattcttcctgttacatacttttcaacgaatctagtagttactctacgataaacgggtataaaaactcctatttattgaagtacaagagaaaacgcttccggcct

SEQ ID NO: 37574 - DNA, 504 bp, DROSOPHILA
atgcacatcgaagccctcaatacctacagcattatggccaaaaacaagatgtttccacacgtcaatcagctaaaactaaatatgggtaacatctactacagcatgggtatttaccaaaaggcggttaaaatgtaccgcatggcccttgattctgtaccaaagagcttaagtcagttaaggctaaagatccgtgaaaacattggaatcctttttattcgcatgggctcttattcagatgctgcttctagctttgagttcatcatgacggagcgggcaaacattagaagtagcattcacctcttactctgctacttcgccttgggcgatgtggagaaagtaaagttagcctttcggagactttgtgatgtccaaaccgaagcaatagaatcggatatggagagtgagacgaatatcattaaacttcaacagcaggctgagccgattcaacaatgtggcgaaatcgacgtgcaccagacaacgaacaagacacgagctcggttataa

SEQ ID NO: 37575 - protein, 167 aa, DROSOPHILA
MHIEALNTYSIMAKNKMFPHVNQLKLNMGNIYYSMGIYQKAVKMYRMALDSVPKSLSQLRLKIRENIGILFIRMGSYSDAASSFEFIMTERANIRSSIHLLLCYFALGDVEKVKLAFRRLCDVQTEAIESDMESETNIIKLQQQAEPIQQCGEIDVHQTTNKTRARL

SEQ ID NO: 37576 - DNA, 2306 bp, DROSOPHILA
tgtgcgacacctgcagcaagacgtgagtggcgctagactggtaggcgaatgtactaatgcgttgctctcttactttcatagattccgcaccaagtttgagctaagtgcccatgtaaagcgcatgcatgcggcagactttacgcccatcatatgcgacatatgcggtacacacttcaggagcaaggccaactttctcatccacaagaaggcgttgcatccggacgggccggtggcggaggtgcagtgtaccctgtgcggccgctggctgcgggacgaacggagcctgcgcaagcatctggcacgccacgatgaccgcgacggcgacaccaagtaccgatgcctgctctgcaatgcagagaagtcatcccgtgccgcactcagcagccacatgcggtaccatcactccgccaagcggcacaagtgcagtctctgcgacaaggagttcaagctgccgcgggcattggccgtgagttgaccagcgtatcagattctgatcgtgctaatcccggaacgttttcattacaggagcacatggccactcacacgggcatcgatctgtaccaatgccagttttgtacgcgcaccttcaagtctcatgccaacatgcacaaccacaagaagaagatgcatcccaacgactgggtgagaaagtactcgcagcccagcagtagcattacctccacagcggctccacttgctcatcccaatcatcctaaccagcctgctcctccagcggcagctccgactaatctagccgggcacatgctgccgccactcggtggcattgccaagtcgctgattgagatacccgataccgagggcttcgatttcggcagcaacagctccgtgtgccccacgcccgactgaatctgtgtgttgtgtgtctgtgtttggtgtctgtccctgcgactttgtgtacacgttccctggtcgggatttatgtataaaatcgtacaaataaactttattaatatacaaatccaatgacgctgagttaaagttaggattcgtcctctggctcatcgggttcctcctcaatttccgtgagaatggtgcgtatcttcataagcagctcctttttgacggcatccgggaccagggtgcgtgccttgggtgttacctcggcgatcagctgctctacggtgaagctgttgttggtgcccttctccatcaggatgttgcggcacatcagacgcacctcgtcccgccagccacattccgtaaggcggctgcagagcaaatccttgatcttggaacggtcgccggttagcaccgtgtactgatcaactgcgccggaagtgctcatccttgtgtcgcgtatctaagtcttgcaaattaccaagtttcctttttcgagtccttgtcgatttcgcagcgtctgtttttttgcttttcttcgctgcatctatctttttgagctgtgtttttgttttgttgtgttgtgatgttggtacagtggtcatggcaaacagtctggctactttgtagctagtttttagatacggacattaatcaactttaaagaaatgaaaatatattaccaaatatatgtaaagttttaaaaatttttagtttaaattggaatgtatgcacaattcgtatgttttcggtcattttcctgggtcacttaaaatttaagctgcttttaagcgcccactctggcatctctgtcgctcgaagtttattcagcctggcagtctggcaacacctcggcgacgtcttaaactgaatttgcgaggcaattaattgaattaattgcttttcctacagctgtagtgcaatgatatgccgcctgtgcctggacgatgctgagcacagtgtgccaatctttgaccaggatgactccggcgatcagccagtgccctccaatctagcggagctaattgagaaacacctgcagttggtggtaagcagtgaattccgtttgaaccaccaacatttgttaatgaccagattgcatccttgttaccagctcctgcccaacgatggggtgtccaagagcctctgcacccagtgctggcagcagttggccgacttcgagcagttctgcgccatggtgatgaagaaacaattgggcctgcagcaactgaagatggagccgttctccgaggacgaggatgcggacactaaggcgcagatcctgtgcgaaccggagatcgatgtgagtcccgcggccgccgacaacgaagagtgcaacgagatcgacggcgatgccagcagcaacagcagaagcagtagcattcgcaccacatcgctacgagaaatgcgcctgccgtcgcccattagacgccgtatgcgtctacccc

SEQ ID NO: 37577 - DNA, 306 bp, DROSOPHILA
atgagcacttccggcgcagttgatcagtacacggtgctaaccggcgaccgttccaagatcaaggatttgctctgcagccgccttacggaatgtggctggcgggacgaggtgcgtctgatgtgccgcaacatcctgatggagaagggcaccaacaacagcttcaccgtagagcagctgatcgccgaggtaacacccaaggcacgcaccctggtcccggatgccgtcaaaaaggagctgcttatgaagatacgcaccattctcacggaaattgaggaggaacccgatgagccagaggacgaatcctaa

SEQ ID NO: 37578 - protein, 101 aa, DROSOPHILA
MSTSGAVDQYTVLTGDRSKIKDLLCSRLTECGWRDEVRLMCRNILMEKGTNNSFTVEQLIAEVTPKARTLVPDAVKKELLMKIRTILTEIEEEPDEPEDES

SEQ ID NO: 37579 - DNA, 3887 bp, DROSOPHILA
tcctaaccagcctgctcctccagcggcagctccgactaatctagccgggcacatgctgccgccactcggtggcattgccaagtcgctgattgagatacccgataccgagggcttcgatttcggcagcaacagctccgtgtgccccacgcccgactgaatctgtgtgttgtgtgtctgtgtttggtgtctgtccctgcgactttgtgtacacgttccctggtcgggatttatgtataaaatcgtacaaataaactttattaatatacaaatccaatgacgctgagttaaagttaggattcgtcctctggctcatcgggttcctcctcaatttccgtgagaatggtgcgtatcttcataagcagctcctttttgacggcatccgggaccagggtgcgtgccttgggtgttacctcggcgatcagctgctctacggtgaagctgttgttggtgcccttctccatcaggatgttgcggcacatcagacgcacctcgtcccgccagccacattccgtaaggcggctgcagagcaaatccttgatcttggaacggtcgccggttagcaccgtgtactgatcaactgcgccggaagtgctcatccttgtgtcgcgtatctaagtcttgcaaattaccaagtttcctttttcgagtccttgtcgatttcgcagcgtctgtttttttgcttttcttcgctgcatctatctttttgagctgtgtttttgttttgttgtgttgtgatgttggtacagtggtcatggcaaacagtctggctactttgtagctagtttttagatacggacattaatcaactttaaagaaatgaaaatatattaccaaatatatgtaaagttttaaaaatttttagtttaaattggaatgtatgcacaattcgtatgttttcggtcattttcctgggtcacttaaaatttaagctgcttttaagcgcccactctggcatctctgtcgctcgaagtttattcagcctggcagtctggcaacacctcggcgacgtcttaaactgaatttgcgaggcaattaattgaattaattgcttttcctacagctgtagtgcaatgatatgccgcctgtgcctggacgatgctgagcacagtgtgccaatctttgaccaggatgactccggcgatcagccagtgccctccaatctagcggagctaattgagaaacacctgcagttggtggtaagcagtgaattccgtttgaaccaccaacatttgttaatgaccagattgcatccttgttaccagctcctgcccaacgatggggtgtccaagagcctctgcacccagtgctggcagcagttggccgacttcgagcagttctgcgccatggtgatgaagaaacaattgggcctgcagcaactgaagatggagccgttctccgaggacgaggatgcggacactaaggcgcagatcctgtgcgaaccggagatcgatgtgagtcccgcggccgccgacaacgaagagtgcaacgagatcgacggcgatgccagcagcaacagcagaagcagtagcattcgcaccacatcgctacgagaaatgcgcctgccgtcgcccattagacgccgtatgcgtctaccccgggcagtcacagcacccaaaactcaggctgtcaaggccaaggccaggacgaagacccacaaggccgaggcggacgaggatgaggatgccgaaggcgagggcgatccagagagccgcagcagcaatagccgcgaaatggacagctatatcgctctgcacggtcgtttggagtgctgcatttgcggcggcgacgaacagtttcccaatttcgccgagatgaagcggcacttccggaatcatcaccagtccctcggttatgtggtctgctgccagcggcgctacaagaagcgtgccctctacgtggaccacctgcacatgcacaacgatccgaattactttaggtacttgaccagcccaggcaattgattgaatccccctactaatgaatgaactgtgcaggtgcaagatctgctccaagcaactggtcagccggattagctacgatgtacacatgctacgcttccatcccaacaaggacgacctaagcttcgcgtgtgatcagtgctcaaagcggttctccaagcagttccttctcaccattcactccagggtgcaccagcaggagcgcaatgagcagtgcaagcactgcgacagatcgtaagtgtaggcagcaagtagaagagcgaattgatgaattgcctctatccgcccacagctttcgcaccgccgttgacctgcggctgcatatgcgacgcacccatgaccccgccttcgtacccttcatctgcgactcgtgcggtgccaagttcaagacgaaacagaacctgctagtgcacaagcggactgtgcatcgcgagggctcccagctgcccgaggtacagtgccaggagtgccaggtgtggctgtccgacgagaacagtttgcgcaagcacatgtacatgcatctggatgccgcctcgctgcgtcagtggaagtgcgagcagtgcggcctggagaagggttcgcgggccaagctggcggcccacatacgctatcatcatccgaaggaataccacaagtgcacgcactgcgccaaggagttcaagagcagtcgcagcctcgaggagcacacagccacgcataccggccaggatttgtacgagtgcgccttctgcgagcgcaccttcaaaaactcggggaacatgcacaagcaccgccgccagatgcacgccgcccaggtggccgccctgcagcagcagaagaaggtgccgcccagcaagcgcaaggacaaaggtgacctgctgctcgacgtcctggccgctggaggcaaggatatgagccacgtcatgggtgcgggcgacatgaatgactgattgattctaaaaaccaaataaactagattggaatgacacataaaacacatttaattcgaaataagtttgggtattattagcttataatattcaaaagtgtattttgcaattggaacgaatttggaatcccgctattttcggattcatgcagttcccattatattttattcggtattggaatcccgctattttcgcattcatgcagttcccactatattttattcggtattttcgcagtcattagtgtggccaaaactcgaaaatatcaagggctagagcagctagatgttgcggcattcgcggcctggtcacactaagctagggctactttttatatcataagtcgagcgtttaggtaagcgaaacaaaaagagctttagttagaggtattagtttggttgctattatttctaaattgaaaacttcacttcctttgatccaaaagacactgaaaagacacgtttgcagttgagttcattattttctggtatacatacacactgattactcattcaattggcattttgctcttgtttttctccgattgccttgcactcgcataaatttaacacaaaaaagaagttcggggtgtttagaatccatccacttggtacagttcccatcgagctggtgagtactccgcgcagtgcaacgtatacacacttgaactcgaattctggcagcaaaatggtggtgacctattaataacacccgctcaattttccctcgcttttccattcagtctccaactagctgcaagtgagtacgttacttccgagatcctctccaaaaaaataaaacataaatccaaatccaaccagtgtagcatccattgaattagattttccgacacgttgcgcctatgacaatcctaattccatcctcttctctttcgtttaggtagctcggatggccatcgaaagggtaaattggtgttacatatagctttagagatcgtttcgaatcacattgataatcgttcgaaacgttctccgaagca

SEQ ID NO: 37580 - DNA, 1705 bp, DROSOPHILA
cggcgacgtcttaaactgaatttgcgaggcaattaattgaattaattgcttttcctacagctgtagtgcaatgatatgccgcctgtgcctggacgatgctgagcacagtgtgccaatctttgaccaggatgactccggcgatcagccagtgccctccaatctagcggagctaattgagaaacacctgcagttggtgctcctgcccaacgatggggtgtccaagagcctctgcacccagtgctggcagcagttggccgacttcgagcagttctgcgccatggtgatgaagaaacaattgggcctgcagcaactgaagatggagccgttctccgaggacgaggatgcggacactaaggcgcagatcctgtgcgaaccggagatcgatgtgagtcccgcggccgccgacaacgaagagtgcaacgagatcgacggcgatgccagcagcaacagcagaagcagtagcattcgcaccacatcgctacgagaaatgcgcctgccgtcgcccattagacgccgtatgcgtctaccccgggcagtcacagcacccaaaactcaggctgtcaaggccaaggccaggacgaagacccacaaggccgaggcggacgaggatgaggatgccgaaggcgagggcgatccagagagccgcagcagcaatagccgcgaaatggacagctatatcgctctgcacggtcgtttggagtgctgcatttgcggcggcgacgaacagtttcccaatttcgccgagatgaagcggcacttccggaatcatcaccagtccctcggttatgtggtctgctgccagcggcgctacaagaagcgtgccctctacgtggaccacctgcacatgcacaacgatccgaattactttaggtgcaagatctgctccaagcaactggtcagccggattagctacgatgtacacatgctacgcttccatcccaacaaggacgacctaagcttcgcgtgtgatcagtgctcaaagcggttctccaagcagttccttctcaccattcactccagggtgcaccagcaggagcgcaatgagcagtgcaagcactgcgacagatcctttcgcaccgccgttgacctgcggctgcatatgcgacgcacccatgaccccgccttcgtacccttcatctgcgactcgtgcggtgccaagttcaagacgaaacagaacctgctagtgcacaagcggactgtgcatcgcgagggctcccagctgcccgaggtacagtgccaggagtgccaggtgtggctgtccgacgagaacagtttgcgcaagcacatgtacatgcatctggatgccgcctcgctgcgtcagtggaagtgcgagcagtgcggcctggagaagggttcgcgggccaagctggcggcccacatacgctatcatcatccgaaggaataccacaagtgcacgcactgcgccaaggagttcaagagcagtcgcagcctcgaggagcacacagccacgcataccggccaggatttgtacgagtgcgccttctgcgagcgcaccttcaaaaactcggggaacatgcacaagcaccgccgccagatgcacgccgcccaggtggccgccctgcagcagcagaagaaggtgccgcccagcaagcgcaaggacaaaggtgacctgctgctcgacgtcctggccgctggaggcaaggatatgagccacgtcatgggtgcgggcgacatgaatgactga

SEQ ID NO: 37581 - protein, 544 aa, DROSOPHILA
MICRLCLDDAEHSVPIFDQDDSGDQPVPSNLAELIEKHLQLVLLPNDGVSKSLCTQCWQQLADFEQFCAMVMKKQLGLQQLKMEPFSEDEDADTKAQILCEPEIDVSPAAADNEECNEIDGDASSNSRSSSIRTTSLREMRLPSPIRRRMRLPRAVTAPKTQAVKAKARTKTHKAEADEDEDAEGEGDPESRSSNSREMDSYIALHGRLECCICGGDEQFPNFAEMKRHFRNHHQSLGYVVCCQRRYKKRALYVDHLHMHNDPNYFRCKICSKQLVSRISYDVHMLRFHPNKDDLSFACDQCSKRFSKQFLLTIHSRVHQQERNEQCKHCDRSFRTAVDLRLHMRRTHDPAFVPFICDSCGAKFKTKQNLLVHKRTVHREGSQLPEVQCQECQVWLSDENSLRKHMYMHLDAASLRQWKCEQCGLEKGSRAKLAAHIRYHHPKEYHKCTHCAKEFKSSRSLEEHTATHTGQDLYECAFCERTFKNSGNMHKHRRQMHAAQVAALQQQKKVPPSKRKDKGDLLLDVLAAGGKDMSHVMGAGDMND

SEQ ID NO: 37582 - DNA, 4247 bp, DROSOPHILA
ttccaaataatgatttatgcgatcgtgatacacatactgtcccttctggtgggctgtttctatccagcattcgcgtcctacaagatcctgaaaagtcagaattgtagcgtcaatgatcttcgcggatggttaatctactggattgcctatggagtttatgtggcctttgattatttcacagcgggtctgctggcatttattccattgctaagtgagttcaaggtgcttctcctgttctggatgttgccctctgtgggcggcggcagtgaggtgatctacgaggagttcctgcgatcctttagctgtaacgaatccttcgaccaggtcctgggacgtatcaccttggaatggggcgaattggtgtggcaacaagtttgctccgttcttagccatttgatggttttggcagatcgctatctcctgcccagcggtcatcgtcctgccctccaaataacgcccagcatcgaggatctggtcaacgatgccatagccaaaaggcagttggaagagaagcggaaacagatgggtaacttatctgataccatcaacgaggttttgggagaaaatatcgatttaaatatggatctgctgcacggatccgaatctgatttattggttattaaggagcctatttccaagcccaaggagagaccaataccgccgccgaagccaatgcgtcagccatcatcaagcaaccagcaagaaatgaatctttcgtcgcagtttatgtgacatcaattgatatcctcaatatgtcaggcggaagttgtcaaagttcagagctttcaaaaagcatacatctcagaaataaactaaccttaccgcaataaagtttatacaaaaaaagcatttaaattgattaattttagtcacaaaatattgaaccaatgtgttggttatcttcttagctattttttctagcctattttcttgtgtttgcacaatcagtcgcggaggtctcttttcgcggtccggtaacgctcacataacaaaactcagcaacgaatcaaaaacagctgcatttaacgcgattcgactcgggatttgtgtccttccttttatgagatgatatgccgactctgcctggaggatgctgagcacggggtgcccattttcggccaggaaccgccaatgggacaaccggcacatcgccagctggccgagctgatcgagcgacatctgctgctggtggtgagtggatttggacttttctaccccaaaaagatgtttttttctaatgattgaattgttcgctttcagttggcggaaaacgacgtggtgtccacgtgcctgtgcaaccgctgctggcggcagctggccgagatcgagcaattctgttccatggtagcggagaagcagcggtcgctgcaccgctccttgcagctgaaaactgaattgccggagctgcccgaactgacggagccggagcccgccctggtcgtgtggaacacggagtcgccaatcgagccaaagctcagctatgagggcgatgacatcaaggatcacatactgtgcgaacccgtcatcgacgccttgtccgcgggcgatgaaaaagacagtgactatggcgacacctttgaaccggacttcgagccggaatcgcagccagatgaagaagaagaaccggagccggatccggtaaaaccgcgccccaggggcaggccgcgcaaaactgcgctgcagcaaacgcatcaaatcatcaaaaggaagtacgagaagcgcaaacagcagaacaaggccaagatcacagagttatcattacgggaatcaagagcccggcaaagggaacttaaacgcagcagtgctggagcagaggatgatcaggatggcgacgaagacgaggaggacgaagaagatgtcgggggcgagctaacaccagatgccgacgaacagccaaagccgcgcggcaaacgtggccgacccaagaccaagaaactggtaaccgccgacgataatgatgatacctcggaggtgcccgtcaagcgcagcagcatcaaggaaatggacgactatatagccgccaatgttaagctcgactgcgccatttgcgccgccccgctggaagacttcaacgatctcaagcgccactttcgcgtggagcacgactgcactggctatgtgaagtgctgcaacaatcggtacaagaagcggacactgtacgtcgaccatttgcactgccacaaggatccgcagtactttagctgccagagctgccgcaagaacttccttaaccgcaacagccaggtgatgcacatgctgcgcttccactcgcagcagcaagagctggtccaccagtgtgccatctgcgaggcgcgctttgccaagaaattcctgctgaccatgcatcttaaaggacacaagggcaccgagcgtcccgaggtgtgcgacacctgcagcaagacgtgagtggcgctagactggtaggcgaatgtactaatgcgttgctctcttactttcatagattccgcaccaagtttgagctaagtgcccatgtaaagcgcatgcatgcggcagactttacgcccatcatatgcgacatatgcggtacacacttcaggagcaaggccaactttctcatccacaagaaggcgttgcatccggacgggccggtggcggaggtgcagtgtaccctgtgcggccgctggctgcgggacgaacggagcctgcgcaagcatctggcacgccacgatgaccgcgacggcgacaccaagtaccgatgcctgctctgcaatgcagagaagtcatcccgtgccgcactcagcagccacatgcggtaccatcactccgccaagcggcacaagtgcagtctctgcgacaaggagttcaagctgccgcgggcattggccgtgagttgaccagcgtatcagattctgatcgtgctaatcccggaacgttttcattacaggagcacatggccactcacacgggcatcgatctgtaccaatgccagttttgtacgcgcaccttcaagtctcatgccaacatgcacaaccacaagaagaagatgcatcccaacgactgggtgagaaagtactcgcagcccagcagtagcattacctccacagcggctccacttgctcatcccaatcatcctaaccagcctgctcctccagcggcagctccgactaatctagccgggcacatgctgccgccactcggtggcattgccaagtcgctgattgagatacccgataccgagggcttcgatttcggcagcaacagctccgtgtgccccacgcccgactgaatctgtgtgttgtgtgtctgtgtttggtgtctgtccctgcgactttgtgtacacgttccctggtcgggatttatgtataaaatcgtacaaataaactttattaatatacaaatccaatgacgctgagttaaagttaggattcgtcctctggctcatcgggttcctcctcaatttccgtgagaatggtgcgtatcttcataagcagctcctttttgacggcatccgggaccagggtgcgtgccttgggtgttacctcggcgatcagctgctctacggtgaagctgttgttggtgcccttctccatcaggatgttgcggcacatcagacgcacctcgtcccgccagccacattccgtaaggcggctgcagagcaaatccttgatcttggaacggtcgccggttagcaccgtgtactgatcaactgcgccggaagtgctcatccttgtgtcgcgtatctaagtcttgcaaattaccaagtttcctttttcgagtccttgtcgatttcgcagcgtctgtttttttgcttttcttcgctgcatctatctttttgagctgtgtttttgttttgttgtgttgtgatgttggtacagtggtcatggcaaacagtctggctactttgtagctagtttttagatacggacattaatcaactttaaagaaatgaaaatatattaccaaatatatgtaaagttttaaaaatttttagtttaaattggaatgtatgcacaattcgtatgttttcggtcattttcctgggtcacttaaaatttaagctgcttttaagcgcccactctggcatctctgtcgctcgaagtttattcagcctggcagtctggcaacacctcggcgacgtcttaaactgaatttgcgaggcaattaattgaattaattgcttttcctacagctgtagtgcaatgatatgccgcctgtgcctggacgatgctgagcacagtgtgccaatctttgaccaggatgactccggcgatcagccagtgccctcc

SEQ ID NO: 37583 - DNA, 2060 bp, DROSOPHILA
aacgaatcaaaaacagctgcatttaacgcgattcgactcgggatttgtgtccttccttttatgagatgatatgccgactctgcctggaggatgctgagcacggggtgcccattttcggccaggaaccgccaatgggacaaccggcacatcgccagctggccgagctgatcgagcgacatctgctgctggtgttggcggaaaacgacgtggtgtccacgtgcctgtgcaaccgctgctggcggcagctggccgagatcgagcaattctgttccatggtagcggagaagcagcggtcgctgcaccgctccttgcagctgaaaactgaattgccggagctgcccgaactgacggagccggagcccgccctggtcgtgtggaacacggagtcgccaatcgagccaaagctcagctatgagggcgatgacatcaaggatcacatactgtgcgaacccgtcatcgacgccttgtccgcgggcgatgaaaaagacagtgactatggcgacacctttgaaccggacttcgagccggaatcgcagccagatgaagaagaagaaccggagccggatccggtaaaaccgcgccccaggggcaggccgcgcaaaactgcgctgcagcaaacgcatcaaatcatcaaaaggaagtacgagaagcgcaaacagcagaacaaggccaagatcacagagttatcattacgggaatcaagagcccggcaaagggaacttaaacgcagcagtgctggagcagaggatgatcaggatggcgacgaagacgaggaggacgaagaagatgtcgggggcgagctaacaccagatgccgacgaacagccaaagccgcgcggcaaacgtggccgacccaagaccaagaaactggtaaccgccgacgataatgatgatacctcggaggtgcccgtcaagcgcagcagcatcaaggaaatggacgactatatagccgccaatgttaagctcgactgcgccatttgcgccgccccgctggaagacttcaacgatctcaagcgccactttcgcgtggagcacgactgcactggctatgtgaagtgctgcaacaatcggtacaagaagcggacactgtacgtcgaccatttgcactgccacaaggatccgcagtactttagctgccagagctgccgcaagaacttccttaaccgcaacagccaggtgatgcacatgctgcgcttccactcgcagcagcaagagctggtccaccagtgtgccatctgcgaggcgcgctttgccaagaaattcctgctgaccatgcatcttaaaggacacaagggcaccgagcgtcccgaggtgtgcgacacctgcagcaagacattccgcaccaagtttgagctaagtgcccatgtaaagcgcatgcatgcggcagactttacgcccatcatatgcgacatatgcggtacacacttcaggagcaaggccaactttctcatccacaagaaggcgttgcatccggacgggccggtggcggaggtgcagtgtaccctgtgcggccgctggctgcgggacgaacggagcctgcgcaagcatctggcacgccacgatgaccgcgacggcgacaccaagtaccgatgcctgctctgcaatgcagagaagtcatcccgtgccgcactcagcagccacatgcggtaccatcactccgccaagcggcacaagtgcagtctctgcgacaaggagttcaagctgccgcgggcattggccgagcacatggccactcacacgggcatcgatctgtaccaatgccagttttgtacgcgcaccttcaagtctcatgccaacatgcacaaccacaagaagaagatgcatcccaacgactgggtgagaaagtactcgcagcccagcagtagcattacctccacagcggctccacttgctcatcccaatcatcctaaccagcctgctcctccagcggcagctccgactaatctagccgggcacatgctgccgccactcggtggcattgccaagtcgctgattgagatacccgataccgagggcttcgatttcggcagcaacagctccgtgtgccccacgcccgactga

SEQ ID NO: 37584 - protein, 664 aa, DROSOPHILA
MICRLCLEDAEHGVPIFGQEPPMGQPAHRQLAELIERHLLLVLAENDVVSTCLCNRCWRQLAEIEQFCSMVAEKQRSLHRSLQLKTELPELPELTEPEPALVVWNTESPIEPKLSYEGDDIKDHILCEPVIDALSAGDEKDSDYGDTFEPDFEPESQPDEEEEPEPDPVKPRPRGRPRKTALQQTHQIIKRKYEKRKQQNKAKITELSLRESRARQRELKRSSAGAEDDQDGDEDEEDEEDVGGELTPDADEQPKPRGKRGRPKTKKLVTADDNDDTSEVPVKRSSIKEMDDYIAANVKLDCAICAAPLEDFNDLKRHFRVEHDCTGYVKCCNNRYKKRTLYVDHLHCHKDPQYFSCQSCRKNFLNRNSQVMHMLRFHSQQQELVHQCAICEARFAKKFLLTMHLKGHKGTERPEVCDTCSKTFRTKFELSAHVKRMHAADFTPIICDICGTHFRSKANFLIHKKALHPDGPVAEVQCTLCGRWLRDERSLRKHLARHDDRDGDTKYRCLLCNAEKSSRAALSSHMRYHHSAKRHKCSLCDKEFKLPRALAEHMATHTGIDLYQCQFCTRTFKSHANMHNHKKKMHPNDWVRKYSQPSSSITSTAAPLAHPNHPNQPAPPAAAPTNLAGHMLPPLGGIAKSLIEIPDTEGFDFGSNSSVCPTPD

SEQ ID NO: 37585 - DNA, 2723 bp, DROSOPHILA
gccatattctggtgtatagcgttgttgatcatggtgttccgcatgaataggtagtgatcgtccatattgcactgcagctccatcatgtcctcgtgctccgcctgaaatcggatggccgcgtttgtgaaagccaacgagcttcgcacgaagttttgcaaattgggtccctgatctaggtaacgctgctgctccttgtttggcttgaagctaaccttgcgattgtccgtgtccagtgccgcatgcattacaaagtcgaagaacttttgctgctccttctgggcgcgctccttgtactgctgcacctcgtcctcctgacagctaggatcccagactgaaagtctgtacgttaagtaaatggcaatttaattaaccacaaggattgcacttactatcgtccaggtcaatgttaaacaaagtgcttgcttcatagcgacgcggtttcaaagtggcctccagttgggccggcacgtccttgagatcgatgtcggagagatcaccgctcgatagatcgacggcactcgtgttgcccacgtattccagtacgtcactgcggcgtacgaatttcattaatttttctggactttcggctggctccatcgcgtcgcttcgtttgttttcagtttttaaatccgtaaacgcttgccaacacccatcgctgatccagtgatgccacatcttttgaacgtaattcgctctggctcttttcaagccaaaaccttttatacaaattaaaatatacgatataaaaaattgcacttttaatattaataaaaagatatatactcattgaaaaaaagctgaactaaaaaaggggaaaagggttatagggcataagtcattttatgaatgctaagcaggccttgcgtttagaatcacatttcaatttattgtatttgttcaagtagtcaaaccaaatgaacaaaatcgagaaccgaatacacagctatatatatactttctcaaaatccaaaattttaagattatccaaaatttccaaataatgatttatgcgatcgtgatacacatactgtcccttctggtgggctgtttctatccagcattcgcgtcctacaagatcctgaaaagtcagaattgtagcgtcaatgatcttcgcggatggttaatctactggattgcctatggagtttatgtggcctttgattatttcacagcgggtctgctggcatttattccattgctaagtgagttcaaggtgcttctcctgttctggatgttgccctctgtgggcggcggcagtgaggtgatctacgaggagttcctgcgatcctttagctgtaacgaatccttcgaccaggtcctgggacgtatcaccttggaatggggcgaattggtgtggcaacaagtttgctccgttcttagccatttgatggttttggcagatcgctatctcctgcccagcggtcatcgtcctgccctccaaataacgcccagcatcgaggatctggtcaacgatgccatagccaaaaggcagttggaagagaagcggaaacagatgggtaacttatctgataccatcaacgaggttttgggagaaaatatcgatttaaatatggatctgctgcacggatccgaatctgatttattggttattaaggagcctatttccaagcccaaggagagaccaataccgccgccgaagccaatgcgtcagccatcatcaagcaaccagcaagaaatgaatctttcgtcgcagtttatgtgacatcaattgatatcctcaatatgtcaggcggaagttgtcaaagttcagagctttcaaaaagcatacatctcagaaataaactaaccttaccgcaataaagtttatacaaaaaaagcatttaaattgattaattttagtcacaaaatattgaaccaatgtgttggttatcttcttagctattttttctagcctattttcttgtgtttgcacaatcagtcgcggaggtctcttttcgcggtccggtaacgctcacataacaaaactcagcaacgaatcaaaaacagctgcatttaacgcgattcgactcgggatttgtgtccttccttttatgagatgatatgccgactctgcctggaggatgctgagcacggggtgcccattttcggccaggaaccgccaatgggacaaccggcacatcgccagctggccgagctgatcgagcgacatctgctgctggtggtgagtggatttggacttttctaccccaaaaagatgtttttttctaatgattgaattgttcgctttcagttggcggaaaacgacgtggtgtccacgtgcctgtgcaaccgctgctggcggcagctggccgagatcgagcaattctgttccatggtagcggagaagcagcggtcgctgcaccgctccttgcagctgaaaactgaattgccggagctgcccgaactgacggagccggagcccgccctggtcgtgtggaacacggagtcgccaatcgagccaaagctcagctatgagggcgatgacatcaaggatcacatactgtgcgaacccgtcatcgacgccttgtccgcgggcgatgaaaaagacagtgactatggcgacacctttgaaccggacttcgagccggaatcgcagccagatgaagaagaagaaccggagccggatccggtaaaaccgcgccccaggggcaggccgcgcaaaactgcgctgcagcaaacgcatcaaatcatcaaaaggaagtacgagaagcgcaaacagcaga

SEQ ID NO: 37586 - DNA, 723 bp, DROSOPHILA
atgatttatgcgatcgtgatacacatactgtcccttctggtgggctgtttctatccagcattcgcgtcctacaagatcctgaaaagtcagaattgtagcgtcaatgatcttcgcggatggttaatctactggattgcctatggagtttatgtggcctttgattatttcacagcgggtctgctggcatttattccattgctaagtgagttcaaggtgcttctcctgttctggatgttgccctctgtgggcggcggcagtgaggtgatctacgaggagttcctgcgatcctttagctgtaacgaatccttcgaccaggtcctgggacgtatcaccttggaatggggcgaattggtgtggcaacaagtttgctccgttcttagccatttgatggttttggcagatcgctatctcctgcccagcggtcatcgtcctgccctccaaataacgcccagcatcgaggatctggtcaacgatgccatagccaaaaggcagttggaagagaagcggaaacagatgggtaacttatctgataccatcaacgaggttttgggagaaaatatcgatttaaatatggatctgctgcacggatccgaatctgatttattggttattaaggagcctatttccaagcccaaggagagaccaataccgccgccgaagccaatgcgtcagccatcatcaagcaaccagcaagaaatgaatctttcgtcgcagtttatgtga

SEQ ID NO: 37587 - protein, 240 aa, DROSOPHILA
MIYAIVIHILSLLVGCFYPAFASYKILKSQNCSVNDLRGWLIYWIAYGVYVAFDYFTAGLLAFIPLLSEFKVLLLFWMLPSVGGGSEVIYEEFLRSFSCNESFDQVLGRITLEWGELVWQQVCSVLSHLMVLADRYLLPSGHRPALQITPSIEDLVNDAIAKRQLEEKRKQMGNLSDTINEVLGENIDLNMDLLHGSESDLLVIKEPISKPKERPIPPPKPMRQPSSSNQQEMNLSSQFM

SEQ ID NO: 37588 - DNA, 2203 bp, DROSOPHILA
gcacgaggacatgatggagcctgcagtgcaatatggacgatcactacctattcatgcggaacaccatgatcaacaacgctatacaccagaatatggccaaccaacggtgaccctaagctatgcataaatatacatatgtgaattgtagatattgataaattaaattaagactcagagattgtaagacggtttgcttttggcttatacagtataattcgcttagctgcctcgagtactttgcacaatgcctcgatgcaggtaacttaaaaatgcagctaacttaatttttttttttctattttctattttctattcacacaaaaaaatggaaaaataatgcagatatcttgccgatgcagctaactatcgatgcagctaagcgaattatactgtatttatttctaccctaatatgtaactccctaagttgcacttctgatgatggctgcctttaagtctgaccgaaagaaatgaaaaccgatcaaacgtcttgaaaacattgtctgtatgtaaactgaagttaacaaaggtttcgttttatgttctggtctactcaggcgttaggtctactttaaattgtgtgtatatttgtgagctgcttattccttgttccaggctgccaggtatttcatgaggtccgtgagactctcgaaatcggtgcggctggctggtggttcgtccttggtgattcttggcagtgcattgcccatcttgaggcggaactcctggaactgcgaacgaaacgaaagatttaaagcgaaattcattgaacaaatcggaggcatgctcacatccttggctccggatagcttccagaagccgtagcagaaggcgccggtgcccatcacggcgtacagtgtgccccagcccagcgcccgcagggccagggtggcgccctcgtccatcaggatcatgccttgccgcgttccagcctgctggaggaccttgctatccgtcttcttggcggtggccagcgtgcgcgagaagccgaacagagcggacaccccgcccaccaaacccagaaaggcggcggctagaaaggaggatgaaatggagttgtacttcagtcagttgctggctgatatatatgcgtgtgtctgtatgtgtttggagaaccacctaccctggatgcggaacttgcgctccttctcggcggccactgcatccgcgctggtgccggcctcgctcatccttctcaattgcgatttattgttgtcgtaactactaatgcccgaattggatcgcacaacacagctgattgcttgaccgctcttgacaaccaacactggtgccgcagctgccactgccactgacgcgttcgcagaggtgctaagatggcgggagggaagctagaagtgaagtgctaaaagatagttcaaaatattcaacaggtactggcctttctcactgactatgagagtcaatttgattttaatgtgctgcatttaatttatttgttaaattactaactaatactaatagatatatttatataaaagatatagctaaaaaacgtcagtctggcaaccctgctacaacgaccgcaatatggtatggtatttcgccgctcgccctgcagtcacacttttcggtcggcgttgtccgcattttcacatcgcatcgcgtctgaaaaaacgggctaattcgcattcgcaatcgcctgtagggcccgactggtatagaatgcacgcccagcgtgccagcaacaaacagtgattgtttacccagccttctatttgggctttcgcgtttttcgagctccttcttttcccttcccggtcgtatcccttgccttttgcacgaggtgaaaagtgtgacgacgcagcagaaaaagcaaaagcaaaaaaaaggtggaacaaaaaaaaaccgcacacacacaccgaaagcaggctccactttggtctagtggccaccagtatcgctgacgaccaggatgagcacccccacggactcgaaggcgccgttgcgccaggtgaagcgcgtacagttcggcattttgtcccctgatgaaattgtaagtgcggctcacagattcattcgatcgacgccatattgaaaaattgaacaatattgtaaacgcaaaaatagcattccatcaattcgcaattcgtatatcgtggttttatatggtctatatgggaaatgcttatttcatgttcacatgcattccagtaacgcgagcaggacaacaaataacagatagt

SEQ ID NO: 37589 - DNA, 829 bp, DROSOPHILA
cgcaattgagaaggatgagcgaggccggcaccagcgcggatgcagtggccgccgagaaggagcgcaagttccgcatccaggccgccgcctttctgggtttggtgggcggggtgtccgctctgttcggcttctcgcgcacgctggccaccgccaagaagacggatagcaaggtcctccagcaggctggaacgcggcaaggcatgatcctgatggacgagggcgccaccctggccctgcgggcgctgggctggggcacactgtacgccgtgatgggcaccggcgccttctgctacggcttctggaagctatccggagccaaggatttccaggagttccgcctcaagatgggcaatgcactgccaagaatcaccaaggacgaaccaccagccagccgcaccgatttcgagagtctcacggacctcatgaaatacctggcagcctggaacaaggaataagcagctcacaaatatacacacaatttaaagtagacctaacgcctgagtagaccaggtgtgaatagaaaatagaaaatagaaaaaaaaaaattaagttagctgcatttttaagttacctgcatcgaggcattgtgcaaagtactcgaggcagctaagcgaattatactgtataagccaaaagcaaaccgtcttacaatctctgagtcttaatttaatttatcaatatctacaattcacatatgtatatttatgcatagcttagggtcaccgttggttggccatattctggtgtatagcgttgttgatcatggtgttccgcatgaataggtagtgatcgtccatattgcactgcaggctccatcatgtcctcgtgc

SEQ ID NO: 37590 - protein, 146 aa, DROSOPHILA
MSEAGTSADAVAAEKERKFRIQAAAFLGLVGGVSALFGFSRTLATAKKTDSKVLQQAGTRQGMILMDEGATLALRALGWGTLYAVMGTGAFCYGFWKLSGAKDFQEFRLKMGNALPRITKDEPPASRTDFESLTDLMKYLAAWNKE

SEQ ID NO: 37591 - DNA, 2731 bp, DROSOPHILA
tactcgccgaacatgtccatctactcgccgagcagcaccaagtactcgcccacctcgccaacgtacacaccgacggcccgcaactactcgcccacgtcaccgatgtactcgccaacggctccatcgcactacagtcccacgagtccggcctactcgcccagcagtcccacgttcgaggagagcgaagactgaggaagggaggacgggggtagctcccccagcacgtcccgatctccggggcggtcaagccgtagttaagtaccgactacgctcgatcgcccgaacgggaaaggtgaatttaataatattatgtttgtatacagcaaataggtctctcatacaaaattcaatactgtttgcaaaagtagctttaaacaagttgtataaattagcctacagtttcgtatttggttttgtggtaaagtaaacattttgaattgtttgcgttaaccagaaaagcgaattcgaagccatttatatttgcacaaattgtttcaagttgcaattctcgaactgtattcgataatgcgaatctatttctttgcacaacccactgtatgaaattgtttactaactggaagactcttgtcactcttctgcaaagtactttcacatttttttgaatatccctattcttattttgcctaatgttagtataaagaccctagttattaaaaacaacaacaaaacaagccaacgtcagacactatttgtagcgttttccatataccctttaaatccctaattaacccgatcagttgttttcgcctgcacacaaatgttacttataaagcataagaatgcaggcacccacccatacactacactatatattcatatatatttttacgtccgacacatttttgtaaattatgacagaaaacaaaatagaaaattataaaataaaaaccacaaaaaaatactcaacaacattggtttatttactttactaaactgatatgctcattctggcagactactgcaattacttgtagttgatttagggatttgagagccagtgcggccactcttggatctcgttgtatagagtcagtccgggactctgggtgctgatcacctgggagccggcgatcagggcgtaatcctcgctcagctcaccctgctgcactccgcaggccagcagatctttggccgcctggagagccgcatccgatggaagtttatctatcggagatgttgggcatgtagtgctccacatagcggagaatatcgatttgcaacttacccacaaagttgccgataaaggctatgcccgtgccaatggcattgtatccataggtgtgggcaccgcgcaatccccaaccagtgccttcgtatacgataccatcgttgccgatcaggaagctgaaagagatcattatcataatagttatcttgataattgcgaaggtgccatccgtacttgtaactaatatcgttgaagtccagctcgttctgatgatacgcctgcatgttctggagaatctcggcgcacttgagcagtccgctgcactcgccggtgaccgtgtgatggatgaccacatagcggatgggacgcacttggtagtggagtcccaacgaaggcttgccgccccactgacgcttcagcttgatggtggggcaattggctggcgaacgctgacgcgactttccggcggagacgaatgccagcagtagtagcaccagcccaatggccataatccaaggagatccgaatcgaaccggctgcatgatgttgatgtgctaagatctaaggctggatgagaactgctctcgatgggctatctgccggatttatcagggccaacgatccgagctttctggagcttacgatcccgcagagccacaggggactcccgtccattagccatctccagatcttccgatccgtcgcaaatctccgcgttctttgttcggttctttttgttttgcatcacatttgcgaagcgacaagcaaaaagcccaaacaacaatttaaaacgggttgaaagccgatctctgtgatggaatttccgcttttcagctagtgacgaatgcttccctagaagcagtaagatttgtgatatgtacacacgaatactaacagttaaactaaattaatgattagctgaaagtctcgcgagaagttcactgataacagccgcagagagcgttagatttttatttttttgtttgcaaattgagtagtaaatatgtaaaaaaaaagtataagtgtagcaatattactcacgaatatattgtgtatattatcgttcgagcttataaatgaaaagatatagaaggctcgcatgccgacatgtcgttcattaaatcaatttatggttaatgaattaaaaaagagggcgaggaaaaacgtatacttcccttaaatagaacgtaatggcaatagtttttgccaaaaaacaaaaaatgaacaaacaatacattttgtaggtcaatgaaatgcgtgtaaatgtttaataccgtccgcttttctttactaacttcaatttccaagggtaaaagtgttaaatgccagctaaaaaaaggcagtttcaatagtttttgccaaaaaacaaaaaatgaacaaacaatacattttgtaggtcaatgaaatgcgtgtaaatgtttaataccgtccgcttttctttactaacttcaatttccaagggtaaaagtgttaaatgccagctaaaaaaaggcagtttcattaggatgaataactcgcgggaaaagttaaagattcttttaa

SEQ ID NO: 37592 - DNA, 612 bp, DROSOPHILA
atgcagccggttcgattcggatctccttggattatggccattgggctggtgctactactgctggcattcgtctccgccggaaagtcgcgtcagcgttcgccagccaattgccccaccatcaagctgaagcgtcagtggggcggcaagccttcgttgggactccactaccaagtgcgtcccatccgctatgtggtcatccatcacacggtcaccggcgagtgcagcggactgctcaagtgcgccgagattctccagaacatgcaggcgtatcatcagaacgagctggacttcaacgatattagttacaacttcctgatcggcaacgatggtatcgtatacgaaggcactggttggggattgcgcggtgcccacacctatggatacaatgccattggcacgggcatagcctttatcggcaactttgtggataaacttccatcggatgcggctctccaggcggccaaagatctgctggcctgcggagtgcagcagggtgagctgagcgaggattacgccctgatcgccggctcccaggtgatcagcacccagagtcccggactgactctatacaacgagatccaagagtggccgcactggctctcaaatccctaa

SEQ ID NO: 37593 - protein, 203 aa, DROSOPHILA
MQPVRFGSPWIMAIGLVLLLLAFVSAGKSRQRSPANCPTIKLKRQWGGKPSLGLHYQVRPIRYVVIHHTVTGECSGLLKCAEILQNMQAYHQNELDFNDISYNFLIGNDGIVYEGTGWGLRGAHTYGYNAIGTGIAFIGNFVDKLPSDAALQAAKDLLACGVQQGELSEDYALIAGSQVISTQSPGLTLYNEIQEWPHWLSNP

SEQ ID NO: 37594 - DNA, 3294 bp, DROSOPHILA
gatatgagacttctttccctctccgggtggaataatgtccttcgtcaaagtgaaattccttttcgagcttggaatcattttctcatctttgctaccttgattacgctggccttgcaaatccaggacactcttattattggaagtacgatccactggctccggcaaggaggccccgatatgagatttctttccctctccgggtggaatattgtccttcgtcaaaaagaaattcctcttagagcttggaatcattttctcctctttgctggtatcactggtgtccgagcttagaattgttaattcatctttgttgctattgacgccttgattacgttggccttgcaaatccaggacactcttactattggaattacgattcactggctccggcaaggaggccccgatatgagatttctttccctctccgggtggaataatgtccttcgtcaaagtgaaattccttttcgagcttggaatcatttttctcatcttttgctaccttgattacgctggccttgcaaatccaggacactcttattattggaattacgatttactggctccggcaaggaggccccgatatgagacttctttccctctccaggtggaacaatgtccttcgtcaaagtgaaattccttttcgagcttggaatcattttctcatctttgctaccttgatcacgctggccttgcaaatccaggacactcttattattggaattacgatttactggctccggcaaggaggccccgatatgagatttctttccctctccgggtggaataatgtccttcgtcaaagtgaaattccttttcgagcttggaatcattttctcatctttgctaccttgatcacgctggccttgcaaatccaggacactcttattattggaattacgatttaatggctccggcaaggaggccccgatatgagatttctttccctctccgggtggaatattgtccttcgtcaaaaagaaattcctcttagagcttggaatcattttctcctctttgctggtatcactggtgtccgagcttagaattgttaattcatctttgttgctattgacgccttgattacgttggcctagcaaatccaggacactcttactattggaattacgattcactggctccggcaaggaggccccgatatgagatttctttccctctccgggtggaataatgtccttcgtcaaaaagaaattcctcttagagcttggaatcattttctcctctttgctggtatcactggtgtccgagcttagaattgttaattcatctttgttgctattgacgccttgattacgttggcctagcaaatccaggacactcttattattggaattacgattcactggctccggcaaggaggccccgatatgagatttctttccctctccgggtggaataatgtccttcgtcaaagtaaaattccttttcgagcttggaatcattttcttatctttgctggtagcactgcttttaaagtctggaatctttaattcatcttcgcaagaactatcaccatcgctggtatcactggtctccgggcctggagtgaatatatcatctccgaatgaactataatcatcactggaatcactgctgtccgagcttgaaatcatcatttcatctttgttgctattgacagctacgccctgggcaccgaatctgctgccttgattacgctggccttgcaagtccaggacactcttattattgaaattacgattcactggctccggcaaggaggccccgatatgagatttctttccctctccgggtggaataatgtccttcgtcaaagtaaaattccattttgagcttggaatcaatttctcatctttgctggtagcactgcttttaaagtctggaatctttaattcatcttcgcaagaactatcaccatcgctggtatcactggtctccgggcctggagtgaatatatcatctccgaatgaactataatcatcactggaatcactgctgtccgagcttgaaatcatcatttcatcattgttgctattgacagctacgcccttacgctggccttgcaaattgtccacatccacttcctccgggacactcaaattattgaaattacgaatcactggcttcggcgtcgggcgcttcctaggcttcttggtggtcacgctgccccctcgatcgaaaatgacattctccaatgtgagtctgccttcagagacttgcgggcaaaatgtccttgtcgcgtccgaatccaggcggacaaggttcttgtcgccaagcagtttcttgctgaaattcatggttatctttccgatatggcaatgcgaatgataaaagtaatttggtttccttgtgatgaaataagaaataatataatatacaaaattatataattttatccgctgtgacgatgttacctggtgaacgacttttttaaaaagagaatgtattcagggaatgagctccaaatgtcaactttcagctgtcaaatccacactttcgaagtgtaagggttactttaaattgtggttgtatccaataaagggaattatacaaaataaaatattttgtttccacttgaataaaagtcgatgcaatgtgttaaatatcagatctattatactgctcacacatgaacaggacattgtatacaagataatgttgtttgccttataaataacaattgtaatttgtaacaccaaattatgcgttaaaacgaaactacttcgttcctgcttgttaaatttccacccaattttttggggtttctcgcgatccgattttctattttcgcggtggccaagcattttccctaggtcaaaagccggatctgctaaacttgaatggctgccaagaggagtttttggcgagttcgtggcaagaaaatccaccgcccgaccaaaagaaaaataaaatcattttgtaaaaaaaacctaagcagatccggagacgacaacattattaatagacggatgctaaaggtttttgcacttggtttatttctggtgctccgcattcctgagatgccgtcgtggtgacaaaaatatatgcaacgcacacgagaaatgcaaacataacgcatatccactgcatatcccatccaatccaattacactgaaagaaattagcaaagttatgatttttaaacaaagtagaaatggcgtggtgtaaaataggtctattccagagagagggattgaaatgtagaaaaaaagttttctatatttaactatacttaactatatatacttaaactttatttaagatcttagtaatgattcagagtgcacgagaaatgtg

SEQ ID NO: 37595 - DNA, 1218 bp, DROSOPHILA
atgaatttcagcaagaaactgcttggcgacaagaaccttgtccgcctggattcggacgcgacaaggacattttgcccgcaagtctctgaaggcagactcacattggagaatgtcattttcgatcgagggggcagcgtgaccaccaagaagcctaggaagcgcccgacgccgaagccagtgattcgtaatttcaataatttgagtgtcccggaggaagtggatgtggacaatttgcaaggccagcgtaagggcgtagctgtcaatagcaacaatgatgaaatgatgatttcaagctcggacagcagtgattccagtgatgattatagttcattcggagatgatatattcactccaggcccggagaccagtgataccagcgatggtgatagttcttgcgaagatgaattaaagattccagactttaaaagcagtgctaccagcaaagatgagaaattgattccaagctcaaaatggaattttactttgacgaaggacattattccacccggagagggaaagaaatctcatatcggggcctccttgccggagccagtgaatcgtaatttcaataataagagtgtcctggacttgcaaggccagcgtaatcaaggcagcagattcggtgcccagggcgtagctgtcaatagcaacaaagatgaaatgatgatttcaagctcggacagcagtgattccagtgatgattatagttcattcggagatgatatattcactccaggcccggagaccagtgataccagcgatggtgatagttcttgcgaagatgaattaaagattccagactttaaaagcagtgctaccagcaaagataagaaaatgattccaagctcgaaaaggaattttactttgacgaaggacattattccacccggagagggaaagaaatctcatatcggggcctccttgccggagccagtgaatcgtaattccaataataagagtgtcctggatttgctaggccaacgtaatcaaggcgtcaatagcaacaaagatgaattaacaattctaagctcggacaccagtgataccagcaaagaggagaaaatgattccaagctctaagaggaatttctttttgacgaaggacattattccacccggagagggaaagaaatctcatatcggggcctccttgccggagccagtgaatcgtaattccaatactcggacaccagtgataccagcaaagaggagaaaatga

SEQ ID NO: 37596 - protein, 405 aa, DROSOPHILA
MNFSKKLLGDKNLVRLDSDATRTFCPQVSEGRLTLENVIFDRGGSVTTKKPRKRPTPKPVIRNFNNLSVPEEVDVDNLQGQRKGVAVNSNNDEMMISSSDSSDSSDDYSSFGDDIFTPGPETSDTSDGDSSCEDELKIPDFKSSATSKDEKLIPSSKWNFTLTKDIIPPGEGKKSHIGASLPEPVNRNFNNKSVLDLQGQRNQGSRFGAQGVAVNSNKDEMMISSSDSSDSSDDYSSFGDDIFTPGPETSDTSDGDSSCEDELKIPDFKSSATSKDKKMIPSSKRNFTLTKDIIPPGEGKKSHIGASLPEPVNRNSNNKSVLDLLGQRNQGVNSNKDELTILSSDTSDTSKEEKMIPSSKRNFFLTKDIIPPGEGKKSHIGASLPEPVNRNSNTRTPVIPAKRRK

SEQ ID NO: 37597 - DNA, 2918 bp, DROSOPHILA
tatatatttaagtatggatcgtcttaaatgtactgtaagttcaatgtattaatgtacatcatcatcataaaatgtatgtatgtaaaaagaaaacagattaaaaatggataaaatatgttgccagttttcaatgggattggctgagaaactttttcgaaatttgccgccatttgaagatgttgccacattcgaacattgacgttgccatattgtgaaaagtcttgtaccgtttattttaagctatgtaaaaatgatgttatttttattacctaacatgttttttttttcacagaatattctacagttaatttatacagattgaataaatttaatgtgctagaaagagatttttttgtgactaatttgaatagataaatggaaagatgttatcttgctttatgaacaacacacacttaactttctgatatatttatcaatcacaggataacttaagctcgtttttattaatgttctattatataattaatataataaaatgtttctatacacaagcaaccatcgctcagcgtttccgttcttatatattcttattataataagtattatttcgaatttatgcaacgattttacgttcgttcagtttcgcggccaacgttgccacatgttgccacacgcttgcccccaaaggtggccacctttcatgcagagccccgcgtatccaatgcagcgccaaaagcaaaacagtcgcaactttgacttgttgacggttggttctcctcgggattctggggccgcgtcaaaattccagatcgtttggcgcgagtgcgaactatttcaaaagttgcccctttgcgtgagacgtgcccccgaaatgttgaactcacaggaccaaagcgggccgggcccctgaaaaccaaaaagaaaataaagaaagaaattaaatagatataaacaaaagaaagaaaaaaacacactattaaatgatagcacaagtaatttaggcataggccggccaaaacaatcagaaacggagtgcagaatgcccatgaagaaggtgacggtgaaggagtacgattcgcaggatgaggccagcaccgagctgctggagaagctcaagcatctcgaccgtcgtgtggatgccgccgagggtggtggcttggccaagggaaccgccggcggacgaaggagcaccgcctgctggcagtcgatgaagtggaagtcggcgctcaatcacatcggactgctcgtctccctgtccatttactgcggcgtgggcggattggtaagcgatggtggggggcaacgtgtgtgcccagttcggtgcccagcagacccgaacataactaggcaaatatttaattattttcaatatgtttttatttatttatttttgtttttccatccccccctacctttggctcgccttttgcggctgccgcgaacatgcaaaatgatttgtgttgttgggcgaaaagccgaaaaatggctagcgttcaaattgtttggagcaagaaagaaatgcaaaacacacataaatacagtggccaatcgagcaggggatttaacttggcctaaaaagaaaatatttaatatccctctaatgcatttttaagccaacaaatttaagtcactatatccttccttcaaataaatgttgcatatataaaaaattatgaatccaacgatcgtgcactgtaccaatgcgattaaaaacaataacccaaacagagcgcaaatttattgcagtgggaaatagtaaaaattagaccaaaattaagtcataaaactattttgtacatttaagtgccccgcctcccctaattgccactgcacacatatatcgccacatatccagacgcccaaatctgtctggctggcggagcaggaggcagtgcatcatgtggaccacgtccaggcctttttggccttgtctaaacatttacattttcgccaatgacgtcgtggtttcagctcttggccaagttctagatacatatatacttgtatatatatgtacatatgtgtatttggaactgatgccgtcagttgtccacgactgcaaactacaactggctgcagttaatccaaggcaaaggttggagctgaagcagccaggagtcctaattgctgtgtcccacgacttgacatatggccaagtgtcgtgccgggtgggtatttgttatattgcctctcaatttccgcggactacaacaattggccactgcgaaatggatacgatggtgtgggtgacgggctaaatgagccaaacgaatgaatgtcgaagcttatcgagaatgtctgatatgtataggatatatagtacgatggaggtagccatcattaaggagcatctaaagcaggctatttataccgataatcagtgtttttcctaagcagattagtagatttctgttgaatgtattaaaagatggtttgattagcttaaataatcatcctttgacttgagctggcgaacttaaaatacatattgttagcaaagtgactctattttaatgtacttccatcgacggactgccttggcaactaatgatgattcatggcgccttgagttcttcgatattttattctcggccacgtcgaatgggaaatcgaacagcattatcttggcccaatcaacacctcgctgatatatcggagagccatgcattaatcaggcaacacattcgcattcatatggattgtcgaggaatccccacccccttttacgccctagctaaatttttccgaattttccgacggacgaaacgtaacggttcgggacgggacccttcaatctcttggccacacaccacatgttggccaattatgcgcacttctcacttaaatggctcatcaaatttatttcgaattcaaattcacatggtgaatggcatttgttttatgttccgatttcacgacgcctcaatcgcttgatctttttctttatcccaataaac

SEQ ID NO: 37598 - DNA, 396 bp, DROSOPHILA
atgcccatgaagaaggtgacggtgaaggagtacgattcgcaggatgaggccagcaccgagctgctggagaagctcaagcatctcgaccgtcgtgtggatgccgccgagggtggtggcttggccaagggaaccgccggcggacgaaggagcaccgcctgctggcagtcgatgaagtggaagtcggcgctcaatcacatcggactgctcgtctccctgtccatttactgcggcgtgggcggattgtgccccgcctcccctaattgccactgcacacatatatcgccacatatccagacgcccaaatctgtctggctggcggagcaggaggcagtgcatcatgtggaccacgtccaggcctttttggccttgtctaaacatttacattttcgccaatga

SEQ ID NO: 37599 - protein, 131 aa, DROSOPHILA
MPMKKVTVKEYDSQDEASTELLEKLKHLDRRVDAAEGGGLAKGTAGGRRSTACWQSMKWKSALNHIGLLVSLSIYCGVGGLCPASPNCHCTHISPHIQTPKSVWLAEQEAVHHVDHVQAFLALSKHLHFRQ

SEQ ID NO: 37600 - DNA, 3279 bp, DROSOPHILA
agtcattcttgcacttttatgaccatttttagacaagttatgataaaaacaccctttgtatctatcgtatttttggccaaaagacgtttttcagatttaaaggaataaaatatttagttttttggccacaacattggaaataatgatccaaatatggagtgcgatacctcgttgagttcgtattcaaaattctaaccaaactgcattcaaaatttgaaattttaattttttgtcattttttgcaaattttgatgatgttaccccttaccgaaaatgcgaaaatcgacccaaaaatttatttttcaaaatccgtcaaaaagtgatagggatagttagtagtggtaattagctgcacaaaacagtcattgttgcacttttatgaccatttttagattacttatagcatttatacttttgagtcgtaaagttgaagctccttgtttcactacgcttttttatcatagacaaccggcttatattgaatcttcacaagtatttagctattaaattgaattttttaaatctcattcagatagaacacctttcgctggagctgctcaactaccaaccgcccatgctgtgtggacttttgcacctggatcgtcgattggtgtacctgattgctgtcaccgccttttcctacttcataactctggtgcagttcgatctctatttgcgcaagaagtcctagttagtgttcaatcacaataatcacaacaagccgaatttaaaatgcttagctctgtttttttttttttttaagtctagacaaggtttaatagttatagaaccacaaatacttgttcctaatgcagctgaataaaagcgtttaactaatggcgttgacttttcttctcttgaatgcggtgtgtcctttgaagatagcagtccaattgtacatatgtatattgtatagataaggacatcaatgggtggtcgttgtactatttttggaacgatggacgatgacatcgagtcaggaaattagttgctggccaccatgcgagtgggcaagttgtgccgcctggctttgcgcttctggatgggattgattctggtcctgggtttctccagccactactacaatcccactcggcggcgtttggtttactcgagaattttgcagacatacgactggctgttaatggtcatcaacttgggtgctttttacctctactatagatacgccatgacgtattttctggagggcatgtttaggcggcaaggattcgtaaatcaggtaagaataaatctgtgattataaaatacttatcatatatcaattgcaaacaaatggcaggtgtccacatgcaacgtattccagcagctactgatggcagtgacgggcacatggttgcactttctatttgaacggcacgtgtgtcagacgtacaacgagttgtccagaattttgaagcatgacctgaagctcaaggagcacagtcgcttctactgcctggcctttctggccaaagtctacaattttttccacaacttcaactttgccctaagtgccatcatgcattggggcctgcgacccttcaatgtttgggacttactggccaatctgtactttgtctacaactcactggctagggatgccattctggtggcctatgttctgttgctgctcaacctgtcggaggcactgcgtctgaatggccagcaggagcacgacacctacagcgacctcatgaagcagctgcgcagacgggagcgattgctgaggattggaaggcgagtgcatcgcatgttcgcctggctggtggccatagccttaatatatctggtgtttttcaacacggccaccatttacctgggctacaccatgttcattcagaagcacgacgccttgggcctgcgtggccgaggcttgaagatgctgctcacggtcgtctcctttttggtcatcctatgggacgtcgtgctactgcaggtcatctgtgaaaagcttttggccgaggaaaacaaaatttgcgactgtccagaggatgtggcctcttccaggacgacttacagacaggtaggaaaagttatcctaatttctagtaaatacaaatctttttccgagctagaaaaatataattcaaattggttaattaaagttattaactttctagtgggaaatgtccgctttaagacgagctattacacgatcatcgccggaaaacaatgttttgggcatgtttcgaatggatatgcgatgcgcattcgctttgatcagctgcagtttgtcctatggcattataatcattcagattggatatataccaggctaatttaagcattccaaagaaattattaccgtggtgcaatcggcacttaatcagcagcttgcttcacttaagttaattactaagataatctagaggattggatctctggtggaatgaaaacaaaactcgcagcttatagattcattgtacaaaagacggtgaaacctaaaggtattgagctaagcataaacgtatgaattaattaattaaattaattacgaaataaagtccaatcattgttatttttcatttttaattttattgcattttccaaaccaaagggaatcaattttcaaattaatttaatttaaacaaacgttattaatatctgtaattcttaacaggttcttttttggatatataaaaagaatagtttgaagcatgcgatttcattgtggcaagtgtttagcaggtcctctattggacttggtcgctggtttccttttcagtgcctttgagaagacatctggattttctacgaaattattattattaacctgatcaaccgacagaacttccttcttatcgagcacctttgtgagaaaagatttgggatcgacaattaaggagttcatgttcaaatctgttggcttggatgaagtggcaggatttgtggagtttgccgacctgccatcaccttcattcctgtttatgaaacccagttttgtgctatcgttacacccgattaattgcaccttttccgctctcaatcgatccaggcgcctctgctcctccttcatcagactgacggctatttgctgagagttggatttgatttggatttccgatattggactcttggtgcagcgaatgcgcatgtgataggctttggatgactgcgggctgtcagtgttggcaaaggaatcaatggagctgccgcaaggatgcaggccatctatgtccagtttggtctgcatcctggagatccttacatccttcaccaccttcgggggattctcgtgaccgaaatggaccagggaaatggccttctttagcaattgca

SEQ ID NO: 37601 - DNA, 1122 bp, DROSOPHILA
atgcgagtgggcaagttgtgccgcctggctttgcgcttctggatgggattgattctggtcctgggtttctccagccactactacaatcccactcggcggcgtttggtttactcgagaattttgcagacatacgactggctgttaatggtcatcaacttgggtgctttttacctctactatagatacgccatgacgtattttctggagggcatgtttaggcggcaaggattcgtaaatcaggtgtccacatgcaacgtattccagcagctactgatggcagtgacgggcacatggttgcactttctatttgaacggcacgtgtgtcagacgtacaacgagttgtccagaattttgaagcatgacctgaagctcaaggagcacagtcgcttctactgcctggcctttctggccaaagtctacaattttttccacaacttcaactttgccctaagtgccatcatgcattggggcctgcgacccttcaatgtttgggacttactggccaatctgtactttgtctacaactcactggctagggatgccattctggtggcctatgttctgttgctgctcaacctgtcggaggcactgcgtctgaatggccagcaggagcacgacacctacagcgacctcatgaagcagctgcgcagacgggagcgattgctgaggattggaaggcgagtgcatcgcatgttcgcctggctggtggccatagccttaatatatctggtgtttttcaacacggccaccatttacctgggctacaccatgttcattcagaagcacgacgccttgggcctgcgtggccgaggcttgaagatgctgctcacggtcgtctcctttttggtcatcctatgggacgtcgtgctactgcaggtcatctgtgaaaagcttttggccgaggaaaacaaaatttgcgactgtccagaggatgtggcctcttccaggacgacttacagacagtgggaaatgtccgctttaagacgagctattacacgatcatcgccggaaaacaatgttttgggcatgtttcgaatggatatgcgatgcgcattcgctttgatcagctgcagtttgtcctatggcattataatcattcagattggatatataccaggctaa

SEQ ID NO: 37602 - protein, 373 aa, DROSOPHILA
MRVGKLCRLALRFWMGLILVLGFSSHYYNPTRRRLVYSRILQTYDWLLMVINLGAFYLYYRYAMTYFLEGMFRRQGFVNQVSTCNVFQQLLMAVTGTWLHFLFERHVCQTYNELSRILKHDLKLKEHSRFYCLAFLAKVYNFFHNFNFALSAIMHWGLRPFNVWDLLANLYFVYNSLARDAILVAYVLLLLNLSEALRLNGQQEHDTYSDLMKQLRRRERLLRIGRRVHRMFAWLVAIALIYLVFFNTATIYLGYTMFIQKHDALGLRGRGLKMLLTVVSFLVILWDVVLLQVICEKLLAEENKICDCPEDVASSRTTYRQWEMSALRRAITRSSPENNVLGMFRMDMRCAFALISCSLSYGIIIIQIGYIPG

SEQ ID NO: 37603 - DNA, 3676 bp, DROSOPHILA
tggggcctgcgacccttcaatgtttgggacttactggccaatctgtactttgtctacaactcactggctagggatgccattctggtggcctatgttctgttgctgctcaacctgtcggaggcactgcgtctgaatggccagcaggagcacgacacctacagcgacctcatgaagcagctgcgcagacgggagcgattgctgaggattggaaggcgagtgcatcgcatgttcgcctggctggtggccatagccttaatatatctggtgtttttcaacacggccaccatttacctgggctacaccatgttcattcagaagcacgacgccttgggcctgcgtggccgaggcttgaagatgctgctcacggtcgtctcctttttggtcatcctatgggacgtcgtgctactgcaggtcatctgtgaaaagcttttggccgaggaaaacaaaatttgcgactgtccagaggatgtggcctcttccaggacgacttacagacaggtaggaaaagttatcctaatttctagtaaatacaaatctttttccgagctagaaaaatataattcaaattggttaattaaagttattaactttctagtgggaaatgtccgctttaagacgagctattacacgatcatcgccggaaaacaatgttttgggcatgtttcgaatggatatgcgatgcgcattcgctttgatcagctgcagtttgtcctatggcattataatcattcagattggatatataccaggctaatttaagcattccaaagaaattattaccgtggtgcaatcggcacttaatcagcagcttgcttcacttaagttaattactaagataatctagaggattggatctctggtggaatgaaaacaaaactcgcagcttatagattcattgtacaaaagacggtgaaacctaaaggtattgagctaagcataaacgtatgaattaattaattaaattaattacgaaataaagtccaatcattgttatttttcatttttaattttattgcattttccaaaccaaagggaatcaattttcaaattaatttaatttaaacaaacgttattaatatctgtaattcttaacaggttcttttttggatatataaaaagaatagtttgaagcatgcgatttcattgtggcaagtgtttagcaggtcctctattggacttggtcgctggtttccttttcagtgcctttgagaagacatctggattttctacgaaattattattattaacctgatcaaccgacagaacttccttcttatcgagcacctttgtgagaaaagatttgggatcgacaattaaggagttcatgttcaaatctgttggcttggatgaagtggcaggatttgtggagtttgccgacctgccatcaccttcattcctgtttatgaaacccagttttgtgctatcgttacacccgattaattgcaccttttccgctctcaatcgatccaggcgcctctgctcctccttcatcagactgacggctatttgctgagagttggatttgatttggatttccgatattggactcttggtgcagcgaatgcgcatgtgataggctttggatgactgcgggctgtcagtgttggcaaaggaatcaatggagctgccgcaaggatgcaggccatctatgtccagtttggtctgcatcctggagatccttacatccttcaccaccttcgggggattctcgtgaccgaaatggaccagggaaatggccttctttagcaattgcaccaccgcctggacctccagtggccgctgttccggccccatgatctttggatcgggaacagtggagtcatcatccgactgctgcttcttcccttctaactttgattctttctgtttctccaggagcttcttgacccgctcgttcaacatcctggcctccgatttgcgcaccattctctccatattcctggtcctcatcgcatcaattaccagctgcgaggacatcatacgatccctttgcgtcatttgaagaatcttaagcggtatggcggtatggctggatgagtgagggccactgcaatcctgggatagcatggtcctcgccagctgctcctctcttcgctgcgcattgtgtaacctcaatgttgctgacttttcaaatggaaggcgtcgcttatgcctcttcgtccttttgtcccgctctctgaccaaaggatgcatacctactaggtaagctaccatatttttaatgtatattatattaccaatttcaatcaatttagatcttttgaaaacctaccatttggatgtgtgttgatcctaaaaggtgtttgccgttcggtgtatgagatttgcttgctattcggcttcggtttatttgggtcctgtctgcggggttcattgccaccggaagtactgctcgagttattcctggtcaatcgcatcaggtgtctccagggactctgcgtgcggatccgcgcctcagcatcatcatctggtgaggattaggtacaacctttgtgaaatattctacataaaaagtaaacaaccaaatgaaccctacgcattaggcgacattgtcgagagccgcaaagattcaggatcctcctaatccagtccaacttgatggtatgggccattgccaactgtaactgaaacgcaaaaaggtaaaaaaggagaacggaatgcgaattttgagaccgaatttcacgatggcgttcgtttagtcgagcccattacataatttggaaggcaaatctaaagaaaacgacattagatatgaagcctgcccagataaactgtacaaatttttttaatatttcttgatcgattttattatatactttcataatacaaagaaaataatagccaaacacacaatgagattcagctgcaacctgaaaagtatgctacaaaaaagtgaatacacttctcgtcaatcggctaaaatctaaaaaattaagtacatgataactaaataatgaaaatgccaggcatatgattacgtatttttattacggtttatttcgagtgtgttttttttttttttttgagtgtgggcgagtgtttcatccgctgatgaacaaattacatttgacataatacataatgaaaacgcattttgaggccgaatggggtctccaatttgtatctcgcacatgaacatgagagtattgtacatatgttgggtgtacttgtgtgttttttttttttgcccatatattcatttatatcaacccaattcttaaactcattactatccatcgatttccgttttggttttagcactatcgtatatgtatatatgtatagcatatatagctctactgccgatctgatcgcgaacttcaacgaaattgaatttgatttactttctttactgatcgctaaggctaaagattccttcttcttcttctttttctttttcctagtttctcgtgggtgtatgtatgactagcaaaaaaccatttccttgttttttgtttccatgggggtggtggcagtgggtcaggatgtaaatgtgatgtaaacgggatgtacataagtgtgagcggaaaccatacgaaagctgcccgtacatgtgtctatgtgtgtgtatattttcatcgaaattcgattcgattcgattcgacaacaacaacaacaaaaagaaaaggcacaattttgatgaaacgctttcccatgctttgtatgcgcgcgcgtg

SEQ ID NO: 37604 - DNA, 1517 bp, DROSOPHILA
atggatagtaatgagtttaagaattggttacagttggcaatggcccataccatcaagttggactggattaggaggatcctgaatctttgcggctctcgacaatgtcgcctaatgcatgatgatgctgaggcgcggatccgcacgcagagtccctggagacacctgatgcgattgaccaggaataactcgagcagtacttccggtggcaatgaaccccgcagacaggacccaaataaaccgaagccgaatagcaagcaaatctcatacaccgaacggcaaacaccttttaggatcaacacacatccaaatgcttacctagtaggtatgcatcctttggtcagagagcgggacaaaaggacgaagaggcataagcgacgccttccatttgaaaagtcagcaacattgaggttacacaatgcgcagcgaagagaggagcagctggcgaggaccatgctatcccaggattgcagtggccctcactcatccagccataccgccataccgcttaagattcttcaaatgacgcaaagggatcgtatgatgtcctcgcagctggtaattgatgcgatgaggaccaggaatatggagagaatggtgcgcaaatcggaggccaggatgttgaacgagcgggtcaagaagctcctggagaaacagaaagaatcaaagttagaagggaagaagcagcagtcggatgatgactccactgttcccgatccaaagatcatggggccggaacagcggccactggaggtccaggcggtggtgcaattgctaaagaaggccatttccctggtccatttcggtcacgagaatcccccgaaggtggtgaaggatgtaaggatctccaggatgcagaccaaactggacatagatggcctgcatccttgcggcagctccattgattcctttgccaacactgacagcccgcagtcatccaaagcctatcacatgcgcattcgctgcaccaagagtccaatatcggaaatccaaatcaaatccaactctcagcaaatagccgtcagtctgatgaaggaggagcagaggcgcctggatcgattgagagcggaaaaggtgcaattaatcgggtgtaacgatagcacaaaactgggtttcataaacaggaatgaaggtgatggcaggtcggcaaactccacaaatcctgccacttcatccaagccaacagatttgaacatgaactccttaattgtcgatcccaaatcttttctcacaaaggtgctcgataagaaggaagttctgtcggttgatcaggttaataataataatttcgtagaaaatccagatgtcttctcaaaggcactgaaaaggaaaccagcgaccaagtccaatagaggacctgctaaacacttgccacaatgaaatcgcatgcttcaaactattctttttatatatccaaaaaagaacctgttaagaattacagatattaataacgtttgtttaaattaaattaatttgaaaattgattccctttggtttggaaaatgcaataaaattaaaaa

SEQ ID NO: 37605 - protein, 458 aa, DROSOPHILA
MDSNEFKNWLQLAMAHTIKLDWIRRILNLCGSRQCRLMHDDAEARIRTQSPWRHLMRLTRNNSSSTSGGNEPRRQDPNKPKPNSKQISYTERQTPFRINTHPNAYLVGMHPLVRERDKRTKRHKRRLPFEKSATLRLHNAQRREEQLARTMLSQDCSGPHSSSHTAIPLKILQMTQRDRMMSSQLVIDAMRTRNMERMVRKSEARMLNERVKKLLEKQKESKLEGKKQQSDDDSTVPDPKIMGPEQRPLEVQAVVQLLKKAISLVHFGHENPPKVVKDVRISRMQTKLDIDGLHPCGSSIDSFANTDSPQSSKAYHMRIRCTKSPISEIQIKSNSQQIAVSLMKEEQRRLDRLRAEKVQLIGCNDSTKLGFINRNEGDGRSANSTNPATSSKPTDLNMNSLIVDPKSFLTKVLDKKEVLSVDQVNNNNFVENPDVFSKALKRKPATKSNRGPAKHLPQ

SEQ ID NO: 37606 - DNA, 2029 bp, DROSOPHILA
ataattcttagtagtctatttttagctcatgagaagttgatattgtttagtagggcaactgtgctgattcatttcgtattagttgtatgtacggaagttgactgatctacagttgccttactaaatagttatcttactcatcttggatttaaatgtacatccgttctatcctacattctatattctagttttaacagctattagtgaaattcagttcttttatgtacagaagttgactgatctacagttgcctatcttgttatctgctttactcgcattggatttaaatttacatccgttctatcctatattctatattctagtcttcaaacgtcggtttcggacaatactatcaagaatattgtcataatatatcaaataaagacaattaacatttagaacgtaaatttcccacgtgctaattaaggatcacatacacatccctctgcttaaacataagttgattagttctatgctatcttctcaattacaagttcttagtctaaaatgaagaactgaccaatgcaatgggagttaacatccttaacagctagttatgcatatatggtaattgaagttcaaacttctctgagttgcaacttgttggttcacaaagttttttagaattccaaagactgctgcaatttaagctacaagctagtcacatgaatatggtaattaagtcataatatgcctatgttttgatgtttaaacttcctctctagatgctgactaataagtcataataagcttatgttttgatgttcaaacttcaaactctctaaatgctaactataagtatggtaatttaaatcttaagtaaattgaagttcaaactctctctaaatccttacattaatgcgatttgcagcagagctccacagcccatcctgtcgatggttgtaaaacgactgatgcttatagactagtccgcatggcgatagagtacgatctgcagccgattgcctggaccggatcagcatcagaatttcggcgggtgctatgagctctcggcattcttcttcttcagcgtctccatgacgccggcgaagttggccgtcttctttttggccgacttgggcgtggacgtctggctgcggacgcgcatctgggtgggggccacatcgtcgctgaaatcaaagtcgttggccttctgcggtctgcggggacacgaaaatcaatcataagttatgttaaccttcggatggtgctgcacttgttcttactcctgctcaatggcgtcggtggcctgttcgagttccttgctattgccgccagatcccgcctccggcgatggagccctgcgtcccggaaattgccattgcagttccggaatatttcccgcctccagcatcagatagtagccctctagctcctccgcgttggcggagaacttgtccgccgtattcgccgccggctccacatccgttgccatcgttttctcggatttaaacaatccaaatgaactggaaatttgcgtttctttccacaatagaacctattggtttcgcgacctttctggaatgaaagcgatagtttgctttggcgtgcttatcgaacagttatcgaacgttcgttgctatcgattttcgggcttagtgttgcaaagtgtccgagctgggcggttgatttgaacacatttgctgctcgaaatggattttctatttataggtttcattattctcttctttattaagtgcacacccatgcccggaatgtttccgctccgagtgcacacaacttcgaggattgttctcgatggcgcattgtttggtttagggggaagaacaatattatcttgttgagacttttactttttaggatggaaagtatgtgtttaaatattgttaatctgtacaaagaaataagaactaacaaaaattagacttcctttttaatgtatattcctcaaattacgaacaaacgctaatatgttttaggaatattttaaaagtcttcttggcaatttgatttgcacttgaaaacagctaaaatgcgttaaagaaaccaatctcatgcatatggaaaa

SEQ ID NO: 37607 - DNA, 446 bp, DROSOPHILA
cgcgaaaccaataggttctattgtggaaagaaacgcaaatttccagttcatttggattgtttaaatccgagaaaacgatggcaacggatgtggagccggcggcgaatacggcggacaagttctccgccaacgcggaggagctagagggctactatctgatgctggaggcgggaaatattccggaactgcaatggcaatttccgggacgcagggctccatcgccggaggcgggatctggcggcaatagcaaggaactcgaacaggccaccgacgccattgagcaggaaccgcagaaggccaacgactttgatttcagcgacgatgtggcccccacccagatgcgcgtccgcagccagacgtccacgcccaagtcggccaaaaagaagacggccaacttcgccggcgtcatggagacgctgaagaagaagaatgccgagagctcatag

SEQ ID NO: 37608 - protein, 122 aa, DROSOPHILA
MATDVEPAANTADKFSANAEELEGYYLMLEAGNIPELQWQFPGRRAPSPEAGSGGNSKELEQATDAIEQEPQKANDFDFSDDVAPTQMRVRSQTSTPKSAKKKTANFAGVMETLKKKNAESS

SEQ ID NO: 37609 - DNA, 2311 bp, DROSOPHILA
caaaactatcatcatctatggagattcgtttgttagttttcgtgtgtgtgtccgtgttgtttgtgacacacgatataccaaagattaatataatgactcgctgtggttttaagtagtttgtgctaagatatttgattgccagttgggcgtgtagcttgtaagcttagagaacaaacccagctattcctagttagcaatttcacgctccagtttgctatacgcgatacttaagatacttggagtgcaaagtaatcatttctcctagcgttaaatagacgaattttaaaattgacaaccgatgtgtagttttatttaagctacaccaacttgtttccgcttcaagtgcaatgcaagttgagttcagtttttccacttttattccatagatctattgaaaattcctgtcgctgggaatactccggtgttatagctatattatacacgattttcttaactatatagtacacacacacaatcgcacacacacacacatacacacacgcaggctgatgatacatacatacatacatatatgtaaatcgtatttcattctactgttgcattaaaaaaggtacaaaaatgatatacctaatggaaaactagcgacataattgcttaatgtgcctacatttatgctaaaaggaaagcggatgaaagaagggaaagtggtcaagtggcatgtgcctccttcgaggagacactctgcatgcatatacaaaacatttagctggaggatgcagttcctctttgttcgctgcttaactcaagtgcttagtcatatctaaagggctaatcgaatcactcatactcgagccacagctcgtccggatcgcaatcaactcgaaggcaaaagttctgggtaggcatttacaaagtgagatatatgcatatatggcgctgccatgaagtactgtcatcaagtacatggaacaaagtctgttttgtatggccaggaccaagctcaatctgttaatctctctatgcgctaaacgatcatggatcactcctccttccgccgtacgcgtcgcctaaacgtgggcagtcgatccagcagagccagcaggatgctgccgggcagtcgctggtgttgattgatcagatcctcgatagccgtagccacctgcacaaagttaaaagagcagcgcattagccaggcaatagatgtatatgaaccgagagtcaccttgatttgcagatcctgcggggttaggttctcatcgtagggtataggcttgcccagatacgtccgaaacttgacgggaaagccaccgtagatgggatacaccggtatgcgcaccttattgtacagtcgcatgaagaacgtccgaaagatgcccacctgacggaagccctcgcgcagattctgcgtaaagcagggaatgatgggcgcctttgcctcgatggccaccttggcgaaaccgacacgattgcgccacaacagctcgtagtagtgatcaccgaactgtgcctcataaacgccgcccggcgaaatggccagcagattgccatcccgcaaaatgctaacgcacgactgcaccgtgccgggactgacgtggaatgcctcagagatggtgccccagccgggcagcttgaacagaaatcgatcgccgatcgtgtagatcaaacgctcgcgctgcagcaacattcgcgaattcaagtagtacatatcgatgggtatggcgccatgatagtagacaatcagcgccggtccctcctgtggcacattctccaatccgatcacctcgtagccatgatagatccgagcatgtgcatcccaaatggcggccactatcttgcggcccactcgccaaaaattgcgatcgccctgcacggcgcgcattattacctgcctggaagatacaaggtggttaactatattaaacaattacgcatgatataatatataaatctttggttttttggtatctgaagtatctgaacttaaggcctggcataaacacttggttaactgcgtgatacgtgtatcaaatgcacacagtagatgcctgatatttcaggaatatattattcccatattctaaaagccgatcgagggcgaaaactaaagttcgagaaggtcattcaggtttcggccagctcgcctaattgatttggcagtcgttgtcggaacaagcgggcactgataattatgtttaaatttagtttgcctgtccgcaggtgttatcagcacaagatggtcgtgtctctccatatcaaagaacttataaatcaatatacatgcatatatgtacgtacatattgtataaacacatatttatataaacagaattcggctcaccttggcagaaaa

SEQ ID NO: 37610 - DNA, 840 bp, DROSOPHILA
atgcgcgccgtgcagggcgatcgcaatttttggcgagtgggccgcaagatagtggccgccatttgggatgcacatgctcggatctatcatggctacgaggtgatcggattggagaatgtgccacaggagggaccggcgctgattgtctactatcatggcgccatacccatcgatatgtactacttgaattcgcgaatgttgctgcagcgcgagcgtttgatctacacgatcggcgatcgatttctgttcaagctgcccggctggggcaccatctctgaggcattccacgtcagtcccggcacggtgcagtcgtgcgttagcattttgcgggatggcaatctgctggccatttcgccgggcggcgtttatgaggcacagttcggtgatcactactacgagctgttgtggcgcaatcgtgtcggtttcgccaaggtggccatcgaggcaaaggcgcccatcattccctgctttacgcagaatctgcgcgagggcttccgtcaggtgggcatctttcggacgttcttcatgcgactgtacaataaggtgcgcataccggtgtatcccatctacggtggctttcccgtcaagtttcggacgtatctgggcaagcctataccctacgatgagaacctaaccccgcaggatctgcaaatcaaggtgactctcggttcatatacatctattgcctggctaatgcgctgctcttttaactttgtgcaggtggctacggctatcgaggatctgatcaatcaacaccagcgactgcccggcagcatcctgctggctctgctggatcgactgcccacgtttaggcgacgcgtacggcggaaggaggagtga

SEQ ID NO: 37611 - protein, 279 aa, DROSOPHILA
MRAVQGDRNFWRVGRKIVAAIWDAHARIYHGYEVIGLENVPQEGPALIVYYHGAIPIDMYYLNSRMLLQRERLIYTIGDRFLFKLPGWGTISEAFHVSPGTVQSCVSILRDGNLLAISPGGVYEAQFGDHYYELLWRNRVGFAKVAIEAKAPIIPCFTQNLREGFRQVGIFRTFFMRLYNKVRIPVYPIYGGFPVKFRTYLGKPIPYDENLTPQDLQIKVTLGSYTSIAWLMRCSFNFVQVATAIEDLINQHQRLPGSILLALLDRLPTFRRRVRRKEE

SEQ ID NO: 37612 - DNA, 2298 bp, DROSOPHILA
agacgtagtgaatcacaattggcagcagcaccaggcccgagattatttggaaaattaataacaaaacaaattgcatgcgattgcaatgcgacttccgatttaatgtcgataagtgctagtgctggcacaactgtctgctcactggcggtactatcgatggtgccacggcacccggcaattaccgatagcactcaatcgatacaaaccaataagcgaatgttcaaattcaagttggcggttgtattctaattgggaacttgccattcataatatgcagtatactaacaactttgtttttcctcgaacttccttgaccggctagaaacaggtgtgattagccaagagagcatcactgttctgttctgggtgccaagaaccaaagtctggcaacgactgcagccagaacagctgggccggcgttgccaggtgcaaagaacgtagatgagcaacagaaaagcaaacgaaatggaatgaaggaacaacaataaaagaatcgctactttgtagtattattaaccaaaaaaaagcgcggcgcgatcacaatgtttctgactgcgaacggtgtcggttgtctctactgcgtgtgagccgagtggagcgcagcgccgcgaattgtttacattgtgctaggaaaatcacaacaaacaaaccagcaaacagtctcgactgacaataacaataacaatagcaaataacatgcaaataaaatgcatttcaagccgcgcaaatactaaatactgattcaaatgaaacgcactatacgatgaccatttaaaagaatcgccaagcaggaggaagcgaaaagaattcgaaaagcgcaaagcgagccgaagaaagtgtacaaaatcaggccaaaccgatttgttttttttttttttttttttgttctgtcgtattttcccttcttttttctaccgtttttttttgtgtttttgttgtggtgggcggtcgcttctcttttcgcgcaagaacaacaaatgaggtggagcagcgcctgacaatggaatttctggagaacctgtacaaaacgctgcactccctgttgtgtgagtaatatcgaatatttggcgcccgataaggcgcaccgctgacctatgtacatacatacatacataacaaatgcccctccaccaactgcataccttgtgattctagcctcctacatcgatctggactattcgctatggctatatcgcttcctcacccccctgattgtcacctttctgctgccgctggtcttcgtggccctcatctacatttcgttcctggtgctattcatctacaagctgcacaggtaagcgaaatggaaatgttggaaagctgcgtataagttgggtgggaaattggaattacaacaattacagtgtgcttcgcgggctcaattgcaactgttaatgaactctctcatgctgatcgcgcacttttggagccaagtttcccccactcacccttaccacgcaccccttccccctttggccggcgtcttccgtcccgctctgcacctgtaattaaaagggaacataaaaagagatggcgttgtaaggaaggggcgtagagtgggagagagttgggcagccagtgttgccaacaaaaaaagctagataaaacaaagcacgggaatacagtggacactctataaggcaaacagaaaacgtaatatagtccaataaacttagttttcactgtttttaagggaacttatgatgcagctgtttcccaaaacgctgaaattaacattttgacaaaccgtgaatatgtgttgaatcatcgaaattatgggcattaaaaaaagtgctcagcaataattgatcgttttctgcaaattaagtaaattaatacgataagcataatctacatgtgtttctagctcgaaaaagtttttgaaactaaagcaattacttgagttcttagatttcagttgtaaaaactgctgttatcgatctaaaaaaaaggattgatatgtgtaccagatagtaatatatttgaattatattcatctagatagtatatatagttggaatatagccaagttgggctgcactgactacactgacccctgaagaacattacaccctcgaccattgcaccgatactgaaaatgaaaagccaagtcgaacggcaggtgatcgactcggccaacttttactcggcttataaatatacatatatgtatgtatatatactcaaatatatacttgaactggcctgtgttggcgtgcttctatttattctacatttccaactctctaatgcccaaccggttggccatgctaattagccgcgaagccctaatggcta

SEQ ID NO: 37613 - DNA, 189 bp, DROSOPHILA
atggaatttctggagaacctgtacaaaacgctgcactccctgttgtcctcctacatcgatctggactattcgctatggctatatcgcttcctcacccccctgattgtcacctttctgctgccgctggtcttcgtggccctcatctacatttcgttcctggtgctattcatctacaagctgcacaggtaa

SEQ ID NO: 37614 - protein, 62 aa, DROSOPHILA
MEFLENLYKTLHSLLSSYIDLDYSLWLYRFLTPLIVTFLLPLVFVALIYISFLVLFIYKLHR

SEQ ID NO: 37615 - DNA, 2247 bp, DROSOPHILA
tgggaatacatggaacaaaggtgtttcaatgcgaaataaaaaaataataataaagagtgtcagatgcgaaagggtcacgttttgtttatatcccacaactatctctcatttatgtaaaatttaactaaaattaattgagttcttaatatttttattattagtattataagttgagctcttcaatcataaaatatatgtaaatatgtgtgaagcttttgctaaagaacttgagagatcctaagtggtgactccgggaaagggaccccctggtagcctggtagccactgaaattgcagggtataataattatgtttgcttaagagctagacgacccaaaacacctgacataacgagggtcgaattgtgcgcgagcaaacaaacaaaattgcaggtgtcaaaacaggaattggccgaagtaagttgtgaacaggattgaattgaattggattgggttggatactggccaacttctccagtcatttgtgctaacaaatcccatacgaatggcggtgcttggaacggttttcctgcttttcatgctggacttgaaaacgctgaacttgacccggctgaatggactgctggtggaaccaaccagggatttgccacagctggaactttggctgcgagcgggttcagatcatcaggacgcggagaatccctatgtccagtggtttctgttacgaacggaaatcccgctgagcatcgttacctatcaggagaatcgctattggatggacgatccgtttggtcgaaggaatctagtcctggtgatgagtttggatcaacttttgactaatcgtggagcggctgcaccgattcagaaagctagtactttcttctacatcctggcagatcaagacaaggatctttccgcggatgaacaactccgcttggagggcagctgtcgacagttgtggacgcagcacaaagtctataatcgctttttcctaaccagagatggtgtttggatctatgatcccttcaagcgtcgcgattccgcctttggacgattggtgcgttattacggttcggagaccctggataaattgctcttccgcgatatggctggctatccactgcgcatccagatgtttaggtccgtctacactcgtccggaattcgataaggaaaccggtctgctgaccagagtcactggcgtggactttctggtggcccaaatgctcagggagcgattgaatttcaccatgctactgcagcagccggaaaaaaaatattttgggtaagcaatgccgatgtctttttattttttcattttttgtagaaaaattcggaatacgatttagttgatttagctataacttggctaaaaatgagcacatatccaaatgaatgactgttttgcacagcttattatccaaataaaagattcatatcaccattttgttaatttgaaaaaattaatttttttcaaattttcagattttttgtaagggggtaacatcattttttgcgaaaaattgacaaaaaattacatttttaactgtgaatgctattcgaaagggaattttatgacgagttcaacgaggtatggcactcagtatgtggataaataacttcattgctatgaacaaaataatgattatattttgttgaaaaattggtgattcattttggcaaaattatgattttttcgaagaatttaatttactataacttggctaaaaatggtcacccattcaaaaaaaatactgttttatacagctaatgatccaaataaacgatttctgcaaccattttgttaatttaaaaaaattatttttttcaaattttctgattttttataaggggtaacatcatcatttttcgcgaaaaattgaccaaaaatacatacatacatacatacatttttaactgtgaatgccattcgaacgggaattttatgacgagttcaacgaggtatggcattccatatttggaactcatactccatttctatgaacaaaaaaatcgattattttaagcgtaaaacacaaataaagccttttggcaaaagccaatatttcaaaaatatatctttctgcaccaacttattatgctgcattaatggatatcatattagtttaatttattatatgtaatcactttcttcgcaacagagaacgctctgcgaatggaagctacaatggcgccatcggttcgatcatcaaagatggcctggacatttgcctaacgggattcttcgtcaaggattatctggtgcagcagtacatggacttcactgtg

SEQ ID NO: 37616 - DNA, 711 bp, DROSOPHILA
atgctggacttgaaaacgctgaacttgacccggctgaatggactgctggtggaaccaaccagggatttgccacagctggaactttggctgcgagcgggttcagatcatcaggacgcggagaatccctatgtccagtggtttctgttacgaacggaaatcccgctgagcatcgttacctatcaggagaatcgctattggatggacgatccgtttggtcgaaggaatctagtcctggtgatgagtttggatcaacttttgactaatcgtggagcggctgcaccgattcagaaagctagtactttcttctacatcctggcagatcaagacaaggatctttccgcggatgaacaactccgcttggagggcagctgtcgacagttgtggacgcagcacaaagtctataatcgctttttcctaaccagagatggtgtttggatctatgatcccttcaagcgtcgcgattccgcctttggacgattggtgcgttattacggttcggagaccctggataaattgctcttccgcgatatggctggctatccactgcgcatccagatgtttaggtccgtctacactcgtccggaattcgataaggaaaccggtctgctgaccagagtcactggcgtggactttctggtggcccaaatgctcagggagcgattgaatttcaccatgctactgcagcagccggaaaaaaaatattttgggtaa

SEQ ID NO: 37617 - protein, 236 aa, DROSOPHILA
MLDLKTLNLTRLNGLLVEPTRDLPQLELWLRAGSDHQDAENPYVQWFLLRTEIPLSIVTYQENRYWMDDPFGRRNLVLVMSLDQLLTNRGAAAPIQKASTFFYILADQDKDLSADEQLRLEGSCRQLWTQHKVYNRFFLTRDGVWIYDPFKRRDSAFGRLVRYYGSETLDKLLFRDMAGYPLRIQMFRSVYTRPEFDKETGLLTRVTGVDFLVAQMLRERLNFTMLLQQPEKKYFG

SEQ ID NO: 37618 - DNA, 3276 bp, DROSOPHILA
gctgtcgacagttgtggacgcagcacaaagtctataatcgctttttcctaaccagagatggtgtttggatctatgatcccttcaagcgtcgcgattccgcctttggacgattggtgcgttattacggttcggagaccctggataaattgctcttccgcgatatggctggctatccactgcgcatccagatgtttaggtccgtctacactcgtccggaattcgataaggaaaccggtctgctgaccagagtcactggcgtggactttctggtggcccaaatgctcagggagcgattgaatttcaccatgctactgcagcagccggaaaaaaaatattttgggtaagcaatgccgatgtctttttattttttcattttttgtagaaaaattcggaatacgatttagttgatttagctataacttggctaaaaatgagcacatatccaaatgaatgactgttttgcacagcttattatccaaataaaagattcatatcaccattttgttaatttgaaaaaattaatttttttcaaattttcagattttttgtaagggggtaacatcattttttgcgaaaaattgacaaaaaattacatttttaactgtgaatgctattcgaaagggaattttatgacgagttcaacgaggtatggcactcagtatgtggataaataacttcattgctatgaacaaaataatgattatattttgttgaaaaattggtgattcattttggcaaaattatgattttttcgaagaatttaatttactataacttggctaaaaatggtcacccattcaaaaaaaatactgttttatacagctaatgatccaaataaacgatttctgcaaccattttgttaatttaaaaaaattatttttttcaaattttctgattttttataaggggtaacatcatcatttttcgcgaaaaattgaccaaaaatacatacatacatacatacatttttaactgtgaatgccattcgaacgggaattttatgacgagttcaacgaggtatggcattccatatttggaactcatactccatttctatgaacaaaaaaatcgattattttaagcgtaaaacacaaataaagccttttggcaaaagccaatatttcaaaaatatatctttctgcaccaacttattatgctgcattaatggatatcatattagtttaatttattatatgtaatcactttcttcgcaacagagaacgctctgcgaatggaagctacaatggcgccatcggttcgatcatcaaagatggcctggacatttgcctaacgggattcttcgtcaaggattatctggtgcagcagtacatggacttcactgtggccgtgtacgacgatgaattgtgcatatatgtgccgaaagccagtcgtataccgcaatcaatattgccaatatttgcagttggctatgatatttggctgggattcgtgctgaccgcctttgcttgtgctctaatttggctaacattgcgggtgattaatctgaagctgaggatagtgagtctgggcaatcagcatattgtgggacaggcattgggcattatggtcgatacttgggtggtttgggtgcgtcttaacttgagccacctgccagcgagctatgccgaaaggatgttcattggaacgctatgtctggtgagcgtgatatttggcgccattttcgaatccagtttggctacggtgtacatacatccattgtactataaggatataaataccatgcaggagctggatgaaagtggcttgaaggtggtctacaaatactcatcgatggcggatgatctgttctttagcgaaacatcgcctggaatcgagatctacgtgcggatgtcatcgatgaggtggccagatttaggaacaaggctggagtctccagatatacctccttaatattggaatcctcgcatttcacgctgctccgtaagatttgggtggttcccgagtgtcccaagtactataccatctcgtatgtgatgccgagggattcgccatgggaagatgctgtaaatgcgttgcttttaagattcctgaatgctggactgattgtcaaatggatacaggatgagaagtcctgggtggacattaaaatgaggtcaaatatcctggaagccgatgccgaatccgagcttgtgagggtcctaactattggggatctgcagttggccttctacgtggttatcggtggtaatttgttggcttttcttggctttctagccgagcatttcaggtggaaactgcaaaagaagggggtatagataagcattttgtttgttaagtatgaaatgcattttaaatcaatattaaaccgttttcaaagtgctaaccaaaagttctcgaaagcccaatcaaacgacaataaaatcaacaatttcacacatttcgtttgtcattttttctttcgatatttgccaaaaaaaaaaaaaaaaaaaaatggaaaattcagctaacatttcattttcgcttgcaccgcttgcaaatttcattttcgaaaggccagcggcgaaattgaggctgcaatttcagcacacatacaacatgcggcacaaaaagggccaaaacggccaacacatcgctgatataatttggccaagttaacaatgatacgctctagcggcgattgcaattctggccgagaccagtcacggttcaaatcgaattggcagcctccgaaatgcaattggcggttcaaggttgtcatttgcaatgcaaagcgacagtcgcaattggagttacgcgacttaaataccataaatctattaaaaacatttgttttaaatacaaaatatgggttattgttactttctgttccataaaacaaaacaaaacaagtaatactataaaaggcagacaaaaaatcaaaaacttgtcatgtgaactttggaacattttgtatcattcttagtttgaatgactaatttctagttttaagccaggctttgtatttaaataactaataagacaaatacatacattaaataaagaaatatatatatatatttattatggatttattataatttaatgaccctatcaaccactgtgctcatctcactcacaaacactcttgcacacgtcaatcggtcgcctgcgtaaatttgtgtttatttggcatttcggttgctgcacacgaaatgacaattaaacagccgcaatgcgagtgacaacaacaattacaacagtacaacaacacatcaacaacaacaacaacaacaacacaccaccagtgagcagtttatttaaatattcaaatccgca

SEQ ID NO: 37619 - DNA, 972 bp, DROSOPHILA
atgacgagttcaacgagagaacgctctgcgaatggaagctacaatggcgccatcggttcgatcatcaaagatggcctggacatttgcctaacgggattcttcgtcaaggattatctggtgcagcagtacatggacttcactgtggccgtgtacgacgatgaattgtgcatatatgtgccgaaagccagtcgtataccgcaatcaatattgccaatatttgcagttggctatgatatttggctgggattcgtgctgaccgcctttgcttgtgctctaatttggctaacattgcgggtgattaatctgaagctgaggatagtgagtctgggcaatcagcatattgtgggacaggcattgggcattatggtcgatacttgggtggtttgggtgcgtcttaacttgagccacctgccagcgagctatgccgaaaggatgttcattggaacgctatgtctggtgagcgtgatatttggcgccattttcgaatccagtttggctacggtgtacatacatccattgtactataaggatataaataccatgcaggagctggatgaaagtggcttgaaggtggtctacaaatactcatcgatggcggatgatctgttctttagcgaaacatcgcctggaatcgagatctacatttgggtggttcccgagtgtcccaagtactataccatctcgtatgtgatgccgagggattcgccatgggaagatgctgtaaatgcgttgcttttaagattcctgaatgctggactgattgtcaaatggatacaggatgagaagtcctgggtggacattaaaatgaggtcaaatatcctggaagccgatgccgaatccgagcttgtgagggtcctaactattggggatctgcagttggccttctacgtggttatcggtggtaatttgttggcttttcttggctttctagccgagcatttcaggtggaaactgcaaaagaagggggtatag

SEQ ID NO: 37620 - protein, 323 aa, DROSOPHILA
MTSSTRERSANGSYNGAIGSIIKDGLDICLTGFFVKDYLVQQYMDFTVAVYDDELCIYVPKASRIPQSILPIFAVGYDIWLGFVLTAFACALIWLTLRVINLKLRIVSLGNQHIVGQALGIMVDTWVVWVRLNLSHLPASYAERMFIGTLCLVSVIFGAIFESSLATVYIHPLYYKDINTMQELDESGLKVVYKYSSMADDLFFSETSPGIEIYIWVVPECPKYYTISYVMPRDSPWEDAVNALLLRFLNAGLIVKWIQDEKSWVDIKMRSNILEADAESELVRVLTIGDLQLAFYVVIGGNLLAFLGFLAEHFRWKLQKKGV

SEQ ID NO: 37621 - DNA, 3221 bp, DROSOPHILA
gagtgaacttccaaggagccaaaggagccaaaggggatccgctctcatagttgagccgtaaacaatcaatgcaatctcaacttggggagcacgagcacccggagctccatcaatttccataattaatcatgcaagacacagcagacacaaaagggttaagcgaaggatttcgttgctcttcagattaaatcaaatcaaatcgaatcgaattggaaagtaacaatgtaaaagttttgctcgacaatccgttgagggttcccaaaaaaataaaagaacttatacaaatttgattgattgtgccttcgccacaggcaaacagatttgggcttcaaattcgtgaatctacttaacaatatttaggaaatttaatatgttatgctgatggcaacacggcgcatgagtaatatgttataaatcatacgccgcgttggcagagcacattttttgcgaggaaacaaaattataacaataaaagaatttcaaaatgaaattcaatttaatctttaacaattatttttggcctacggcaatcaccttaaatctaaaattactttttcacaggtcctgaaatactcgtaaataaaatttcaaacacaatagagagaggccaagcaatttccagcttcaggcgtcgcccacaacaacaaaaaatacatacaccgcaaacgcctaatagattttcaatagaaaatccattcaaggacgctctgatgatttttcgttcgcaaaaaaaaaaaaagttcgccatgcataaatttcggccaggcgacaaaaacagccgcggaaccgcaggcgcgttttacgagcgttttttcccgcctgccaacctcaagatgcgcacaaaaacaaaaaaaaatatgtatatctgcaacgcggccaggccaacggctgtggattcatggccatgaattgacccaaactgaaaatggttagcacgttttttggcaggggttagtcatggccaacaatcgggttaaaggcggcgcggttagggtaagggttaaggggttctacgggtgaagaacagacattgccgcttacgctttgcgatgcagccccaggcaaccagcagagttttcacagctacacagaaagaaaaaaaacagaaatcaaaaagaaaaaatcaaatatgtaaagtacactctgaaaagaatataaaacagagggtgacaagtgaaagtggaagagtgcttttgaaaaactaaaactttacagtgaaaaaaaaaacgctctttagaaacagaaatcattaatgataatatttaaattttcatttgttaaaaaggttaaatttaactactttttttaaccaattgaaataatataattcaaaacaacttcttaagaaactgacaaatgtactttaatcatatcacatatctaagtttcgggtttccctctttccttacaagaaattatctagctcaaaactagaagcttaggaaaatgcatgaaatgcccaagtggatgcagttgctcctcttacaaaagctgccttaccattctgtgtggtgctgccttggaagaggttccgcagatacgtgatcagccgccggtggagcggtcgatgccgatggcgcgatgatttcctatgcgaggaggaggactcctgaccgccaccgccctgctccacatcttccacgtccagggtggagacaatcgctgcccccgagcccgctgcacccgaacccggaccactggccaccagctccttgccgcactgactggcgtccacaataatctcgatgctgcgttgcgtgctggactttttaatgcccaatgccgccgtggagcaactgctgccggagggaccaccaccgccaccgccggagttaatggtgctgatgagggcatctgtgacactggatccggtgccagcgatgctgctcaccgtctggtgatgcatctgctgctgctgctggtgctgctggaccgctcgacctgtgagcaggtgatgctgggcgctcgagggcagctcgttgacggtgccattgctgtggcttccacgatagatgagctccgtttcgttgctcacctggcgcagggcatgcagtccggtgtgcgatgcactgcttgacattccggcggaggatccaccacctgcgccgccgcctccagctcctcctcctcctccgccgccgccgctgccggaaccaccatttagacccgtgtagtaggcgctattcggtcgctggctgtgctgcacctgtggcccggccataatgtttctctcagtgtatgttatgtactgctggagcggctagagttccacctccttctgctgctcctgttcctgctcccgatcctctctagcggctggctttaattgtcgctggctggttttagtggttttagtagcatattggacagttacatggttacggcggtcactttgttaggcagattggggttaagcggtgccgcatctgcgagaagcgagtaaaatcgagcagaatatatatgttagttccgatactaaggcatttaggtctctaaaccgatcaatttctttaatttaatttcatttgggaattaattagtttcccaaaaacagtacaaacaaactgtaccaaatgctttcgaagctgggtactttatcgtgttcccatattattttctaattatcttaatttgatcggaatagagtaaataacaaagaaaactatttccaggaatttccatttattccatttgccagcagcgttgcattgttagtatgcgtgcatgcgtatgtgtgtgcgtgtgtgtgcgtatgtgaattataaagctgttgtaagcgcacttgttagcccattttaatcctatttactaaatgatacactaaactagacaattgccttctcagtaaattgcggctaactaagttgccaatgcacatcgattgagatgctaacgcacattgtaacctattaaatttatgcaaaatattacaactaaattaaacatttgttatcccaagtaagtaggcctcgcaatgaaactcgcatagataaaaccatccgtgtggttgacttttgttcagtattggggcaaaccttacaccgaacagttcggaaaactagccaaaaaaaaaaaaattcaaaatttttccgtgtgaataactccgtgtttttccacattttctacctttgccgtttaaacgttgctgcgctcaccatcaccatgaaaaccctcgagtccgacgacaaacccttcaatcccttctacattggcccacatcc

SEQ ID NO: 37622 - DNA, 804 bp, DROSOPHILA
atggccgggccacaggtgcagcacagccagcgaccgaatagcgcctactacacgggtctaaatggtggttccggcagcggcggcggcggaggaggaggaggagctggaggcggcggcgcaggtggtggatcctccgccggaatgtcaagcagtgcatcgcacaccggactgcatgccctgcgccaggtgagcaacgaaacggagctcatctatcgtggaagccacagcaatggcaccgtcaacgagctgccctcgagcgcccagcatcacctgctcacaggtcgagcggtccagcagcaccagcagcagcagcagatgcatcaccagacggtgagcagcatcgctggcaccggatccagtgtcacagatgccctcatcagcaccattaactccggcggtggcggtggtggtccctccggcagcagttgctccacggcggcattgggcattaaaaagtccagcacgcaacgcagcatcgagattattgtggacgccagtcagtgcggcaaggagctggtggccagtggtccgggttcgggtgcagcgggctcgggggcagcgattgtctccaccctggacgtggaagatgtggagcagggcggtggcggtcaggagtcctcctcctcgcataggaaatcatcgcgccatcggcatcgaccgctccaccggcggctgatcacgtatctgcggaacctcttccaaggcagcaccacacagaatgctgtgaaaactctgctggttgcctggggctgcatcgcaaagcgtaagcggcaatgtctgttcttcacccgtagaaccccttaa

SEQ ID NO: 37623 - protein, 267 aa, DROSOPHILA
MAGPQVQHSQRPNSAYYTGLNGGSGSGGGGGGGGAGGGGAGGGSSAGMSSSASHTGLHALRQVSNETELIYRGSHSNGTVNELPSSAQHHLLTGRAVQQHQQQQQMHHQTVSSIAGTGSSVTDALISTINSGGGGGGPSGSSCSTAALGIKKSSTQRSIEIIVDASQCGKELVASGPGSGAAGSGAAIVSTLDVEDVEQGGGGQESSSSHRKSSRHRHRPLHRRLITYLRNLFQGSTTQNAVKTLLVAWGCIAKRKRQCLFFTRRTP

SEQ ID NO: 37624 - DNA, 2369 bp, DROSOPHILA
agacccgtgtagtaggcgctattcggtcgctggctgtgctgcacctgtggcccggccataatgtttctctcagtgtatgttatgtactgctggagcggctagagttccacctccttctgctgctcctgttcctgctcccgatcctctctagcggctggctttaattgtcgctggctggttttagtggttttagtagcatattggacagttacatggttacggcggtcactttgttaggcagattggggttaagcggtgccgcatctgcgagaagcgagtaaaatcgagcagaatatatatgttagttccgatactaaggcatttaggtctctaaaccgatcaatttctttaatttaatttcatttgggaattaattagtttcccaaaaacagtacaaacaaactgtaccaaatgctttcgaagctgggtactttatcgtgttcccatattattttctaattatcttaatttgatcggaatagagtaaataacaaagaaaactatttccaggaatttccatttattccatttgccagcagcgttgcattgttagtatgcgtgcatgcgtatgtgtgtgcgtgtgtgtgcgtatgtgaattataaagctgttgtaagcgcacttgttagcccattttaatcctatttactaaatgatacactaaactagacaattgccttctcagtaaattgcggctaactaagttgccaatgcacatcgattgagatgctaacgcacattgtaacctattaaatttatgcaaaatattacaactaaattaaacatttgttatcccaagtaagtaggcctcgcaatgaaactcgcatagataaaaccatccgtgtggttgacttttgttcagtattggggcaaaccttacaccgaacagttcggaaaactagccaaaaaaaaaaaaattcaaaatttttccgtgtgaataactccgtgtttttccacattttctacctttgccgtttaaacgttgctgcgctcaccatcaccatgaaaaccctcgagtccgacgacaaacccttcaatcccttctacattggcccacatcccagcaaggcgtgtgccattcccgagattcccggccagcaatgctcacccaactgtcagccaactactacgaccaccaatggttctccaacggatgcaacggatcccaacagtttgcccagcggagctgcgggcggcatggtaatcgtggccaacatatatagcaccgtcgaggtcctggccgccgccgctcgtatgggcggagcagcgggcactggaggggatcagggtgcgtcgtcttccaacaacaccacatgcaagccgtatccctgcatggagggcgctcgcatcgatggtcctggctgtggttagaaccagaggaagttcacattggatcagaaagctttatctaccaactggctatttgaataggctaactcgcaacaccaagctagccccaaatacaaaaataaaaggcccagaaaaataatccattcgtattttttctatagtctgtcgaaaaatgatcagtctttttcctacagcaatgtaaatagttgtccaaatatggaatgccatacctcgttgaactcgtcataaaattgtctttcgaatggcattcacagttaaaaatgtaattttttttcaatttttcgcaaaaaatgatgatgttaccccttataaaaaatctgaaaatttgaaaaaaatcaattttttcaaattaacaaaacggttacagaaatcgtttatttggatcattagctgtataaaacagtaatttttttgaataagtgaccatttttggccaagttatagcaaactgaattcttcgaaaaaatcatcattttgccaaaatgaaacaccaatttttcaacaaaatataatcattattttgttcatagcaataaagttatttatccaaacatggaatgccatacctcgttgaactcgtcataaaattgtctttcgaatggcattcacagttaaaaatgtaattttttttcaatttttcgcaaaaaatgatgatgttaccccttataaaaaatctgaaaatttgaaaaaaatcaattttttcaaattaacaaaacggttacagaaatcgtttatttggatcattagctgtataaaacagtaatttttttgaataagtgaccatttttggccaagttatagcaaactgaattcttcgaaaaaatcatcattttgccaaaatgaaacaccaatttttcaacaaaatataatcattattttgttcatagcaataaagttatttatccaaacatggaatgccatacctcgttgaactcgtcataaaattgcctttcgaatggcattcacagttaaaaatgtaattttttgtcaatttttcgca

SEQ ID NO: 37625 - DNA, 369 bp, DROSOPHILA
atgaaaaccctcgagtccgacgacaaacccttcaatcccttctacattggcccacatcccagcaaggcgtgtgccattcccgagattcccggccagcaatgctcacccaactgtcagccaactactacgaccaccaatggttctccaacggatgcaacggatcccaacagtttgcccagcggagctgcgggcggcatggtaatcgtggccaacatatatagcaccgtcgaggtcctggccgccgccgctcgtatgggcggagcagcgggcactggaggggatcagggtgcgtcgtcttccaacaacaccacatgcaagccgtatccctgcatggagggcgctcgcatcgatggtcctggctgtggttag

SEQ ID NO: 37626 - protein, 122 aa, DROSOPHILA
MKTLESDDKPFNPFYIGPHPSKACAIPEIPGQQCSPNCQPTTTTTNGSPTDATDPNSLPSGAAGGMVIVANIYSTVEVLAAAARMGGAAGTGGDQGASSSNNTTCKPYPCMEGARIDGPGCG

SEQ ID NO: 37627 - DNA, 2412 bp, DROSOPHILA
tatgtactatgtaccccattcatttatcgcagtgtacgctgagcacacaacacttgattcccgcgtacgtaatatgtacctagatacatttatgcaaatttaatggcactcacgagtgcaagtgcattgtgatttcgtctggactgtatttgcattagttaattccgccgtgattcgattgggattgaatggaatggagtcaagtccacgattcccaccagaactcgtaagttaagatcttctaagcatagatcttctataacaaatcgcaaattaaccatctacttaaggtagatacaggatagatagttagttacagtatatatagatagatagatagatacattgtagatggatagatacagtatagatatatgatagatatatgatagatatatagttacagtatagatagatagattgatagatatagtattgatagatagatatatacagtatgaagtgatagatagatacaatacagatagactaactaattatgatagatacattacttggtatgcaaattggtaagattgtcgtattacttcttaattacatataagctataggtatagttattaacttttgctaaaaagttgactacattttgggttcctcttctattaatcctactagaatttcctgaaatggtttacccaactaataattagttacccagctcccaaatggcttaaccaatatttgttgattgaaaaactgaattacttttgcaactatcccatgagtggaatggcgaatacctgatagcatttgcttggtgcatactttcctggtctaggccaacatcctcgagtgtcagcaagtgcgataacgtggtgcgccacttcctccacttccagatgacgagagcaaggcaaacgcagccgaaatcggaatcacgagagcgttgatagccagctgataagatggatggcccgccgcctataagagatgagttccggtgacgacccaatgctattccacaacgagagcaaccatgtccggagcagcttggatgtccctagcttttgtggcctgtctgctggccgcatcggtggacggcaatgggttcagcacccagtatcgtggtcacacgcagcaccctagcctggcggagcactgcctctacgaggagttggacctggccgttccactcaatggctacgttctgccctccggtcagcagggctactgcattcgcttggagtgcaccgatgactatctgctgttgatacgccagtaagtttcgagatttgatcgcatgccctcactatatcccatttcgcccaatcccttccagctgcgacaaacagccatggccgcgacctggctgccacctctcacccaacgactatgatttcaagttccccgagtgctgtccccaactcgagtgctccgacgaatactagatacaagatactagatccaaaagcatcgatctgttcggaattactatttctatttaaactataatccattgatcttgtggcaaagttagccaaagtactagtaacaagtataatctttagttaaataaaaacatatatagtttaagaaactaatgatgttatcactggaactgcagctgtttcgccagcctccggaacgaatctgtatgtaacgagaattttccacctatttgataaacccgaggacccctgagacgcaatcgcacgggagcacagggatcttgacctttcagtctaatcgctggcgcaccccgaaacaagtggaactatatagtcgcccagccgagcgatccgttgatcagttagctacataatatgaaatcggtcacgttcgtactctgcctgctcgttctgggcgcccactcgctgctggtgttcgccggtaagtggatgcagtgcatcgtcgccacaaaccattcaatcccgcatgttcatcttgttcattcgtagtggattgcgagatcggtgggcatcagttcaagaccggagagaagtacacgccggaaggtcgctgcctgcagtacacctgccaggcacccaaacaggtgactgccttggggtgagtagcttctacatggattgatgactccttgactcacccaccttgccacttgtggccatccagatgcccggccatcgcctccttgaagccctgcaaaatggaagaggatctgagcaaaccctatcccggctgctgtcccaagttcaactgctgacaacgcctccctcgcaagtcgaactgcaaatgtgaaatgaactatgaaaactgaatatataactatagaaacatacataccttaaatgagagatgcagttggatggatggttatgaggggttcatacataattagaatcaagtttgccagttctgcgtttacaaaaaccaaaatagcgcatttatttcgatttcgatttcggtttcggtttggtatacatgctt

SEQ ID NO: 37628 - DNA, 351 bp, DROSOPHILA
atgtccggagcagcttggatgtccctagcttttgtggcctgtctgctggccgcatcggtggacggcaatgggttcagcacccagtatcgtggtcacacgcagcaccctagcctggcggagcactgcctctacgaggagttggacctggccgttccactcaatggctacgttctgccctccggtcagcagggctactgcattcgcttggagtgcaccgatgactatctgctgttgatacgccactgcgacaaacagccatggccgcgacctggctgccacctctcacccaacgactatgatttcaagttccccgagtgctgtccccaactcgagtgctccgacgaatactag

SEQ ID NO: 37629 - protein, 116 aa, DROSOPHILA
MSGAAWMSLAFVACLLAASVDGNGFSTQYRGHTQHPSLAEHCLYEELDLAVPLNGYVLPSGQQGYCIRLECTDDYLLLIRHCDKQPWPRPGCHLSPNDYDFKFPECCPQLECSDEY

SEQ ID NO: 37630 - DNA, 2342 bp, DROSOPHILA
tcacaaactaagaatactttatataattaccgcatttagaattaaactaataattaaattaataataaacaataataataaacaatcttacatatatatttttttaaaaataagaatggtggaatggtggcacttggaggcgtggggcaggtgccatagttgggccataaatactgcacacacccataaaaagccaacgccatcggcatgcaaaatgcatggcactgtgggttcgcaaagggggcgtgttccgccataaacatttgcatttgatggccttcaaaaggagcgggaagtggcaaggagttgacataaaataagataatattcgcaatcaaacggagccgagggctcgccataaatttgtagccacggatggaggcgagcagagcaaggataatgcatccgctagaggacatcgcaggacctccacttaaatgcatttcactatgcgaaattctggaacgccaaattgaggactttcttcgttttattatagaattcgaaattgattggatattgttaaaaaagaagctttacaatctttttacacatattttctcctccaatttgattactttaagcattgtgagaaaggcgatgagttcaaaggctcttccgcagaattgatacttttgtaagccatttacttatttttttttttagatttatgttcgctattattttgcctgcagtcgtttgtcaaacgacatctgtgcgaaattgcagtgaagcacaaaacataaaatcttttaatgatttgtatgccatagctaaattcagaaaggccattcctggatatttattctatcattaatatcctgcgagatgttctgtttgcaatgtttcgtataaaacccgattttaaacaagacaatatttcgcaaaccctttttaaaaataaaaaaagtatgtatgtttgagctagcagagaccacaatgcaaaatttattccaacgactttgtgaacaagaaggtcttggatgggacaactgatttactaccagaaatcgcccttaattctcccggcacagctcatatccaagccgttgtaggcgcagaaggcttctccattatcgatgcagggttcgcagggtccctgatcatctccaaatccagttcccatggcgtgcggctggccaaagaagttgggtggcactggaggacatctcatcggctggaaatcgcccatgctctgcagcatcggtcgagttcttggtccacaggatcctggtgccacgctggacgaccactggctaccaacgtttatggcatcacccatttggggaaagataggcgcattcactggctgtccgttccagaaggaaaaaccgttcgacatggctggatgttttatttcgaaaaaaatcgtggatgaattttatctcgaaatttggtaattcgaaatttgtaaacttttaaaaaatgctgccgaaaatttatttttgatgtgctcggtttggtgacttgtacgttactgaaaatttctcagcattgactttgaaggatctaaaaaagattctcatggatagcttgatgtctaaaaattgttgtaaatttcaaatacgcctactaagcaacattagttttttcgaattgagtttttcttcttttcttttcgcttcttttgctgtgaaaaatgaattgcccacttttgggggcgattttaattgacagttaaggtcgcgctttctgttgattcctagcatttggctgccgctccttggacaggacatggccgccttcgcacttcggattagatggcatggaatccacgaccttttttccgcctccatcaatcgctggcgcccactgagaatgttaattagcagctgaccgagcatttggttatgccaccccaaaggcccccacgccacccacttcgatggcagtcaattagccgacatcaatggacacgcccccttctggacaggagaccgcccacttgacgcccaggatcattcgccgcccgctgttgcgtgcatttaatgcgcattaattgcgcataattaaattttctacaattttattatgcactttacatggcaaatgctcaacattaaaaccagattaaagtggcagaaataatggcatactgatagttttaatcctattttctgattgtctcttttattcggcagcgtcttcgtaatgctgcgaaatctgttctttaatgaataattagtagacataaaaagttccacgaaaaggacatttgccttttctcttatttcgcggccataattttctctcgttctttttgcatctgtcatttaagtgaaatcgtgtcagttgcgctgtcattgttgtcaatattattataattattatttttatcatca

SEQ ID NO: 37631 - DNA, 342 bp, DROSOPHILA
atgtcgaacggtttttccttctggaacggacagccagtgaatgcgcctatctttccccaaatgggtgatgccataaacgttggtagccagtggtcgtccagcgtggcaccaggatcctgtggaccaagaactcgaccgatgctgcagagcatgggcgatttccagccgatgagatgtcctccagtgccacccaacttctttggccagccgcacgccatgggaactggatttggagatgatcagggaccctgcgaaccctgcatcgataatggagaagccttctgcgcctacaacggcttggatatgagctgtgccgggagaattaagggcgatttctggtag

SEQ ID NO: 37632 - protein, 113 aa, DROSOPHILA
MSNGFSFWNGQPVNAPIFPQMGDAINVGSQWSSSVAPGSCGPRTRPMLQSMGDFQPMRCPPVPPNFFGQPHAMGTGFGDDQGPCEPCIDNGEAFCAYNGLDMSCAGRIKGDFW

SEQ ID NO: 37633 - DNA, 2543 bp, DROSOPHILA
aggaggcccaggcgaccgcactgcccgacgaggacgaggagctataagcctatttgtagttaacttagagcgaaatccgacttgcgcgaaaacacaaacacacacacactcaaacacaaaaccacaacacacaacaccacaccgaacatagaacactgaatcacaggcaccgtatgaaaaggcgtggcaagagggaatgaaggattacggattagaggaagtagcattagcagtagtgtactatccgtacactattggatttgccagcctatgttcttcgatcgatcgttgggaaaatctacaaacaagcccttcttaatacgtcgattgtatttaaattttagatccccaattcattaataagtcggttataattgattttttttttgtttgtttccttatacgttggctcttggaaaaaaaggagtaagtaagtagtattgtcattaaagtgctaaagcagcaggcaacagcaacttaatcgaaaaccaagagaaataaatagtcgcagaacgtatttttttaaaacttgcaacaccaatgttcttttccacccaaaaaaaaaaaggaagaaaaaaccaagttacttcaacaaaagtgtgaatgttagaaacgagcgagacggcatgctcggagcgagcgagagcgcaatagctggccaatgaactgagtccccccaaaggaaaattaatactattgaaaaaagaaaagaaaggaaaacactggaaactatgagaaaataacctatagacaggccgccgaattcgcatccacatgttattaatctaagaactaaagaaataaaaaataaacgtcgaagaaaaaaaaactaaacgaacggagctggatttgcatttgaaagatgataaggaaatgatgctagattatagttatcgcataccctgtaattgaatgggtagcacatatattccgttagctaatcgtctactgtttacatttctacatttgaatacactgttcttaatgaaactcctcggatttagggacacttgaggcagcaggcagggaaaactccggtgaagcgatccttgttgccgcaggtgaccttctgctgtccacagctgaaaaaaagatattgtagatggcttggttagaatcatgtggagatcggggcaaagttcagctaggaaatattttgttttcttcatgcaacctaagttgctaattaagatcgctgtcatgatgcacttactcctccacgatggtcttgaaggtgtccgtgcagatggcccgcttgaggcacttgccatccttgccgaagtccacgtagtcctgtccgcgtctcagcagcggcagatacttgagaaagatggtctcatcctccgagttgcggtaggagcacacgggttcgctggctacgtacaagatacatatgattacatatgacatatggaacagtagtaggagatcccatggccagcttacccgcatcgacggtaggcagcagtgcctgcggaagcaggagcgccagcagcagcaggacggccgccagcagccaaatggatccgcaacggttgtgcatctttggagcgcggtgacgagactgaaccgagagctggcccagcccgttgcctatttataggttgcccaaaagagccacttggagcgcggctcgtttgcgaatcagccagtcagtagtcagtggtgatttgcattttcagctgcttgattgagtgggattccgcgagcacttgctaattgcttaattgccagggaggcggactgatcagatgcgtagtttccacagagagtgtgctcttccagatcgtacaaaggtgtccaaatggatcatcgtctcaaagggaacaaaattaaattaaaaattaatcattgccgtttactaacattccgttttgaattttgagcacaaatcccaaaaatatccgcataaaatgcaagaacatacaaaagtttagtttaaagcaagatcattaaatttattataaattatttctattttatatttattatattgactttacttttccacagtgtttttgtgcgtttctaggctgattttaaagcaacaaattttgtggagaacctacttgaattacaatgaacttatcatttggctgaaaatatatacaatgaatttcattctttgggtttttgttagaatagatacatatatatttccggcaagaatatcaaaaacatagaacaataaacctatcaacataaatacgcaatgaacttacaagtaatatttaacaaacattgtgccaaaataaaaatgtacaatactaggaagtatgtttttctataataatacttagcagccaggagtctaagctagatgtagttgctctcggactcctggcacaccagcttgggacagcattccggaaaggtgcgtcgcatatccgaggcgatcctgcacttctccgtgggcaccaaattatggcgaccgcaactgaagtaaacgtaagtaaatatgcattaaaaatatatattcataataagtgtttttaacttactagctaatttcgaggacatagtctggtctgcagtagatggac

SEQ ID NO: 37634 - DNA, 342 bp, DROSOPHILA
atgcacaaccgttgcggatccatttggctgctggcggccgtcctgctgctgctggcgctcctgcttccgcaggcactgctgcctaccgtcgatgcggccagcgaacccgtgtgctcctaccgcaactcggaggatgagaccatctttctcaagtatctgccgctgctgagacgcggacaggactacgtggacttcggcaaggatggcaagtgcctcaagcgggccatctgcacggacaccttcaagaccatcgtggaggactgtggacagcagaaggtcacctgcggcaacaaggatcgcttcaccggagttttccctgcctgctgcctcaagtgtccctaa

SEQ ID NO: 37635 - protein, 113 aa, DROSOPHILA
MHNRCGSIWLLAAVLLLLALLLPQALLPTVDAASEPVCSYRNSEDETIFLKYLPLLRRGQDYVDFGKDGKCLKRAICTDTFKTIVEDCGQQKVTCGNKDRFTGVFPACCLKCP

SEQ ID NO: 37636 - DNA, 2700 bp, DROSOPHILA
gatacttgagaaagatggtctcatcctccgagttgcggtaggagcacacgggttcgctggctacgtacaagatacatatgattacatatgacatatggaacagtagtaggagatcccatggccagcttacccgcatcgacggtaggcagcagtgcctgcggaagcaggagcgccagcagcagcaggacggccgccagcagccaaatggatccgcaacggttgtgcatctttggagcgcggtgacgagactgaaccgagagctggcccagcccgttgcctatttataggttgcccaaaagagccacttggagcgcggctcgtttgcgaatcagccagtcagtagtcagtggtgatttgcattttcagctgcttgattgagtgggattccgcgagcacttgctaattgcttaattgccagggaggcggactgatcagatgcgtagtttccacagagagtgtgctcttccagatcgtacaaaggtgtccaaatggatcatcgtctcaaagggaacaaaattaaattaaaaattaatcattgccgtttactaacattccgttttgaattttgagcacaaatcccaaaaatatccgcataaaatgcaagaacatacaaaagtttagtttaaagcaagatcattaaatttattataaattatttctattttatatttattatattgactttacttttccacagtgtttttgtgcgtttctaggctgattttaaagcaacaaattttgtggagaacctacttgaattacaatgaacttatcatttggctgaaaatatatacaatgaatttcattctttgggtttttgttagaatagatacatatatatttccggcaagaatatcaaaaacatagaacaataaacctatcaacataaatacgcaatgaacttacaagtaatatttaacaaacattgtgccaaaataaaaatgtacaatactaggaagtatgtttttctataataatacttagcagccaggagtctaagctagatgtagttgctctcggactcctggcacaccagcttgggacagcattccggaaaggtgcgtcgcatatccgaggcgatcctgcacttctccgtgggcaccaaattatggcgaccgcaactgaagtaaacgtaagtaaatatgcattaaaaatatatattcataataagtgtttttaacttactagctaatttcgaggacatagtctggtctgcagtagatggactggcagtagccctcgcgattgatgggcttgtaggactgtttcttgggtatggcctggttgagctcctcgtagtagcactggccaggatagtctggaaacataaagcacataaacgatcattatctggttggaactatagtactatatccctttgattgatatgatattactacagtatctaagagacattatagatactatagtatctggtagtcattatagatactatagcatctgtatatctggaatctataatatattcctttgattcatatgaatttgttcatatgatatcattttctagtatctagttttcactacagtatctaactactatctagatagtatagtatgaatacagtatccatttcttaatgacctggatgcactgcatttccgcggtaggtaagatccgcccgagcggctccacagatgcccaggagcaccaggagacaggcgactccggctcgcatagtcgccgaatgagcggaggagctggaggaggaggaggaggtgatggtggtttttttctttcggggggataagctaagaggcaacaccacgattgctcgaaatccaaatccgacttggctgttgagcgctgcccgtgcgactgagtcaattacaattaattgttgttgcttttatataaaattaataatgaaccatgtgccgtactaccacgagtatgtggcacacatgtgtgtgtgtgcacaaccagatagcgatagcatctgtggcttttgtttgccgaccgacttaaggcgttcgctttgcgccgcccgccagctctagtttaaattaagaatttaaattaattaagccagccctgaaagcgagagtgagttctggcggggatcggccagcagcggaggagtgaagttggcaggcggaatccccgacagccaagtgacacggttcgagaaactgtggcaaggttgagcggtaatcacggcacgcaaataactcttttgtgccaccgaattttgggccagctacacttggagaaagcggactgtcaattatattctatagaataaaacaaagtagttatatacttaaaatgcctgcttaatcctcaatcctatgtcaaatcttcaattcagatgtatagagatatgtatgtactatgtaccccattcatttatcgcagtgtacgctgagcacacaacacttgattcccgcgtacgtaatatgtacctagatacatttatgcaaatttaatggcactcacgagtgcaagtgcattgtgatttcgtctggactgtatttgcattagttaattccgccgtgattcgattgggattgaatggaatggagtcaagtccacgattcccaccagaactcgtaagttaagatcttctaagcatagatcttctataacaaatcgcaaattaaccatctacttaaggtagatacaggatagatagttagttacagtatatatagatagatagatagatacattgtaga

SEQ ID NO: 37637 - DNA, 348 bp, DROSOPHILA
atgcgagccggagtcgcctgtctcctggtgctcctgggcatctgtggagccgctcgggcggatcttacctaccgcggaaatgcagtgcatccagactatcctggccagtgctactacgaggagctcaaccaggccatacccaagaaacagtcctacaagcccatcaatcgcgagggctactgccagtccatctactgcagaccagactatgtcctcgaaattagctattgcggtcgccataatttggtgcccacggagaagtgcaggatcgcctcggatatgcgacgcacctttccggaatgctgtcccaagctggtgtgccaggagtccgagagcaactacatctag

SEQ ID NO: 37638 - protein, 115 aa, DROSOPHILA
MRAGVACLLVLLGICGAARADLTYRGNAVHPDYPGQCYYEELNQAIPKKQSYKPINREGYCQSIYCRPDYVLEISYCGRHNLVPTEKCRIASDMRRTFPECCPKLVCQESESNYI

SEQ ID NO: 37639 - DNA, 3374 bp, DROSOPHILA
gcgcatcgacatcatacgcgatgccctcgaatcgaagcgcaacggccgcccgtacacgataatcttctgcggtgtcaatggtgtcggcaagtccaccaatttggccaagatctgcttttggctgatcgagaacgatttcaacgttctgatcgccgcctgcgatacgttccgagccggtgccgtcgagcagttgcgcacacacacacgccatctgaacgcactgcatccggcggccaagcacgatggacgcaacatggtgcagttgtacgagaagggttacggcaaggatgccgccggcattgccatggaggccatcaagtttgcccacgatacgcgagtggatgtggtgcttgtggacaccgccggacgcatgcaggataacgagccgctgatgcgttccctgtccaagctaatcaaagtgaacaatccggatctggtgctattcgtgggcgaggcactggtgggcaacgaagccgtcgaccagctggtcaagttcaatcagtcgctggccgactactcatccaacgagaacccgcacatcatcgacggcatagtgttgaccaagttcgataccatcgatgacaaggtgggcgccgccatctccatgacctacataaccggccagccaattgtgttcgtgggcacgggtcagacgtatgccgacctaaaggccatcaatgtgaacgccgtggtcaattccctgatgaagtaagccagccgtcgatccggctatccttccaatgctccttgtttgcatccactcttttcaccgaatcaaatatatggcttttgtctagtttgttgttgcgtaaatggaatgctttgcccactgttggctgttggttcgtttaggattaaggatcgcttggcacttcgattacaagttgttttgtttttttttatttttttattaatgtttataactttatgcgtacaaagaagagtttagtgtgttgggggaaaaaatggggcgggagtagtgtgtatgaattaatataatctatttgtagaactcgtgctcctgctcgtccttcttgatattgttcttgtagcccttctcgaagtccttggccaaaacgatgtagcgattctcacgcaccgcgtgcatgcccgcctcttggcaaatggcgttgatatcggcaccggagatcttgtccggccgcgccacaaactcctccaaatcgacatcctcgcttaggttcatcttcgaggtgatggtggagaagacgagtcgcttctgccggcgatcgggcagcgggaactcaatcttacgatccaatcgaccaggtcgcagcaatgccggatcgagtgtgtccgccctgttggtagccatgatcaccttaacgttcgtggtctgatcgaacccgtccatctggttgagcagctcgagcagaatgcgctgcacctcgcgatcggcgccagtctgcgcatcgaaacgcttcgtggcaatcgcatcgatctcgtcaatgaagatgatggccggcgcgttctccttggccagcctgaaaacgtcgcgcaccatgcgcggtccctcgccgaggtacttctgcacgaactccgagccgacgacgcgtatgaacgacgccgtcgtatgatgggccaccgccttggccaacatggtcttgccgcaaccgggcggaccgtacataagcacgccgcgcggcggatcgatgccaatctgcttgtacagctcgaagtgggtcagcggcagttcgactgcctcgcggatctcctgcttctgcatgtccatgccaccaatgtccgcatagctaacgtcgggcttctcatccggctgcagcatcgaaatggagctatccgcctctggtggcagcacgtccaccagcgcgttgctgtgcttgtgcagggccaccgaggcggagggcttcagcagctcgcgatcgatggtggacaggatgcgcacatagtaattggagccggtggtggagcccacaatgcccgtgttctgatcgacggcctccaggaactggccaatcaccagcggcaccgactggatgcgcttcacctcctcctgggcgtgcagatactcctttttcaggtttcgctgctcgtccttgatgtactcctcctgcacttcaatgaactccagtgtcttttgcagtttctacaacacaatggccgcttagatgggtgatcaaatggaagaccagtggacgactcaccttgtaacgcacgtagagatcctccatgtccagttcgtccagggaactgtgcgcatcttttagcttcaagtcggagagctcgtcctggtggaaaaagtggaattgggaaagaggtaattagtacgcatgccaggcggcgcagagaggcaactacgcaccttttccggtatcagtacgtccatgttgtacggcattcttttcgttcagcaatgagtctcgttttattagtttgcgttttctgcgaggcgaccaaaatgactcgtcaaaaacaagccagcagtgcgttgtggtggcaaccctgtccgcaatcgattgtgatctatcgatggggccatttatctatcaaattgtgctgctctttcaatcggttttttttttcgatatatactctttctgataagaaagcaactcctctttattggacaatatcctataccagttagtctgtaaagctaaaatgttgtatacaaataaatctaatatcacatgtcatgtttctcacttaatatccggaaagtattttttaatacgtttcaaagcatctggtgatgggaaaaaatcagctgtctgataattgcccgatatataccagctctgattggaacaaaagctgataacagatttattactaacaaaaactatttcgaatgcagatcgcttataagtaattgataaaatcgcaagttattctaagcaattcacgtagaaccatgccaaagtatcgctgctcgagacgcaactatcgatagttcgagtacctttctcgccagcgggtacaagtgtgtacacactggcaaaacccgaccattttgacgcgatttcgatttcccataagaaaaaaaaagagtagaaaaacacacacatttaacatttcggtcgctcctgctgcttctgtgtgtgctatgtgtgcgtgtgcgaacgaaccaaatatatacacacacgagcgctggtaggacagtgaaatcgaatttgctgtttatatagcacaattcgatggctgataatgccgccgccgtcgccgaaaaatcgtttccccaatatcgctagcatcagaacgggaaagagaacgggtacgagtacgattccgattccgattccgagtacgtttcccacaaagtatcgttgtcgttgtcgtcgttgtcctgctgccgtgccccgccccctctggccgcgccgccgccccctctgcgccgt

SEQ ID NO: 37640 - DNA, 1242 bp, DROSOPHILA
atgccgtacaacatggacgtactgataccggaaaaggacgagctctccgacttgaagctaaaagatgcgcacagttccctggacgaactggacatggaggatctctacgtgcgttacaagaaactgcaaaagacactggagttcattgaagtgcaggaggagtacatcaaggacgagcagcgaaacctgaaaaaggagtatctgcacgcccaggaggaggtgaagcgcatccagtcggtgccgctggtgattggccagttcctggaggccgtcgatcagaacacgggcattgtgggctccaccaccggctccaattactatgtgcgcatcctgtccaccatcgatcgcgagctgctgaagccctccgcctcggtggccctgcacaagcacagcaacgcgctggtggacgtgctgccaccagaggcggatagctccatttcgatgctgcagccggatgagaagcccgacgttagctatgcggacattggtggcatggacatgcagaagcaggagatccgcgaggcagtcgaactgccgctgacccacttcgagctgtacaagcagattggcatcgatccgccgcgcggcgtgcttatgtacggtccgcccggttgcggcaagaccatgttggccaaggcggtggcccatcatacgacggcgtcgttcatacgcgtcgtcggctcggagttcgtgcagaagtacctcggcgagggaccgcgcatggtgcgcgacgttttcaggctggccaaggagaacgcgccggccatcatcttcattgacgagatcgatgcgattgccacgaagcgtttcgatgcgcagactggcgccgatcgcgaggtgcagcgcattctgctcgagctgctcaaccagatggacgggttcgatcagaccacgaacgttaaggtgatcatggctaccaacagggcggacacactcgatccggcattgctgcgacctggtcgattggatcgtaagattgagttcccgctgcccgatcgccggcagaagcgactcgtcttctccaccatcacctcgaagatgaacctaagcgaggatgtcgatttggaggagtttgtggcgcggccggacaagatctccggtgccgatatcaacgccatttgccaagaggcgggcatgcacgcggtgcgtgagaatcgctacatcgttttggccaaggacttcgagaagggctacaagaacaatatcaagaaggacgagcaggagcacgagttctacaaatag

SEQ ID NO: 37641 - protein, 413 aa, DROSOPHILA
MPYNMDVLIPEKDELSDLKLKDAHSSLDELDMEDLYVRYKKLQKTLEFIEVQEEYIKDEQRNLKKEYLHAQEEVKRIQSVPLVIGQFLEAVDQNTGIVGSTTGSNYYVRILSTIDRELLKPSASVALHKHSNALVDVLPPEADSSISMLQPDEKPDVSYADIGGMDMQKQEIREAVELPLTHFELYKQIGIDPPRGVLMYGPPGCGKTMLAKAVAHHTTASFIRVVGSEFVQKYLGEGPRMVRDVFRLAKENAPAIIFIDEIDAIATKRFDAQTGADREVQRILLELLNQMDGFDQTTNVKVIMATNRADTLDPALLRPGRLDRKIEFPLPDRRQKRLVFSTITSKMNLSEDVDLEEFVARPDKISGADINAICQEAGMHAVRENRYIVLAKDFEKGYKNNIKKDEQEHEFYK

SEQ ID NO: 37642 - DNA, 4474 bp, DROSOPHILA
gggttgctgatggttggtggttagtgggtggcggtggtgccaccatacgccagtgcaaagttgtaagaaaatgcaatgaaacgaaatgaatgtcgctgaatgaacgaatgaatgcatgcataactaacacgacaccaaatgaacggaaaaagaaggtcgtcggggagtggtaggtggtttttttgggtgaggggatgggtggagtgttacgagcggcaagttacatgttcccatatcaccacataacacatatatctgatatccctgggtcgtgtctgcctgctgtttctgactgccgccaaaaatgggaactccgagttgaacagttgaatgaaacgaactggctgaatgaagtgtttgacaacactttaacttgattaaaaatttaatagccagcagggcaaacattgtgcgaatggatggataaggggttagttaaggggcagggactcgtctcaattggattgcacaagttgccacaacatttgtctgctcttgtgtgcgggttaagctaacgaatgcatttcattaagatttgccaccgaactagttctttaaatgcgcaaattaagtctggccaatacatttgtcgactttgtccttccctaattgaatggtggcgaaaatcagattaattaaaatagattttatgcttcaaagttttaaatgtgcatattctattttggttcacggactagaatgatttctattcagacttgactaaatcgaaaatgttactaagtcaagataacattactaatagcttggctaaaaatggtgatatatgatatttatatgatactttcgatcagttcaatttgcgataacttcaccaaaaatggccacacattcaaaggaatgactgttttatacagctaatgatccaaataaacgattcctataaccattttgttaatttgaaaaaaatcattttttttttcaatttttatatcataattttttgagaaaaacggacaaaattttacatttttaactgtgaatgccaattgatagacaattctatgacgagttcagcgaggtatggcattccgtatttggattaaaagcttcatagctatgaacaaaaaatgattaatttttgttgaaaaattgggaactcatttttgcaaaattatgattttttcgaagaacttaataccctataactaggccaaaaatggtcacacatttaagggaattactgttttatatagctaatgattcaaataatccattccaataaccattttgatattttgaaaaaaaaatttttttttcaaaattttctgtttttttaaggggttacatcatcattttttgcgaaaaatggtcaaaaaattacatttttttctataaatgccagtcaataggaaattttttgacgatttcaacggggtatgacattccgtatttagacaagtatttccattcgtattgaaaaaaactaagccaaatttccccgaaaaactactttagaccgaacagtttgggaaaaagctgaagttgcagtgtatttcgccatccctagattagcgatttgtgattccctagccatcagcgcgtcggcactccatctctatccctatctcaatttctatctccaagtgcggcgctcgatttcgccgctctctgtcccgcttttgccattaattgtgcaaacattctagaacaatttaagccagtaaagtgctgtaataaaaggccggcaccgccccaaaagccgatttgataaaccgcctgaccccgccacgctcgccagcgaatggaatcaagagatgagttgccgcgcggagtggcgtcttcaattaaatagtaatacacaataatcaacagacccgaaaacaagaaaagcaaacaaacgcctctggttcgaccaagggataccctatgattttagattgtacctaattccgaaatttgataatattgaacttgcgtccctgaagtaactttccttacttggcagttcttaatcttaattgattgagcactcccccattcattattgagcatattgaatcgaaacaattgatgaatttcagtttaaacggaacggcgacgactcagtccggcaatctctataagtatgccctgtgtagacaacgccgatcggagtccgggaccaattcagtccagtttcgaacaccaaggcggtcgcaatgcatccggaacgctacgccagtccaaatccattgataccattggtaatcgcaggcgccctgctcttctcgatgctctcgcaggtgagcggctactcgggacgaattccaccggatgcaggtgagcggatatgtgtttcccatatatatatttcaatatatttctatatatttatatatatgttctgttcatattatgatcagataatcccgggaagtgcatgtaccgcggtgacgtcctggaactgggtgtcaacaatggcatcgctccctgccagcgactgacttgcaacaaggatggatcaatacttatcgaggggtgagttccagagtaccttgacccggtcacgggaccatctaacatatagactggaaaaaatcatgagtataaatattgtgggaaaattgtttgcaagctgctagaagatcttttaagcaatgtcaaagtggtacccaaacttgagctttaactccatcttaagcttaccatataattaaacaaattttaacaaaataacaagctttttttgcgagtgtactttatggcacatcccagccgctgataagtcgcacacccaactacgaagatgacgctatgtcaaccacttgcgactgcgacttctcaccgagtttctagttagtttcagtttgagtttcgagttcgccaagtggcgcaaaagatgaggctgtaatttctaggtcaagctaaagagttgaaagctaaattaatgctgttggcgaggggtgacttcacatcctttggttgaagggggctgctaggatagtagacaaaaaactaaattgagggaaactaaaagttttgccccagatttgaaatggctttagctcttgaggtgttaagtgtttttttttttcattttttggtaacacttcttagcaatgacaaagttaacaagacgttgagtttctttaagcaagcctttagcaatctttgaaattcaaagacctcattccttagaatgtggcccatttgcctgaatcataatcagttggcgggatttattctaatctcaaggtttagtcttataaaattccacagcgaaatagtttacctttttcaatgaaaatcttgtattatgaaattgtaaattctatttgtaatatatatatacatatattttattaatttaaaattttttacagttgcggcaaactgcgcatcgaaaactgcaaccgaggcgagcgaatctctccgggtgaaccctttccggaatgctgcaagctgagatacaagtgcaagcaaatcggagcggcaccctactacatcgagcggaatacggcggagaaggtctagtgggattagctgggattatgcaggattagccaccgggagaagaggaccaccgaagccaaggatgcaatgaatctttcttagttgcaacgtacatataatcaacaatttgctaatttatttgtcatcttgtacttctcaataagcaccatgttttgttttttttttttttttaatcgatgtgttttcgtgggtggctttcgtgtttcttgagatgcagccaagttgtgggcaacacaaaaaccacttggcgccgttagtgaaactgttttcgccgggccaaaagaaattgtttaattactgggccaacccgctcataaacagcaattaaggcgaagcccgccccctcgagtgttcctcaagtggcagcaatacccgtagcagcaccagtacactcgaaaaaatcgcatacgcttaatataataataatagaatattttattaaccaactgaaataggtataggttggagatattaaatatatatttctgatttatttaactagcaaaattgtgtataattcatagagctcactcaatcactttaaatgcttgctctctgattctcttggcagcatttctctcagtgcagcaactgttgcagccgagaagcagcagtaaagcgcagttgcagttgtaaaaataaagcgccaccttttgtcgcgaaacgttaattagtgcgaaataatgaacgagcaaatggcggcgcaagcatgtgtgtgtgtgtgtaagtgtgaggtgctctgtatgtgtgtgtgcgccaggtaagatgcaagggtgtgtgtgtgtgtgtgtgtgctgcacgtgtccgtgtgccgagtgtcctgacagctacacatacacatacaactagcctagaaagcaatcaaggtgagcaaattactcaattagttcgaaagcttctaatgaccttcttccaggacaattctttagattggggagagagtgaaagagagggatgcacaccttatgtcctatttcctataatggtgtaattgaaatgt

SEQ ID NO: 37643 - DNA, 486 bp, DROSOPHILA
atgccaattgatagacaattctatgacgagttcagcgagacaacgccgatcggagtccgggaccaattcagtccagtttcgaacaccaaggcggtcgcaatgcatccggaacgctacgccagtccaaatccattgataccattggtaatcgcaggcgccctgctcttctcgatgctctcgcaggtgagcggctactcgggacgaattccaccggatgcagataatcccgggaagtgcatgtaccgcggtgacgtcctggaactgggtgtcaacaatggcatcgctccctgccagcgactgacttgcaacaaggatggatcaatacttatcgagggttgcggcaaactgcgcatcgaaaactgcaaccgaggcgagcgaatctctccgggtgaaccctttccggaatgctgcaagctgagatacaagtgcaagcaaatcggagcggcaccctactacatcgagcggaatacggcggagaaggtctag

SEQ ID NO: 37644 - protein, 161 aa, DROSOPHILA
MPIDRQFYDEFSETTPIGVRDQFSPVSNTKAVAMHPERYASPNPLIPLVIAGALLFSMLSQVSGYSGRIPPDADNPGKCMYRGDVLELGVNNGIAPCQRLTCNKDGSILIEGCGKLRIENCNRGERISPGEPFPECCKLRYKCKQIGAAPYYIERNTAEKV

SEQ ID NO: 37645 - DNA, 2385 bp, DROSOPHILA
catatctttcggattatacggagattgctattattcaatgatagactcattgtcttattcctcggatagaaagattcaagtaattgctgctttaacatgcattgaacagaatgcagtttcaatcgtttatgtgtaatttctgcaagtgtaggatttgcgactggaagtggaactggattggacttgaacgccccacttgggtgctgacacagctgttaatataaattctcgctgtctgttgcgattcgctttggcaacgatttatgaaaattgaagtctttgttttattatcccggacacggcaatggcaaccaaatggaggcggagatggattcggattccgattcgcagttggagctgaagtcggagtaggaatttgaatcggaagtggagttggaggcacgtcctcctttgttgccatttgctcaatattttatgcaaagcagcagggcagcacccacaacgcccctcacttttggcggcattgatttacaggcataaggtagctggctatagtattacaggtcaccctccctacgaataaccgacctactttcccacgattttagagtcaagtcgagtcgatacgagttgagttcatatttgtgtgttgtcgatttttgtatgtaatgtctttcgtgttgtttgtttttttttttttttgccgtttgtttgccttttgttggctttgatttggcccccagaaatttcgctccattcgaattgctgcccataattcaattttagttttaatttccgctcttgggcgtaaattgcatttgcatactaatgcatcactgggtgggtatttgagttttggctatctgaatacatgtgtgtgtgtgtgtgtgtgtgtgtgcgttagtgtatgtgtgtattacacactagtgtatgtgtgtattacacattgtgtaacacagcacaaactcaaattcaacaaatcaaatacgcagggttaaatccgcacatagaccgcatttcgatccgattcggtgagacgatgtcgttgctgctgctccttttggccgtcatcctgccgcagcggcagcttctgcccttcgtatccggagggtcctgccgggaggcgcagctctgctgcaacggccgcgactcgtcctgcgtcgtccagaaggctcccatcaatgccatcatcgaggatctcagcgacaagccctgctactgtgaccacgcctgcctcaagctcggcgattgctgcgacgacttcaaggatcactgtggaggtaagtggtattatatgttgaatatattgataggattcggttgagaacaacaaagtacagaacaactaagttttggacaaaaactgtagaactcaaatccatcaaataattcccacagctcgtgcaaaacgaaaagagttatagtatagaaactatatagaaattctatgaattcagaggcaacaataatgcatcctggaggttccacaacaacaaaacaactatttggtaaatccgtgtggctaatacttagtaacgaatttgatttgatgatttatttcccattatgtgcaaagtttttattgattggacaatgtttatctcgcccactctttgcatttcggcccattttcccgaattgaagttgcaattgaaggggctgaaaaccaattttgcaaattgcaaaaccaataaactcgctcgtagatctcaaattggattgaacagcgtaattatgatggtaatgatgggcaagaattgaaatatgcagctgttctttcctttttttttttagattcattcattataaaagcgtagacttaagtgatgggcaaactaaatatacaatgtgatggggtcagattgtagtcaaaatccccgaccgactgcggtgtttgggatgcatatgtagtgggcatagtgggcatgtcctggccgacagacatacgcaccatctaggactactgtggtcgtaaaaaggccaacttaatggccatatcccgggctaagagtctgcattcatggctcgttgggtccacatggcctccctgcctgcctgctcctctgcccgtgtatacagacacaatttgttcttttgccctgcttttggtttctttattttgttttttttttgtttctgttggtcttttctttttggaaagtacaatagctaaagggctttaattttattacatacggcaaataaagtcaacgaacatgcggcggcctttcccaaattaaataagacgcagacacgagagagataggcactcggtctgaagttggaatttttcgtgccagctgcggctacaagttgaaagatgccaaaaaaaaaaaaaaaaaaaacaaaaccaaaaaaagaacacaaaactcctagccaaacaaaaaatgaaagtcccgagcaaaagtgcgaggacaactctgg

SEQ ID NO: 37646 - DNA, 267 bp, DROSOPHILA
atgtcgttgctgctgctccttttggccgtcatcctgccgcagcggcagcttctgcccttcgtatccggagggtcctgccgggaggcgcagctctgctgcaacggccgcgactcgtcctgcgtcgtccagaaggctcccatcaatgccatcatcgaggatctcagcgacaagccctgctactgtgaccacgcctgcctcaagctcggcgattgctgcgacgacttcaaggatcactgtggagctcgtgcaaaacgaaaagagttatag

SEQ ID NO: 37647 - protein, 88 aa, DROSOPHILA
MSLLLLLLAVILPQRQLLPFVSGGSCREAQLCCNGRDSSCVVQKAPINAIIEDLSDKPCYCDHACLKLGDCCDDFKDHCGARAKRKEL

SEQ ID NO: 37648 - DNA, 2658 bp, DROSOPHILA
cggcattggggggggggagtcttgttttctgcggtctgagtgcgacgtcaatttccatttccgctgcatcctggctaatctgccttcatcattggagcagcagcagcagcagcagcagcagccagcgtatattagctatatatggctatatccacgagtttcccctcttttttatttttgccctggggttaagtggcctggctttccggtgggtgggaaagtggtaggtaaaatcaaaaatgccccaaaatgtcgggcacttttgaaatttcctacgcaatttccgttgtcaacaccttgacagctgtcagacgcacacacagacactctcgacactcttgcacacttacacacgcacacccgcacaccacacactcaaaggcacttgtcagttcgatttttcgcctgccatgtttgtttttgctcttttttgcctaacggaaacggaaattgttaggcttaatagacaattcgcatttcctcttcctttgaagtcctgtattcagcagcccgcttcagtccgcacaattgcacaaatcagtgctcctgctgctgtttctgtctactttgcgtccgttgatggaatctgaatctgaattacaataattgtaatatttaacatctcaatggccagccagatcctttgctcctctaatgaggcgtcaccgaaggacatgcataatcaatgaaggaccaaacggacgaatgaatcgctcaatgagcgactgaatgagtgaatacccaaataagcgagcgtttcgaaggcgtaggatgcagattatgaggatggattaattaattaagcattatttagccagtgaaaccgatttcatctttaaatctatttgaatgttttgcaaattattaagatattcgcatctcttctttgtataattattaataatttgcgctattcttaaactttctttatagatactgcgtggaattcgaggtaataaaatcatctaaagcctgcaacaagttgccgccatataacctgatgacagaaggtaagaaaaatcaaagtaactaaagtagtatttaatatttatgcaatcaaatgtgtaaaataatattttgactgtcttgtgttttattttccaggcgatcgcatcacggtgcgctgtgaccttgaggcattgatccaagactcagccggcagctccaccaccgccaggacaccacaaggacccactacgccgtccacgaccacagtttcatccgcagcctctgcctttggccagcgtacggatgaccttgaggaggagcgactgcagcgtgagaccagcagcgaagaggaggcgaccaatcaggatggcgaggcggaggaggaggatgaggagccggagcaggatgagcaggatgacctgcagaatgccctggactcggacagcaacgagagtaccgactaccgtcaccagcggcagtcgcagatgtcgcaaatgtcgcacagccgccggacagcgggaaagcgcagcgctgtgccggccacgccctcgcccacgctgccgcccacctaccattgccggggggaggggctggccggacgcacgacacgttggagcgcgctgccggcgccgtcgtgccgcggcaaatggctccgtctgaccgtcggtccgcccaagaagtgcggccacgcccagttcatcttcgtctaaggcgacgtggtcatgccgcccactcaagttgcggtgtccatttttttttttctccgtgtaggttatggtgtacggtctcccccactcatcatatcatatcatatcacccgcgcccctgccacgccccctcacttccggcccaaaatcaataaagtaccccatcgtatgtaagcgtttaaacattaagccagtggattaagaagatcatagcatatgtatgtatatgtatgtgtgatgaggtcaggatttttttttttgtttgtctcgctagagaagagaaccggaaataaaggatacactgccagtgaaatatagggtatatatggaggaatatcacatatttctgaagttttcgaggggttctacaatttcggactactaacttctgctctcttagatactttataaatttaaaaaaaaacttccaaagacttatgatctcctccacacacatgatattcatcatataaccatattgatatcacggctgctgtggacttccttcggttagcatttctctaattagttaaggaaacactcgcgtgtaagcatttgggctcaggacccaatcaacaactcaatataaatgctgggggtctgtgaagacgctcggatctcggatcggataatactagaaactagagactaagtcatcaaataccgcataacatctacagtgaaaatggagtcgagctgcgtagtgaaagaacctatatatacatgtatgtggatgtgcacgagtgtatctgtctaatcgttagttccccccgactcgcaagcatatagcacacacacgttctacacataacataacatatatgatacatttgtcaaaagcaaatgattaaggcccacaatttttggttacccaactggcagacaaccctctggagtcggaattaacgtttggatcttagtattaatctggattttaggtacacacgaatgtcgaaataattattataattataattaaaccaataatgagatcattcaataa

SEQ ID NO: 37649 - DNA, 564 bp, DROSOPHILA
atgacagaaggcgatcgcatcacggtgcgctgtgaccttgaggcattgatccaagactcagccggcagctccaccaccgccaggacaccacaaggacccactacgccgtccacgaccacagtttcatccgcagcctctgcctttggccagcgtacggatgaccttgaggaggagcgactgcagcgtgagaccagcagcgaagaggaggcgaccaatcaggatggcgaggcggaggaggaggatgaggagccggagcaggatgagcaggatgacctgcagaatgccctggactcggacagcaacgagagtaccgactaccgtcaccagcggcagtcgcagatgtcgcaaatgtcgcacagccgccggacagcgggaaagcgcagcgctgtgccggccacgccctcgcccacgctgccgcccacctaccattgccggggggaggggctggccggacgcacgacacgttggagcgcgctgccggcgccgtcgtgccgcggcaaatggctccgtctgaccgtcggtccgcccaagaagtgcggccacgcccagttcatcttcgtctaa

SEQ ID NO: 37650 - protein, 187 aa, DROSOPHILA
MTEGDRITVRCDLEALIQDSAGSSTTARTPQGPTTPSTTTVSSAASAFGQRTDDLEEERLQRETSSEEEATNQDGEAEEEDEEPEQDEQDDLQNALDSDSNESTDYRHQRQSQMSQMSHSRRTAGKRSAVPATPSPTLPPTYHCRGEGLAGRTTRWSALPAPSCRGKWLRLTVGPPKKCGHAQFIFV

SEQ ID NO: 37651 - DNA, 2115 bp, DROSOPHILA
ctccgttaaaataatttttgaccaaattttcacattttttgtaaggggtaatcatcataaaaatttgcaaaaaattgaaaaatcctagatttccaaaatttgaatgcaaatcgattgggaatcaaaaaacaaacctcaacgaggtatgacattccatatctgggccattatttccaatcttttgatcaaaatactgactatttttttcacaaaaattaggaaaatgattttgggtaaaaaaatgaatacttaagtttggttttttgagtataacttggccaaaaatggtcacacacctgaaaaaagtaccgcgttttactcctaattaccaattctaaccatccatatcactttttgacggactccgtgaaaataatttttggccaaattttcgcattttttgtaaggggtaacatcatcaaaatttgcgaaaaaataaaaaatcctagaatttccaaatttgaatgcaaatcgatggggatttaaaaaacaaactcaacgagatatggcattccatatttgatccattatttccatttttttgatcaaaataccgaatatacatccactattttgacgacaattttgattatttttgataatatttggagagcagaacctattaacactatttactttctacccgttaacaggtaacccagcagacgattcgtgtgcccattggctatgccctgcccggcatgcagttgcatgtggtgagtgggcgtggccatgccgcccactacgcccagcaccagcagcagcaccagcaacaacagcagcagcagcaacagcagcagcagcagcgcttgatgcagggacactatcaatttggaccggatggcggaatgccaggattcagcgagcgcggagtgcccgaaggagcggccgccgtatcgcacagcgattgcaatgccatggtgtcgccaacttcagcagcagcagcggtacaacaacagcagcagcagatacagcagcagcagcaacagcagcagcagcagatacagcagcagcaacaacagcagcagcagcagcagcaacagcaacaggtcgccggaggagtgggtgtgggcgcccaggcccagggatccgtgtactatgcgatgaacgtatgacccgcgctcgaatagtcgatgccagcggcggtcattgtcgagcgccgccagtgtcaacttgtcgaaatgtcagcgacttcagtgcatttgggtagcggtggcatgggcggcagatgagcgcccgccccccggtattccaaatttgaaaccgagtccgtgattgagtcctcgagttaccatcaggtcccatccgctgatttcagttgcccctcagttgaccctagcgagcgtttttgaatcagtttgatcttccgtttatccagtgtatctgtatctttatctgtatctctatctgtatctgtaagcgtacccgtatatgttttcgcgtcagtatgattatcattatctgtatccgtgtaaccgtgttgtcagtatctttgtgtcggtggacgtgtgtgtcacaaatactcaagtacggtctgtcactacgatccttcaaagcttcaaatcatttaagtttctttgatagatgcaatacaaattcgttttgaagtgtatagcacactttaaagcgtttttgaggtggtttcgaagctcttgaggttcttaatacgcccattataatagaattaacaaactaaacatcttaagttggtggtaaacgatgcagcggcatcaaaataattttgatactatgtgcatcatggaaacgaaacagcggttgcaccgtttacaaccagcttcaacaacgagatccaaagtgaatcactccacgttatgcaatgctccaaaaagtaatgtttaagttcagccttgtcgtcgaggattttatttaataggtattaatatttagtcgagtgtagtgaagaaaggatgaaaatctaaaccaaaacacaaccaaatcacatgaatttatttcgagcatggacatgctgggtgctagtaatgcaaaaacaacaacaacaacaaccgcaacaaaaacacaacaaaaccaagaaagagttaattaagagctgttagccaaggaaaccgagttttgctcaatgaaaagtgcatttga

SEQ ID NO: 37652 - DNA, 462 bp, DROSOPHILA
gtaacccagcagacgattcgtgtgcccattggctatgccctgcccggcatgcagttgcatgtggtgagtgggcgtggccatgccgcccactacgcccagcaccagcagcagcaccagcaacaacagcagcagcagcaacagcagcagcagcagcgcttgatgcagggacactatcaatttggaccggatggcggaatgccaggattcagcgagcgcggagtgcccgaaggagcggccgccgtatcgcacagcgattgcaatgccatggtgtcgccaacttcagcagcagcagcggtacaacaacagcagcagcagatacagcagcagcagcaacagcagcagcagcagatacagcagcagcaacaacagcagcagcagcagcagcaacagcaacaggtcgccggaggagtgggtgtgggcgcccaggcccagggatccgtgtactatgcgatgaacgtatga

SEQ ID NO: 37653 - protein, 137 aa, DROSOPHILA
MQLHVVSGRGHAAHYAQHQQQHQQQQQQQQQQQQQRLMQGHYQFGPDGGMPGFSERGVPEGAAAVSHSDCNAMVSPTSAAAAVQQQQQQIQQQQQQQQQQIQQQQQQQQQQQQQQQVAGGVGVGAQAQGSVYYAMNV

SEQ ID NO: 37654 - DNA, 5114 bp, DROSOPHILA
ttaacatgaaaagcggcttggctaagacgaaggcccatttccacatccaccatgtcacactgctggctgggagataacgaacaaatcgctgaattgaaaaggaaaataaacttcgggctcctcctaattgcgaatattgtgcgacgaggatgtatgaaaatctcagagtttttggagtgttctcaaaagcaagagagccagttaaagttctcgttcctaagttcattattatcattatttttcccagaacgcatagcacatcaaatcacgaagctgaactaatttaaataccaaatcataatgggaggagtacaaatcgatttaagtggaaatggtgcgtacttacaatttgcaacctattaaaaagctgccttgattggccttccgagtattccaagacgagacgttactactttcccactttgcagaaagaataatgcagttacatgggaaatactacgtaaatatatgaaaatcaacccggtttgaaaaaaaaattcaaattgacaaaagcacgtcatcagccgacgaagagccctgctccacagccaactggcagttgcacacgaagtgagtgtaataaaccaatttaagttggcgacccccagtgaaatgggatagctaaaagaccgaggtccgtttcaggttgccctcattagccaaggcaaaacgatggcccagaccaccaccaccactagctacagcaaccggatcgaaactcaaacccaaacccacgtccattccaagtccaagcccagctaagcaactcgaactcgacgaggtgggagacagctaatcggcttatactcggaatcggactggttgtccggaaaggaaatgcaatgggcttcttgaaggctgaaatcggtaaaattgcagctattactcatatcgattctgtggcctattatgaagttagaaacgcattaataatccagttaaaatataagtcacatccttggctaccctaagcactgtcgaataacaaagagaactaagcctaaaacctaaaaggcactacccactgagatccttggagatcccgttccgcccaagatcctttgggcgcactcacctgtggcgtcctgccctcacccgcttcggcaggattgacggcatagttgcactggcatccctcctcgcagcacagacgcaccagctcgtgctcgccgcaggtgcatggctcctcgtcctcctcgtcataggcgcaatcctcgcgtatcaggattatgtagtccgcttcgaagaactcgttgcgcgtctcatcgaagacgacgcgattcttgcgtgccggcggcggtcgatttggcttcttgagcaggccgcgcaactgaccattcacctcgcgcatcttgttgccgttggtcaggtgggtgggatgtgggatgattcgataatccgggcgttctaaatgggctgctgtaacgctaacgatgcctctggcggcgcaattggacgtgttctgatcccgactggctaggcactcatggcactggcaggctctttcacaatcaaactcttcctggctatccgaattcgaattcgaattggaattcgtatcgcaatcggaatagctttcgtatagcaagtactcctgttgctcgctaacgaattcggccagcaattcgtcgtagcactggaaactactggtgccagcgatatcctgctgtttccggttccggttattgctattcaaatgatgccactgcaattggcgggcgacctttagatactcgctaaaccgctgcacatcgaactcgctgagcgatgtaccaaaatcaccggcctccttgcaactcggctgcgctggcacaaaggcagagcgcctcaagcaatcctccgtggaagcgacgtgctcctcgctatccgtttcgatttcaatcaccacttggtcctggttctggttttggttgtgggtctgcttttggttctggttatggctctccgcctctgcctccttctccgccttctcgatcctgcgcactgggcactcggagtgcgtattcagcacgaaatgttgctccttgggattttcagctgtttgtctgtcgctgttgtctgttgtttcgctttcatttggcaatggcgctacgagaatggcatccacatttaattgaattgcacttgggtccgcgataattgctgcaatcgccttattgtctacgccttgagtggattgggtttgggcttgggtttgagtttgggttcgggctagctgcgtttggctggagcactggagttggggttgttggctggtatcgctatcggtatctgggggtagtttctttgttatgcttattgtttgttgctcctgctcctgctccttctgcttttgttgttgtggtctcaaggatgcctttacacaatcaatgttactacaactggccacgcgtccctgaaaattatattgcagtcgctttaagcgctgactggccacaaaatcctcgcccaaatcgtgctcaaaatcgatgagatcctgctcaatacagcttgttgctactgctgctgcagttgctcctgctgctgctgctgctgctgctgcttctgctgctgctgctgctactgatggtactgtatcgcccaccaaggactcgcaatcgatgagcttctcctcggatgttgcacttaaatcgctgggctttgactgtttgccgttgtcattgcatgttgctgctgtatgtgggatgctgctcctcacgtaatccagaggccaggaacttttttgtgggcggacagcagcaatgccagcgacattatcaacgccaccacatccagtcaaggatgagttgctgctggctggtggctcgtgggctagctcgtgggttcgctggttgtcgtgggagcagggagggtactgagaatatggcaatgacaatggcgcctgccccgcctcctgctgctcctttttggagcttaaggttgctgctgctgctgctactcctactgctgttgctgtttctactgttgatgctgctgctgctgcatctatttcaacactttcactgggataaaaaaaatgatggggcccgcgagcaggcaacgcgctttgcctgattttttgcacaaatttttctgtacgtcgcgcgtcgtcgtcgtcgtcgtcgtcgttgttggtatcgttgtcgtcgttgtgactgccaatatcgtcgccagtttggccaacgttttgcgacgacttttcgttggacttttggccactttctgtcacgttgcgtatgccacaaggactggggcaattgatttccactgatttttcactggactcaatcaatttgcacagcttttggccagaattcgttgacggttggctgctgctgctgctgcttgctgacttgtgtagctgctgcctctgctgctcagctgcgacgactgctgctgctgctgctgctgccacaaggttggctttgaaaagctcactgccaattgtaggtattgagcaggcgctgctccccctcttgccgttgttgttgttgctactggtgctgctgctgctaactgtcacattgggtggttgcaggtatgcgcctgcgctcacgctctgcctctcatgctcgagttgcgcgtactcacatttcgtggccacttccgttgctgagttgtcgccagtgttgtcgctgttgcagctagtgttgctgctgttgttgcagctaatgttgctgctgttgttgcagctattgttgatattgttgctgctgttgttgcagctggtgttgattctaatgtcgctgttgttgctgctactaatgttgttgctgctgttgttgcaactagctttgttgctggtgctgctgctgctactattgttgttgctgtcgcccttgttgttgccagtgtattcagcacgcgcacgcgcctccaccgcaactatcgccgaatggcactgctgacgcagctcgtcatggacggcagcaacattgtcgcgtgagttgcgtgcttcgcatgccaagtggcccgaaagcccgcagtttgggcctagtccaccgccagttgtattggccatagatgatgctgctgctccaaccgcctgattatccttgccactggatctcattttgccaccgccgcatatcggctcatttgccaatgccagcgtcaacatgtccacaatcagcatgatcgtgtggcacaaaccatggacgtaaatgtgggctatcagttattccagcttatggctgggagttttcactatggccagttcccaccaataaaggaacaaagccgcccaaagagacaccagttgaattttccgccttcgcttatgctttgcataaattacaagaaaatttcacacaaacacacacacacacacacacacactcgcaaacgagggcccgggaaatttcattattgtccgtggcacttgtcgttggcgaacaggtgcgcagggtcactcgagcgcatcctgtttgtcccaggaccagatagtagtcgttattatctcttttttttttttgctgtttttgttttgggggttgactgtggtgtgttgaacgttacgcgccactgcagccaaacaaaaagccagcaaaacaccaccggcacaaaaaaaaaaacggaacataaacaaaatacgaacaaaaattatcaagctatttatttaattttcttcccgttttcggtttcttggtaaaaaatgggttggttttttttttttctttcttgttaagcgcgcgacgcacgtccgaacgcgaatcgtgacggaagtcgactgagcaaacgcagagcgactcggcgacagaaaattaagccgtcttcgtcgcgatctcggcctttttctctgccgagcgaagcacagtgggttaaagttctacaaagcctataagtaaattaggtggggtatgttcaaaggaaggatattaacgagcaggaaaggtggtgcacatatcaaagctcaagagataatcaagatatttaaatcttataccgtttgaaggatgaaagctattttgagtcactggtaatcttttttttacgcaaaaattttcaaacaatatgaaagctgccttctcttcaaactcgacctgcatatactttatacccatttaaaagaatttttttttttagaaactttttgataaatgcatcccactgtgctgtttcgctgtctcggtggc

SEQ ID NO: 37655 - DNA, 3114 bp, DROSOPHILA
atgctgattgtggacatgttgacgctggcattggcaaatgagccgatatgcggcggtggcaaaatgagatccagtggcaaggataatcaggcggttggagcagcagcatcatctatggccaatacaactggcggtggactaggcccaaactgcgggctttcgggccacttggcatgcgaagcacgcaactcacgcgacaatgttgctgccgtccatgacgagctgcgtcagcagtgccattcggcgatagttgcggtggaggcgcgtgcgcgtgctgaatacactggcaacaacaagggcgacagcaacaacaatagtagcagcagcagcaccagcaacaaagctagttgcaacaacagcagcaacaacattagtagcagcaacaacagcgacattagaatcaacaccagctgcaacaacagcagcaacaatatcaacaatagctgcaacaacagcagcaacattagctgcaacaacagcagcaacactagctgcaacagcgacaacactggcgacaactcagcaacggaagtggccacgaaatgtgagtacgcgcaactcgagcatgagaggcagagcgtgagcgcaggcgcatacctgcaaccacccaatgtgacagttagcagcagcagcaccagtagcaacaacaacaacggcaagagggggagcagcgcctgctcaatacctacaattggcagtgagcttttcaaagccaaccttgtggcagcagcagcagcagcagcagtcgtcgcagctgagcagcagaggcagcagctacacaagtcagcaagcagcagcagcagcagccaaccgtcaacgaattctggccaaaagctgtgcaaattgattgagtccagtgaaaaatcagtggaaatcaattgccccagtccttgtggcatacgcaacgtgacagaaagtggccaaaagtccaacgaaaagtcgtcgcaaaacgttggccaaactggcgacgatattggcagtcacaacgacgacaacgataccaacaacgacgacgacgacgacgacgacgcgcgacgtacagaaaaatttgtgcaaaaaatcaggcaaagcgcgttgcctgctcgcgggccccatcattttttttatcccagtgaaagtgttgaaatagatgcagcagcagcagcatcaacagtagaaacagcaacagcagtaggagtagcagcagcagcagcaaccttaagctccaaaaaggagcagcaggaggcggggcaggcgccattgtcattgccatattctcagtaccctccctgctcccacgacaaccagcgaacccacgagctagcccacgagccaccagccagcagcaactcatccttgactggatgtggtggcgttgataatgtcgctggcattgctgctgtccgcccacaaaaaagttcctggcctctggattacgtgaggagcagcatcccacatacagcagcaacatgcaatgacaacggcaaacagtcaaagcccagcgatttaagtgcaacatccgaggagaagctcatcgattgcgagtccttggtgggcgatacagtaccatcagtagcagcagcagcagcagaagcagcagcagcagcagcagcagcaggagcaactgcagcagcagtagcaacaagctgtattgagcaggatctcatcgattttgagcacgatttgggcgaggattttgtggccagtcagcgcttaaagcgactgcaatataattttcagggacgcgtggccagttgtagtaacattgattgtgtaaaggcatccttgagaccacaacaacaaaagcagaaggagcaggagcaggagcaacaaacaataagcataacaaagaaactacccccagataccgatagcgataccagccaacaaccccaactccagtgctccagccaaacgcagctagcccgaacccaaactcaaacccaagcccaaacccaatccactcaaggcgtagacaataaggcgattgcagcaattatcgcggacccaagtgcaattcaattaaatgtggatgccattctcgtagcgccattgccaaatgaaagcgaaacaacagacaacagcgacagacaaacagctgaaaatcccaaggagcaacatttcgtgctgaatacgcactccgagtgcccagtgcgcaggatcgagaaggcggagaaggaggcagaggcggagagccataaccagaaccaaaagcagacccacaaccaaaaccagaaccaggaccaagtggtgattgaaatcgaaacggatagcgaggagcacgtcgcttccacggaggattgcttgaggcgctctgcctttgtgccagcgcagccgagttgcaaggaggccggtgattttggtacatcgctcagcgagttcgatgtgcagcggtttagcgagtatctaaaggtcgcccgccaattgcagtggcatcatttgaatagcaataaccggaaccggaaacagcaggatatcgctggcaccagtagtttccagtgctacgacgaattgctggccgaattcgttagcgagcaacaggagtacttgctatacgaaagctattccgattgcgatacgaattccaattcgaattcgaattcggatagccaggaagagtttgattgtgaaagagcctgccagtgccatgagtgcctagccagtcgggatcagaacacgtccaattgcgccgccagaggcatcgttagcgttacagcagcccatttagaacgcccggattatcgaatcatcccacatcccacccacctgaccaacggcaacaagatgcgcgaggtgaatggtcagttgcgcggcctgctcaagaagccaaatcgaccgccgccggcacgcaagaatcgcgtcgtcttcgatgagacgcgcaacgagttcttcgaagcggactacataatcctgatacgcgaggattgcgcctatgacgaggaggacgaggagccatgcacctgcggcgagcacgagctggtgcgtctgtgctgcgaggagggatgccagtgcaactatgccgtcaatcctgccgaagcgggtgagggcaggacgccacaggtgagtgcgcccaaaggatcttgggcggaacgggatctccaaggatctcagtgggtagtgccttttaggttttag

SEQ ID NO: 37656 - protein, 1037 aa, DROSOPHILA
MLIVDMLTLALANEPICGGGKMRSSGKDNQAVGAAASSMANTTGGGLGPNCGLSGHLACEARNSRDNVAAVHDELRQQCHSAIVAVEARARAEYTGNNKGDSNNNSSSSSTSNKASCNNSSNNISSSNNSDIRINTSCNNSSNNINNSCNNSSNISCNNSSNTSCNSDNTGDNSATEVATKCEYAQLEHERQSVSAGAYLQPPNVTVSSSSTSSNNNNGKRGSSACSIPTIGSELFKANLVAAAAAAAVVAAEQQRQQLHKSASSSSSSQPSTNSGQKLCKLIESSEKSVEINCPSPCGIRNVTESGQKSNEKSSQNVGQTGDDIGSHNDDNDTNNDDDDDDDARRTEKFVQKIRQSALPARGPHHFFYPSESVEIDAAAAASTVETATAVGVAAAAATLSSKKEQQEAGQAPLSLPYSQYPPCSHDNQRTHELAHEPPASSNSSLTGCGGVDNVAGIAAVRPQKSSWPLDYVRSSIPHTAATCNDNGKQSKPSDLSATSEEKLIDCESLVGDTVPSVAAAAAEAAAAAAAAGATAAAVATSCIEQDLIDFEHDLGEDFVASQRLKRLQYNFQGRVASCSNIDCVKASLRPQQQKQKEQEQEQQTISITKKLPPDTDSDTSQQPQLQCSSQTQLARTQTQTQAQTQSTQGVDNKAIAAIIADPSAIQLNVDAILVAPLPNESETTDNSDRQTAENPKEQHFVLNTHSECPVRRIEKAEKEAEAESHNQNQKQTHNQNQNQDQVVIEIETDSEEHVASTEDCLRRSAFVPAQPSCKEAGDFGTSLSEFDVQRFSEYLKVARQLQWHHLNSNNRNRKQQDIAGTSSFQCYDELLAEFVSEQQEYLLYESYSDCDTNSNSNSNSDSQEEFDCERACQCHECLASRDQNTSNCAARGIVSVTAAHLERPDYRIIPHPTHLTNGNKMREVNGQLRGLLKKPNRPPPARKNRVVFDETRNEFFEADYIILIREDCAYDEEDEEPCTCGEHELVRLCCEEGCQCNYAVNPAEAGEGRTPQVSAPKGSWAERDLQGSQWVVPFRF

SEQ ID NO: 37657 - DNA, 3098 bp, DROSOPHILA
agaaccgaaaaatgtagatgtaagaattgtcattagaaggaaatcgcttacaatgtcttggcttaaatctcgcctttaggcctaaatgaacactgaaagaaatcggcagacaattgaaaatgcaatgcaagcaaatgtgtgcttttaataatttacaaatataatattttgaaatataataatttgaaatcttcatttttttcccaccacttaacattctaactggttgaaagccaatgattactcatcattattattattattattattattattattattattattatataattattataaacaacttcttttttgacccgtcccgcattaaattcacctaactggcttttaattgtccgagacggtgggcagctggaggaggagtggcgtctgtttccctatcatttccagggctcacatgtctcctggtgtcggtgacaaaaaacaaacaaagaagctaagaaaccaagaaacaaacctcagttttgccattccgaagtggcatgtaactctatttacgactaaacaagagtcgccctttgttgtaagccggaaaagttggtgtgtttacctgatggccatcatgatcgctatcatgatcacggcctgaaatttcctggtagctgcaaaccgaaactcatctggccaaagacgccacgagctcagctggcgacagtaattaccgagccaaatgtcgagcgcattccacggacttcctactttaaatattgaaattaatcaatcaaagaagaatgaggtacatatacctatcaccatttgaatcagaatttccgaatgtaggagattaatttgcaaaatgcgaatagctgccataaatacatggcaatcgcattttattatttacatacatatatgtatgtacaatgtttatttggatatattttaaatatatatttcatataatggatatattgtggagcattaatcaataatcattagggttttaagatcacgttacaaaaattaattttgaaaattaattaagttggacgaactgttcgatgatggcgaggactagagtctccagttgggatgcgttcatatcttggatgagtaacaaagccgccgacaaactgttattatgccgctccaaagttgtggaattagcgccattcaatgctaacccagaggatacattgggcaacagatgtccgggtggggtcaccacatcttggcgtcgcgaattgatcagctcgataagattttcggctaaagtcgaggtagaagcggcagggctgtcggcgttccgatccgatgaaattgactgaataccctgaacctgttcgtgcacagcctgcggagtcatcgtaaacttatgagcctgctgaacctgctcattatgccaaatcggctgattcttttgcttccgaagcgcatcctgagctttttgagcctgacgcacctgacgcaaatcggacggaaagaacagaggcaagcgttcaccattcaccaacaccgatctacttctaattcgagctagttcgtcaatatttttggcatccccgctagcgaatcttttcctttgctgctgctggacctgacggatcgtccgatcgcactgttcgatcatatcgcggtatgccatgtcatcgggactgcagttgcttaaatccaaaacaggattaaggatcgcactccctacgtccgggtagtaatcgtatcgcaaagcggattccagctcctcttcggcaacatctacgttgtccagcttctttagattcggcagcattcgtagcacagatgcccgatagttggagccagcggcaatagagcatggattgtccagcagccagagggatgtgagggatttggcattgactagatatttcagctcatcaaagtctgctatctcgttctggcgcaagtacagctccttcagtcgagtgcatctcaccaggcttttcaatgaagtgatcttgttcatgctaagcgaaaggacctccaggtacggcatcttgaggcagagacttatgtcattcaggccgcagttacagaaattcaacttcaaggccttggcatagtccctgcacctggacatgctttccaccatgtgctctgttagttgcttctccatctccgcgagctatgataatttctaatgatatggggcttttagagtagaattaaattttgatttttaaggaaagaagagtttgacaaagaagtgttaaaatatgtttagaaaaatttccatgaaaatgttctgtacaaaatcgggtcgagtatccgatgttctcgtgaacagagtatggagcgtactgactgatgtgtgtagatcctcgctttcaaatgagggttacacattttgcaggggctacttttcataaaaaaaaatttattttgctaagaagtaaattttttctttaaatcatatgtagttggcgtaaacttcagattctctacttggccaagaccttatctcattttctcattcattcgaactgaaggccaagaagcctgctggcaagcggggctgtaaaaagacataagattgagtatattgtttttggtaatactaagttacaaacccgtacgcttaccctacgcttaaggaaatttagcttattgtacgttaagatctacgaactgaatcgtgttaagttctttttatttttataaatagatgcccgcttatatcttacaagtctgccaaaagacgaaaacttctttatcaatccatctttattatatgtatgtatatattcgttcgcaatacgaagtcgtagtaaatttgtatttgaacgcaaaaggaaactagatgagatttatttacaaactaaaaagggaatgtatggatgaaatacaaattcctctgctggtgcccatcgaggaactcgttcagtgtgacttcaaagtcaatctctatatatctttaattaatttttgccctttccagatcctttcgggagctcttacgttcttacactcactggggccggtaaatttcggctaattgtaacagaatacgtcaaattttaggcgttaacaagctacgattcaaagtaactttgaatctcgcggcttatcaataaatttcttcagctgatggtaccgataatatatcgagctcgatt

SEQ ID NO: 37658 - DNA, 1098 bp, DROSOPHILA
atggagaagcaactaacagagcacatggtggaaagcatgtccaggtgcagggactatgccaaggccttgaagttgaatttctgtaactgcggcctgaatgacataagtctctgcctcaagatgccgtacctggaggtcctttcgcttagcatgaacaagatcacttcattgaaaagcctggtgagatgcactcgactgaaggagctgtacttgcgccagaacgagatagcagactttgatgagctgaaatatctagtcaatgccaaatccctcacatccctctggctgctggacaatccatgctctattgccgctggctccaactatcgggcatctgtgctacgaatgctgccgaatctaaagaagctggacaacgtagatgttgccgaagaggagctggaatccgctttgcgatacgattactacccggacgtagggagtgcgatccttaatcctgttttggatttaagcaactgcagtcccgatgacatggcataccgcgatatgatcgaacagtgcgatcggacgatccgtcaggtccagcagcagcaaaggaaaagattcgctagcggggatgccaaaaatattgacgaactagctcgaattagaagtagatcggtgttggtgaatggtgaacgcttgcctctgttctttccgtccgatttgcgtcaggtgcgtcaggctcaaaaagctcaggatgcgcttcggaagcaaaagaatcagccgatttggcataatgagcaggttcagcaggctcataagtttacgatgactccgcaggctgtgcacgaacaggttcagggtattcagtcaatttcatcggatcggaacgccgacagccctgccgcttctacctcgactttagccgaaaatcttatcgagctgatcaattcgcgacgccaagatgtggtgaccccacccggacatctgttgcccaatgtatcctctgggttagcattgaatggcgctaattccacaactttggagcggcataataacagtttgtcggcggctttgttactcatccaagatatgaacgcatcccaactggagactctagtcctcgccatcatcgaacagttcgtccaacttaattaa

SEQ ID NO: 37659 - protein, 365 aa, DROSOPHILA
MEKQLTEHMVESMSRCRDYAKALKLNFCNCGLNDISLCLKMPYLEVLSLSMNKITSLKSLVRCTRLKELYLRQNEIADFDELKYLVNAKSLTSLWLLDNPCSIAAGSNYRASVLRMLPNLKKLDNVDVAEEELESALRYDYYPDVGSAILNPVLDLSNCSPDDMAYRDMIEQCDRTIRQVQQQQRKRFASGDAKNIDELARIRSRSVLVNGERLPLFFPSDLRQVRQAQKAQDALRKQKNQPIWHNEQVQQAHKFTMTPQAVHEQVQGIQSISSDRNADSPAASTSTLAENLIELINSRRQDVVTPPGHLLPNVSSGLALNGANSTTLERHNNSLSAALLLIQDMNASQLETLVLAIIEQFVQLN

SEQ ID NO: 37660 - DNA, 2762 bp, DROSOPHILA
gccgcccacgaaacggtagtagatgccaatcgcaacggagatgatcagcaccaccgccaggatcgtgtagtcccaggcgcccaaagtagccattgcagatgccgggttttaagtggggcacgtgttaggctgattttcccgacggaaccctagtcgcacatctaatcactccaaactgataagttgcccctaatcgggcctcttgagattcaagcgatatattctatggggcgtcggacgttggaacacgtcttcaccgtctgccggccgtcgatgaaataaaggcccaaacggaatgaaaccgcaagcttttgttggtggagagtcagcattgggcattttactatggcatttacgaccccgtcgagagatagcgacctgttgtgttgcaccacgtgcggctggatagggtgacaaccaggcgaaggataacccaaccgcaggcccgcaagcccttaaaatgggaaaccatttaggtgagggtcatggcaactgtcaaaccaccaaaggctcgacttcattgcacttttagctcgtgccgacaaacacttgtggctggtactgtggacgactgtgtttagccatccataaatatttatttgcccgctcgtcggattgcaattgtaattgtagtacccgattgtcgttagctgtgtagagctggtatccccccggcccaactttggcttgtttgctttacgatttttacgagggaaattaattaataaacacaaagagcccagtcggcaagtcggcattggagctttggaagcagtgtacaaataaacaaataagtctcaacatttcgctgtaacttatgcgattcttgccggatactttgctccctcaacgcgatcttttgccaataacaaaaaaaaaaagccatcagacgaatcacatgatgttcttggagaccaaaaatagttctatgactgctgtcgtaaatctggtatctatatggaccagtctggggtttgtagttctatgtaggggcgggaaattagtagagcactggagcaaacttctggaagttttatgtgacgttagtaatctaaatacttaaaactacatttaacatatatgtacttcgcataagaagagccatccagtagaacagtcgattaatttgtataatggcgaacgttataaatctaacaggtgctggaggactgaatgcttttgcttctttagcttagtaataaaactactattaaatcacatgattttggtctgggccattgcggctatgatatctatatgacatggtagtccaaactcaccgtgacttggtaccagccaaagctgttgggcatcagtttgccgaacttgccgcgcggaatgggcgatccccgacgtcgggaggtgggtctatcctgttggaattaattatacattagattagaaatgtgcatagggataacatgtggggttggtgggcaccttaacggccgtggtcatgtcgctcatgtcatcatcctcgtcccatcgacgcaaatcttcgggtcgcagcttgatgtcctttttgttatgtagacattgggagggcttaaagctgacgcgccgcttgtttcgatccttgcgtcgctggcgatcctccacatctataggaatacattatatttaggttactggagggttcattttcttgcactcccgtgtactgaccaaaatcatcgaaatcctcgggagcgttgtaacgtccgccgccatttccaacgttgttgttgtaccgctggctactgccaccgccgcgtttgggcatcttactaatattcactcaaaaacgtatgcaacaaaaagatatgcgaatttcagcacgtttttagctgagtggtgttgtgtgtttgtgtgggtgctgttgttattactgagaaaactgtcttgagggcaaaaaactatgtgcgatgtattttttgcattcacacaaactgctgccaacttctggaaaaatttttctcgacttcctgaacctatttgctaatatagcagcaaagtagctgctgttttttggcaaatttccacggccaaagtacaacgcaattttgtgaaatttaattcactagcgatcttctttcgatagccagtggccgatggttggcagaaactggacggatgtttgcgacctttttacaagttattcttcgaggaaatttgatttaattgccaccaaagcgaaaaagttacgaaaactaactagaaatatgtagcgagcgaagtatattcgcttgatgttgatattgttttcttaatttctgacaggtctatcgatgatggcgggccaactatcgcacaggtcgtaatcagtgatgacactctagcgcagaacaaccgcgataaatctaaagattattggctattttttgttttgttgcagttaaactttagaatgcaatattattttattggactgttttgaagagagttacctcattcttactttaaatattatatagttgtagcacacacgtacacactccttttttgctcaatatcaaataagttgttattttacgaatagaggtagtgaaatgttttcgtataagatttacttactttcattttgtcgcaaacggtgcaatgtatttcataaattggtaatcgatagttgagagagggaatggtgattactgacaaatcgaagtcgagtcgagttttattatcagatcaagcaatatgtcggagaaaaagggtgcgctaaaagtaatcccgtccgcttcggaggagcaacttgtccaggccctgggcgatcttctccagcgctg

SEQ ID NO: 37661 - DNA, 369 bp, DROSOPHILA
atgcccaaacgcggcggtggcagtagccagcggtacaacaacaacgttggaaatggcggcggacgttacaacgctcccgaggatttcgatgattttgatgtggaggatcgccagcgacgcaaggatcgaaacaagcggcgcgtcagctttaagccctcccaatgtctacataacaaaaaggacatcaagctgcgacccgaagatttgcgtcgatgggacgaggatgatgacatgagcgacatgaccacggccgatagacccacctcccgacgtcggggatcgcccattccgcgcggcaagttcggcaaactgatgcccaacagctttggctggtaccaagtcacgaagtttgctccagtgctctactaa

SEQ ID NO: 37662 - protein, 122 aa, DROSOPHILA
MPKRGGGSSQRYNNNVGNGGGRYNAPEDFDDFDVEDRQRRKDRNKRRVSFKPSQCLHNKKDIKLRPEDLRRWDEDDDMSDMTTADRPTSRRRGSPIPRGKFGKLMPNSFGWYQVTKFAPVLY

SEQ ID NO: 37663 - DNA, 1525 bp, DROSOPHILA
tatatatatatatatatatgtatatatatattaagtgaactttggctttaaataaacgagcttactcattaagcaactaaattaacgctcatcgatggcctgattgggctgctcctccggtcctttggcattgtaaacattgcgattctgggacagatgccatagggctagcaggcgggccagctccgtgtaggttagcttgcgcagatcacgtcgatcggccagcttaactccggcggcctctagctcctccaccaatgtgacggcatcgtattcatcctccggattctgctcattgcgtggcgcaatttttccgacgaactccgactctggcaccgcttcgctcttcaccatgcgctgcatctgctgcacatgctgctgtttatgctgacgttgctgacccaatggctcgtcgacatcttttagctcctgttcgggattcatgggcagcgaattggccaggctgaccatgccgaggatcaccaggaagatgaccggaatattgttgcacccaatgggtttcatgtttacgtccgactgctagtagctttgctgtggcactgctgcccgcctgtcgcatgtcgatcgatcgtggcctggactcgactctcggggtgcgctccaatttctatctgccttccaacccgctcgtacgctcgctcggctccctatcgctcactcgaacgccccgtgtggcagtgctggctggcgaagacattcgctttcttcttccagcatttggctattattttttttggttactttcgaatgccatggattttggcaaacaatggtgccattaaactgcaagtaaggcggggatatagattcttttacttctaaaactatataaatttgtaatagatgagcagtgagtgtttttaaaatgtatattttattgtatgttatgcaaaaaatgttccatttaattcaatacgctggaaacgaagcgcagcactgtcgtttggggggctgcttttgattgaaaagtcagtgtgtagggtcggttaaattattttatctgcatatgcagcacatacactatactatacactatacaacatcgacccctggtacatatgttatttaattgtctggctggtgccttttgtattttgtattttgtatgtagtagatcccgcatttcgtcgttttttattgtgtatttttgttggctacgttttttttttattttttctgtccgcctccaattcaatttatctgcgcagtttgtgctcactcggttcgccgtcttctattttctgcatgttggtttggcctaatcttatcagctcttattcatagccaattgaacgagttgtaatggtcgagagtttttaataatttctagtagatatgggttaatggacgacgcgccccgcgttaatcagtcgcaatgtttccttgtgtaccgaaccaatcggtcaggcaatcttaggtctaagaactttgtttgattggtcaaaatgtgaatgatattattctacatttacatgttcatatttcacacaaacaattattgctc

SEQ ID NO: 37664 - DNA, 525 bp, DROSOPHILA
atgaaacccattgggtgcaacaatattccggtcatcttcctggtgatcctcggcatggtcagcctggccaattcgctgcccatgaatcccgaacaggagctaaaagatgtcgacgagccattgggtcagcaacgtcagcataaacagcagcatgtgcagcagatgcagcgcatggtgaagagcgaagcggtgccagagtcggagttcgtcggaaaaattgcgccacgcaatgagcagaatccggaggatgaatacgatgccgtcacattggtggaggagctagaggccgccggagttaagctggccgatcgacgtgatctgcgcaagctaacctacacggagctggcccgcctgctagccctatggcatctgtcccagaatcgcaatgtttacaatgccaaaggaccggaggagcagcccaatcaggccatcgatgagcgttaatttagttgcttaatgagtaagctcgtttatttaaagccaaagttcacttaatatatatatacatatatatatatatatata

SEQ ID NO: 37665 - protein, 147 aa, DROSOPHILA
MKPIGCNNIPVIFLVILGMVSLANSLPMNPEQELKDVDEPLGQQRQHKQQHVQQMQRMVKSEAVPESEFVGKIAPRNEQNPEDEYDAVTLVEELEAAGVKLADRRDLRKLTYTELARLLALWHLSQNRNVYNAKGPEEQPNQAIDER

SEQ ID NO: 37666 - DNA, 2267 bp, DROSOPHILA
ccgctttggttagttagtcatttttggttgagaatgaaaagaagaaaaaaaaaaaacccagaactgtcagcagcgttgataaccgtgttgtgggccaaacacaactgactgactcactgtataggatagctccatagccagctatgggaggtaccctatcaagggcacccaatagcagcaaccaatccacttgactctcttttgtgtgcatctcctgatgtcatcgaccaataatgcgttggatcgtttcccttcttatcgctagccagttgaactggcagattccgccgattccaacctgcgctcctgcggattcccaccttgccaatctcatatcccacatttatacagtagatatgggatgagcgaatctcgttgagtactagtttctactcagaactatcaccgatcacagaacagttaagaacttctatttctaactatgatttcgtttctcaatacatattttgaaacaaatacaagtttgatgcaacaattgttaaacattattcataaaaattgcattgaacagcgaatattataatcaaaagcaaaagcagcacttatttaatgatatttgtagatagttaaatagttatagatgcatagctttaaggttgttctatatgaaattatcccattgaatgcaaaaaatgcaaaagtgattgatgatttcctgaatcgaagccactttataagactgtatttgatttgaatgaaagcccgagtttgccttttaatttaaagccaagtgcaatatttagcgattcaacaatttattacgatattgaaattcaggcgcataacaattaataattactcgttaacagcttaacttgattcatattcatattcacattgttcgtatgtacattatctttttattatttattcacacactcacaacagactcacgcacacactcacgcacacattggcattgaaatggtttcaaaaaaaaaggttttggttcttttcacgtcagttaatctgatggcagctaatcctgctcctgctcctcgctggtggtggtcaccgtcttctcctgccgcgtggtgctagtggtggtgcgtgtcaatgtgaagacaccggtggtgcccacctcatccagcggctgggcaatgattgttgatgtggtgctctggaaacgaggtgttagacatttgatactacatatattatgaggagggtgtcgtacgccattcttggtctcctcgggactccacgagcgtttgtcatccaaatcctttgagcaacagcctcccattctttggttttgtgcgtatatagaaatacgtattcgttgtatatatggtataaatggtttggttcggaatgcctttatttttcgttctatattaatgtatatcgggggccagtaacttgttgctgcttcatcggcgcacgtctgtcagcgaatgccggtgttcgatgtggtgttcacttgttagccaaacgaacgaaccgaaagcccaacccaacccaacccaacccaagctgcgccgccagctgtgactgcgactgcgacgccggagttgggttgtcatagctatatagctccatatcaattctagaaatatgtctcagccagcgagccagccagccagccagtactcgcattcggtgtatattgtattgtgttgaatacaataagtatatgtatagctccatgtatgcctgtgagctgtacaaacaaaccattcacattccaaacaaccaaccagccagccacccacctcaatgcccccgttcgaaactctatgttcccgagaatgtcaaatccgatctgattcccgctttgaaaacagtcacagtcatcatctttattttcaaatgggaaccactggccttgtcgccttaacggttccatttgcccatcgagcaggtgcagcgtgtcaactcaaggctgccattgttgtctgtggcctatttggtggcactattcaaagttgcaacgtgacaactaatgtcaaaatccttccaagaggattgtgtgctatgatcttcctttggttcatttaaaaaaaccaaatgggccattaacagcttaaattgggcacccttatatagagcttttaactaattagcagaattagtcccaaaaaaaatataaataaatacctttgtagttaggaccaaactttatttaaagatcctatgacacatcaactttgcggggaaattcaaatacacaatggttgtaaattaataaaaacacaacaatttgtcatttttgaatgcgatatcacgagggggtttatgttgtt

SEQ ID NO: 37667 - DNA, 210 bp, DROSOPHILA
atgggaggctgttgctcaaaggatttggatgacaaacgctcgtggagtcccgaggagaccaagaatggcagcaccacatcaacaatcattgcccagccgctggatgaggtgggcaccaccggtgtcttcacattgacacgcaccaccactagcaccacgcggcaggagaagacggtgaccaccaccagcgaggagcaggagcaggattag

SEQ ID NO: 37668 - protein, 69 aa, DROSOPHILA
MGGCCSKDLDDKRSWSPEETKNGSTTSTIIAQPLDEVGTTGVFTLTRTTTSTTRQEKTVTTTSEEQEQD

SEQ ID NO: 37669 - DNA, 6946 bp, DROSOPHILA
gcatgatgatgcagtctggcctgaagaagtccgagatggtgtacaagaacacagcccattgctggctggtgattgccaagcaggagggcattggagcctttttcaagggcgccctatcgaacataattcgcggcacgggcggtgctctggttctcgccctttacgacgagatgaagaagtacttttagccccagtgtgccgccgtttgtggtgggccaattcgatcgccagcagcagcagcagcagccccggccacagcaaatgtcacaccacgatggcgtagcaccaaccgaacacactgtccacctcttcgtcgaggaggacttgctcccacgagcccagtagtaaattaataatttgatttgataggtcgccccacatggtggtcggtccctcatttcagattgtgttcactttcgcagtggttgagaaaatacaaataatatattgaactcaaatctttgttgtgcgctctttgtttgttttcatcatcgcgtgttttttgctttttggtgcatgtgtgtgtacggattagggtgggccacatctaactaggatctaattatcctctcaacaagctaagctagtcgttatattcaactatatgtgaaggacaaacaaaaaaaatttaattaatttacgtatattattttgtctcgattgaatacatttcaaaaaaattacaaaatcattatatgtacgccatgaaatgataaaaggttatgtactatatgggctgcccaccctactcgttttcgtagatatggtcttgtgcgggtggatttaagacttaaacgttagttagccatttaaataaaaataacattaaaaacagaaagccatgtcgctttccattgtcaatctgctgcatacgttaattaacaacaaaaaacaaaagtacaaaaaaaagaggcaaaattacaagtactcgatctgcacttattctgtaaacaattagaaataactctagactaagatccagtcactgagttggctgcacttagtgggtagccccggacctgtgggccaggaacaggaagtacgtgcccgccgcgtaggccaggaaattgaagagtccaaagacaccggcggcggtattcgaaccggaacccttgcccgtggcatccgaccatctggccagctggacgatgaatccgatgaagtacagcagcgtcagcacagcggtggtgatcagctcctgttgggcaaaacaaagtagcagttgggtgggttagttcatactaatgatccagagcagttagttgccatttgtcactcaccgagaatatccagttgacggccacgttgagggcctcgcgaatgcccaggaaataggcggcgatcagcagaatgttgatgatgaacgagatgacgatgacgaacatgaagaacgaggtggccgaggccagtggaggagctgccagggccatgcagatgatgcccagcacctggtgtgtataaaaagatgggtaaatgtgtaagtgtacaaggtcgcagtagaagcaataatatacgagtagttttaagattcaagcgccatctgtcgcattaaatcgtaattgtgcagttttatgcaatgtctatttagggtaaagttgaatgcatatttgagatgtatagattgcatagcatcttatattattagttgtaatacatatatgtatagtcacccagatcgtgatcttcctccaattgagaggcgcctcttcaaggtcgtgatttcgaatctggagtgagcatgtcgtgatgtcaccttcaattgaatgcacgccatgaaaaattagaggctgtgctcagaatgtcgccttgttctccagctaattaagcggtgaattcaaagaatgccactgcacagatacatagatacatatgtacatagatacatatgtagctcagatttatttggaaatgtgcttgtagtaaaatggctcagaaacaattaggtactccattttactcaacttaacttaagtttatgtcatatttcaaacaaactgaggtaacagtatcccgtatctatgaatgactcagtatatattaccaataacttgttaatatatgtatactgaactatctgtaagtcattttcgagaaccttatcgcatttcaagcaaattcgcagggcgatttcgtgagttaggaacactaagatcataaagctggatgacaggtgccgatgatgacacacattcgtggttgttttaggcaattaaatggcaataagcttttggcgacacagcaacaaaataagaaatcaaacaggtgtgcgcagtcagtcgacttgagcattgtgtttttggctaaaacaaaaggtacacgaaaagtgaaagctgaaagttgtagcccaggccaaaagcgacctgttgatagcaacatcttgttgttgtcccctttgtttttttttttgtgtgtgtttcttatttgctatctggtaaacaattaactgcacagcagccgcatatcaaaggttgattgaactgtcagcgatttgttgagatttgttgatcttggatcttggattcatgcattttccaaatggtgttcgtattcttcatttgacttatatacttttttttttagcctcgcacttgtgatccacaaatgttgtgcgtcacttttcaaaaataaaagagccagagagaaattcgtctgggaattatacgaattttatcttttctaagcataatttatggcgggctttttatttttatttttacttctgcgtatgcatacataaggtatatataacgacaagattggcatatatatacacatttgtatgtgttaatcagttcttatgtgcacggttggaaagttcttataaccatatacatataaccataatctttagttccatggcaacgatcaaattgccttgtggagcatgaaaaactgcgtagagagttgggtgcatctgggtatatcgatcggggcagcaacataattatttacttttcgagcgaaattcaatgacgcgaaacgccactgaaatggatcgagttcttggcctccgattatacggtctacggttcctagccgcgtctgcctcgtctgaagttcaatggaagccacagaaattctagtggtcgcacataaacaacaagatcgttagattacaaacttccaactacatatgtataaataatgttctttcttcgaaagcttaaagtttaaacaatacctgtaagctaatatcctcgcaatgtttaacaaatattccaattgtggtggtacaaatatatatatagttcgaagttaatggacaaccataactggattatctaatagaaggatcaatgcccttgaattgtatacatacatatgtatgccctcccttttgttggctaacaatctgttaacagggccaagacggagcttcaaagatgagctcactttcctgagcgccgtacacttagtcagcgtcaattacctaaaatgtacccaagcacacagtttgcaaacacacacgtatttgcatagccatgtgcacttagtgcagtccgtttcgcagctgtaaggcaagacgctaactgaaacttataactgaaaagggataagatttgaggtttcagaaaaagtgcgcccataagatagtagcaatatacaatttatatttccgatagtttaagttaactgctttcggctacaagccaaacagcctacgtttatggcatgcactgtacatgatgccacaacgatcgatcgcattttcatcaacaaaccgccaacaaacgccagcatctgtctaaagtgactttcggctcgaattccccagatctcttcgcctcccccgcatttttgtggttaacaatttcttgaatgacaccccgtatttgtgtcataatttccgcttttggctaaaacattcgtattaaaattaaaatccacgacaatgctacaatgccaaacaataagaatgccgtcggcagcttccaaaatacacgtcttacgtaattaggctattataaaaaaaatattctcgaacggcagggaccgcgaccaacaaaacttaataataaatcgttctctttccgaatttgcatatactcgtagatattccgatgtgtatgtacgtatatatgtatatagagcacacttggccatggaatgcatatatgcttggggcatcgcgtgaatatgtatggtaagtaaattgaggcaatgctgggtccaaaatgctaattgccaacgataagatacgaaagaagcgttatatttcgggggctttgttgttgttgttgttgttgttggtatgatttgggaccactgggcggatgagtatgtgtaatggtccgtgggcaaattaacgatcggcagtcaggtgtcaggaatcgattggcttatcagcaggagcatggctaccgaaaatatcgtcggtctgctcctctccgctcgcaaacaggtggtcgccacattatcgtccactttgttcggataacggtgcgtatgagtaacgagcgattagctatggcactcaatatattcgcagaattgttcgaaatgagtcacaatcggtgaaaacagtcaaaactgcagtcaaattcgaactatagtaccaataatctaatataatttagttaagctcaagaaacaaaagtcttaaaatagatagccatgaaagtggtcaagtttcccgccatttggcccaatttgaattatttatttaacgggcttaatacctatcaattggcatttgggaaacgagcagctgcaattacggccctgtttttgtggcaactctcaagtggagcacttttacatatttcacactgcgctgagacgactatcagcagactatcgcttaagggtaccgataagattagttgccacaaaaatatcccaatcgacaggcacaccgctaaccgaaaaagaaaattaactagccattggtgaaatcaaagcatatttgaatgacaagtatttgctttccttttttggtcagattagtatatgaattggaaataagtcctaccagaacatccgcaaattacttcgtcagccgtcagctaaactagcttagtcgcctgataatagccgattttcagaacagaaaatcaatatatataagttaataaacgacagcttattgtgacggtaatcatatcatcgaagcacccagcactcctcccatttatccgctattgattttctccgtaacaactgacgagcgcttaataatgcatttttcatgtgggtcccaagcacttgtcgttatcccttgaccttgtgcccaccaagcgttggcccattgagaatagagaaatttttgcctgaaaactttctacacctgagcaggtgatccatccgagcggtagttgagttaccccagtgcccactcatataattgcgagtaccttgtgttggcgtcgcataccgattgcatcgcccacactttaacttcattttgctgcggatttgtgggaaaaaagatagatcatacatagcttcgaataccaggccaaatgcgttaagtgtttaacgtctgtggaatacaagaagagggctatgagttgaccacatggccatggagctcacatgtttgcagttcctacaacttgtctacccctatcttatccgtcgtaagtctaatgagatcctgacatatgtacacacaaaaggggcaagtgcacaacacacttgttgtcgggcatattgtatacatatttgtgtaattgagtacacatcgaggctctagggtttcttaagtctcgagatatctcgataaagaatggtggcggaaggcaaactctagataaaaccgttcaatttatgacgataagagtgctatgaggaattctaacttttctctacaacaattatccaacgtatattttaatatttccctctgaaactttatgtttcgaaggctctatcagtttcgaggaaatacgataacagccaaattcggaaacttatgtctgaatttagcattccacaaaataatgtatgtacattatggtactttttcaacataatcgcattcctaagttctatttaaaccgacatttatgcatattttaaatctaagagtttagaaacatgtaatgtacataattttgatatgtttggaaatttggcccagtttttggtttcagtttttaaaagacttctactcaagtggatcgtattcaatagtttcgaaatatcatatgttgcaatattaagtattagattttcatttgttttataatgaattataaaaatatagtagtgatatatctcagctagttgtatgtactcacaaactccacaattttgatgatgcccggtatggtgcggaaatagtcgatgttgaggcgaatggcgctccagaagccgccaccgctgccaacggtcgggttcgctccacctggcggtccgttcgtcgttgttgttgttgtgcgctcgatattgacaacggtctcgaccatattgttgctgtttatagtttggcttggcttagtttcagtttcagtttcagtttcagtttggcgggcaagtttactttattagctgggcacaacaactatttttaaacacttgtcgcgatttttgtcacaataaaataagatgagaaaaataaccaccgctttctatatgttcgctggtcgatcggcagctactctatatatctatatctgatgtatatgaacgcgtgtgacgccctcgcgcgagttaccacccccaccccctaaacccccacgcctctaaacaaatcatcggacactcaaccgggaagacggcaactggaacaccgcatccggccgaatgctgacattccggccgaatgctgacattacacaaaagtcgcactgcaacattgtccccagctagccagccacatgccgagtcggcatgttcattatgcttacaattaagaacctatgtacttatgtataagacgaaaacggaggactcgagtagccactctctgacaataaacttcatactgattttaacttcaaga

SEQ ID NO: 37670 - DNA, 771 bp, DROSOPHILA
gagggcgtcacacgcgttcatatacatcagatatagatatatagagtagctgccgatcgaccagcgaacatatagaaagcggtggttatttttctcatcttattttattgtgacaaaaatcgcgacaagtgtttaaaaatagttgttgtgcccagctaataaagtaaacttgcccgccaaactgaaactgaaactgaaactgaaactaagccaagccaaactataaacagcaacaatatggtcgagaccgttgtcaatatcgagcgcacaacaacaacaacgacgaacggaccgccaggtggagcgaacccgaccgttggcagcggtggcggcttctggagcgccattcgcctcaacatcgactatttccgcaccataccgggcatcatcaaaattgtggagtttgtgctgggcatcatctgcatggccctggcagctcctccactggcctcggccacctcgttcttcatgttcgtcatcgtcatctcgttcatcatcaacattctgctgatcgccgcctatttcctgggcattcgcgaggccctcaacgtggccgtcaactggatattctcggagctgatcaccaccgctgtgctgacgctgctgtacttcatcggattcatcgtccagctggccagatggtcggatgccacgggcaagggttccggttcgaataccgccgccggtgtctttggactcttcaatttcctggcctacgcggcgggcacgtacttcctgttcctggcccacaggtccggggctacccactaa

SEQ ID NO: 37671 - protein, 177 aa, DROSOPHILA
MVETVVNIERTTTTTTNGPPGGANPTVGSGGGFWSAIRLNIDYFRTIPGIIKIVEFVLGIICMALAAPPLASATSFFMFVIVISFIINILLIAAYFLGIREALNVAVNWIFSELITTAVLTLLYFIGFIVQLARWSDATGKGSGSNTAAGVFGLFNFLAYAAGTYFLFLAHRSGATH

SEQ ID NO: 37672 - DNA, 2330 bp, DROSOPHILA
tccattcgacacgtatttgtttttgtggagtacaaactgtggaatgtttttttgagctgcgttgacattgtggcggcattctcgaaagttcgttatttacatatttagagcagggcgaatgtttccggttttcagctgcaagatcgtcgtcagcatcatcaatacttgcacgatgactgggcaaaaaaaacacttggcctccgtaccaatcatatgttggtttttataccatcgcccagcccaaaatggttccgtcgtttagcttaacttttattgatttagtattccactctacaggcctgacagctgttcaaagtgtcaaatatttatggatcctctgctcaagtgataatttatattttaattggcttgaccactgatcattcgatcattggatcttgaacttcagattaacttaccatttgaattgggtgatcgaggggctctagatacactgaattagcaattaaactgcctggcattacaatttccgccttcttccgggttttgtttaaatattactccgctgaccgcatttgaggtgaccttcatttgtcgatgtcttcatttacccagtctgattattatttaatcaacgatcaacttcttcagtggcttagcgaagcaaacaaaagatgccaccaccaagtaaacagggcagcctggttttgctgctcggtcccgctgccgaaaaaattggcccgaaaaaaaaaaaaaacaaagcacctgcctcaacatgccacgccccttgaatcgtctgcttttggccaggtttttctgtttatacttctttttcgcttaccgtcttatttatgcgagactcttttgtttatgtatcgttcatttgtcctcttcttcattgcaaactgcagtttacacatgacattatcatcgatggtcacccaaaagtttggctataaaaaggcctgatgccagatggagccatgtgcagtcgatatttggattaatcagcgtaatcatctccccagcagcagcaatcatgaagtacctagctctggtgagtatttggatataacatttggattaataattggattaaatgatttccaattaagtgcaacatatgaagttgtttgttgaagtatattaaattttcaatttgtactaaaaatctattgtaattcacatttttcagaccattttcgtgtgccttatggccatcgccctcatttctgccgtgcccgtggatgagtccctgatcggcgataatatctaccagcctgccttcgacgatgtccagcgtccccaggatccgcaggccatcttcaagctgaagaagctgctcaagttgaagaagctcctgggttaggagaaattcgcaataagcttcgttcagattctagtccagccaattgggaaccttgcctcccccactacattcgattttcaaaccgttttgtttagacaatacccaataagcacaaacacacaaacacacacaaaagcacatacatacgagtaaagtatacgtaatcgtaactaaaataaatgttattttcatacacgtcggcttttcttatatcatcgaagcgtcggggatgagatctccatgtgtgtccaaaaaggagctaatgactggcagcgggtcgggtttttgtttgcctagatctgaataagaaacccgtttcggatcgtttctgggtagagagtgtgaaaagcgaacggaatcttccttacatgcgtataaatattggccaatctcagtcgtaaatgaatcaagtgggttcaatgatgtgctaatacaaggagcccactgtgagattaatgatcatacctactttcattaattggcatgattagttaacttgatatgccagtaatattatagcttaactaaatataatatattaaatattttcaagtatcaaaattatgtaaaaagtaacgataactcatcacatattgacatattgagagctggtcacgaaaaatcggacatgattgccatcaagttgaagcacatggttccagcctttcaacttaccataaattttaacattcaggtgtattagtagtattaggaatgattttaatgtgatcgtaaaaaaagaaaattatttggaattgaaggttggacctcttcaaacaaaagacttaagaagcgaacttgttttttttttgggcaccattttgttttaaccttgcaataaaaaatgaataagtaaaggtttcgttaccaaatactttctttaatttcactcttgtttttcttcttaaaaacctaaacacatgttaagttaaactataaatccataaatgtgagggtgtggtgtctagcccaggaacagcagcttcttgagcagcttcag

SEQ ID NO: 37673 - DNA, 192 bp, DROSOPHILA
atgaagtacctagctctgaccattttcgtgtgccttatggccatcgccctcatttctgccgtgcccgtggatgagtccctgatcggcgataatatctaccagcctgccttcgacgatgtccagcgtccccaggatccgcaggccatcttcaagctgaagaagctgctcaagttgaagaagctcctgggttag

SEQ ID NO: 37674 - protein, 63 aa, DROSOPHILA
MKYLALTIFVCLMAIALISAVPVDESLIGDNIYQPAFDDVQRPQDPQAIFKLKKLLKLKKLLG

SEQ ID NO: 37675 - DNA, 2248 bp, DROSOPHILA
aagaagctgctcaagttgaagaagctcctgggttaggagaaattcgcaataagcttcgttcagattctagtccagccaattgggaaccttgcctcccccactacattcgattttcaaaccgttttgtttagacaatacccaataagcacaaacacacaaacacacacaaaagcacatacatacgagtaaagtatacgtaatcgtaactaaaataaatgttattttcatacacgtcggcttttcttatatcatcgaagcgtcggggatgagatctccatgtgtgtccaaaaaggagctaatgactggcagcgggtcgggtttttgtttgcctagatctgaataagaaacccgtttcggatcgtttctgggtagagagtgtgaaaagcgaacggaatcttccttacatgcgtataaatattggccaatctcagtcgtaaatgaatcaagtgggttcaatgatgtgctaatacaaggagcccactgtgagattaatgatcatacctactttcattaattggcatgattagttaacttgatatgccagtaatattatagcttaactaaatataatatattaaatattttcaagtatcaaaattatgtaaaaagtaacgataactcatcacatattgacatattgagagctggtcacgaaaaatcggacatgattgccatcaagttgaagcacatggttccagcctttcaacttaccataaattttaacattcaggtgtattagtagtattaggaatgattttaatgtgatcgtaaaaaaagaaaattatttggaattgaaggttggacctcttcaaacaaaagacttaagaagcgaacttgttttttttttgggcaccattttgttttaaccttgcaataaaaaatgaataagtaaaggtttcgttaccaaatactttctttaatttcactcttgtttttcttcttaaaaacctaaacacatgttaagttaaactataaatccataaatgtgagggtgtggtgtctagcccaggaacagcagcttcttgagcagcttcagcttgagcaggaaggattggtcgtcggatgggttgacggactcactgccaggaccttcgaagccatcgggaatggcctcctcgcgaggagcagcactggtggccatgaagcacacggcaaggcaaaggaagacgctctgtaaaggaagggtcagtaaagttccttggtattccgtgtcgatttttagtgacgcaccaggagcaagaacttcatgttgtatgtggctagatgtatgtagtaatcgatcgatggattcgcactgcgcgttgacagacctgcttgcactgatcaccagaccccgccgacccgtctatttatatgcctgttcagttgagagtgagttgctcggccggcagaccgctcgtctttcatagaaactaaaacaacgcgaagcatcagccaaagattcagtgattcacatgtcggcgggcggggtggtatatcaatctgtttggactattaaaagtgattttagtccaacacgcaatgtgataacaaaagccaggttccctttttcgtagccaagtagattaccttattgtggtgccattgttgaacttgcgacgccttatgtttgggcaatttgttgacttgcggtttctccggcttcacttctttttgctaatcggtgtttccttggttctgggttctatttgacttggccattagctgcgagcggaatctctgctaaatattaattagcaacttgacattggccttaacgttcagatcagccattagcttttcgttcacacctccataataggctagagtagctgaattatccgaatatagttatatttttaagtgtgtatgctggcagacggcgaataacccattgcgcaaaattgataagattttgagatttaaatttaagcaggcggtttgaaaatgccgacctgccaacttttcgaaattagctgcattgagtaaattaaaagtcgaatgtagagttatttgtaaatttctaaatatttcacatccaagctaaaatctgtaaaatcgaagtaattttattcttataattaaatgtgtttacattttaattaagatttgctttccataattatcaatcaagatttacaaaatggagtagaaaagaggaaaatacataaatctcctctttgattttcccacttttgaaaatttaaataaatagcgccaattttccagtgctgccactcttatcaaaaagtttgcaagagaacaaaaa

SEQ ID NO: 37676 - DNA, 189 bp, DROSOPHILA
atgaagttcttgctcctgagcgtcttcctttgccttgccgtgtgcttcatggccaccagtgctgctcctcgcgaggaggccattcccgatggcttcgaaggtcctggcagtgagtccgtcaacccatccgacgaccaatccttcctgctcaagctgaagctgctcaagaagctgctgttcctgggctag

SEQ ID NO: 37677 - protein, 62 aa, DROSOPHILA
MKFLLLSVFLCLAVCFMATSAAPREEAIPDGFEGPGSESVNPSDDQSFLLKLKLLKKLLFLG

SEQ ID NO: 37678 - DNA, 5997 bp, DROSOPHILA
catttattaaaaagtgatggaagtgcacaaaagccgccgatgatgacgatgacgagggtttcctggtttccgaaagaccaggaaacggaatcaaggtattgcaaattattattgcaaattttttgtcgtcccactgacagcgggtaaactgttaaaatgaatgacattttcaaggcgtttaaatgtcgcttggcaaccaaattcagagctatcgatgggcgaaaaggggccgtggcctgacctgacatctcgtcgactttttccttcattaaataaattggaattctttgctgcagttgggaaaaggggtgataacttcgacacggattgaacgaataaataagattgcataaattttaaatgggacataataaaaggttaaaagataaaacagtttcttaaaaatttagatatgatattaagatatgtttaatttgaaataaatttgtacaattgtaatctttatattggctgttaagcttcagtgtttctgtttgagatatggcaaaagtaaaaaaattacaactcaaataaatatgttaaatgattcccgctctagaaaagctttgctttggcgcattttataaactaaattttataaataattttgtgacaagcaattcatctcaagtcttttttaactctaacatacgtgtattgtacaattcgattttcatacgattttcatatgatcgttaatttatcttaagcttcgaatttcataagttctatacatacaatgagcattttattgttctgcaaaatacttcttctttttctttaggttttcgattttattttaataattttacaaattcctatagctgtgaaatgagccaagtttgaagcagttttgtttgttaattattattattggatttttgatatactttcagctatgaaatatgatgatgtacctaaactattcccccgtttttctagaccccctttggctgcattttccaaatgcttattgattaactcgaacgatttattgatttcaaagcagggtcagatagattccagagccgaacagcaatgctctatgaagcagcaggccagctaagaaaacaatgatttacatgacaattgtcacaggcaaaagactttccaggacttacccactgacgaggcggcgtactcattcggtggtcgttctgtgtagaacgtgctcttgcctatcgccaaggatcctttggagcccatcgatgatagactatttcccgccactcctcctggcaatgccgaggtctgcatcgaggaggaggacgaggccgccgaggaactgcctcccgaagatgacgaggaggccgagcctggatataaatcgttcttcatggcatatcccacatccgtttgcagggatttcgttgtgtcgttgcgtgatgagggtatgatattgtctggagattacaagtgaaattatacattttaataggcaagtatacagtagtcactcgatatgtattgcataatacatacaataaaataaaaaataattagtttgaatttaaagatatcaatgtaaacttccacttgctaaaactctgttaagaaagaaaaacctcctttttaatatgcctcgtgtcacacaaaattagtctatgaaaagtttcagtagccggaaatcgacaagaagttttcgttgctgtcgtttactgtttgttcacttgtgggtcactattggctagtaaaagttgtggtctcttaaacaaaacttaaccccacgcctgacatggttttcaagttaaattgcgtggaaatcttggctgcgatacaaaaaaatttatatcgtcgcacaatggagcgaaccaacacacatgcgactgcacgcacacacacaaacaataagatcctttgttggctgactcctggattaggttccgttgcattgctcgcgcgctgctttgccagtcactttaaataaaatatgcttggtcttttgctctgctctccagctctctgcagctacccagctcacgggctcaaagtctgcggcagtgtttcaaatgtgtttccaacctaatgcccccgaaaatcctcctccgccccagcataatcccgggcatattgctttgccccgagccagaggacgtggacttggacatgggacacgggtatggatgtggggagtggaagtggaaacgggaaaaggacacggccacgagcccgaacggagacttgaaagtgtgtgtacttttctgctcgacttgaatttcaacaggagctactgaagaacacacggaaaaaagttgcctacataaagaagaaaattatagggcatcactcataattttatttaagaataatttcaacaatgtatattttaaggaaaatggtaatatattaatattatttataaaaatagaaatattttttttagcattgatgtaagctacaaatgcagaaaccttttctcctattgtaaatggagctggagaaaggcgaaaaacccccgtcgctgaaatagtcaaaagtgctttagtttatctctaggtgggcgtgtgccacacccccatctcccatctcccaccggcaccccaacccctcctcaatcccttagcacaagccctgtttgtggatctgtctggcttagctgctactttcgcagttttgtttgtggctcgccgtatcctgtatccttcactttctgtgtgactgtgcgagtgtgtggtgtgactttcacgctcaacgctgaatgtgttgagcgcaaatacgcagcattctacacctgggggtggtcccacccagcgcccaccacacttcccccccccccccaatttccacacacacttttccgactgatactatacttactctccctggactcgacggtggtgtgggtaacctgcttggatggtgtggatggcaaaggtatttctgcaaatggaattgaataacattgcataattaataattagaaaggcattcaagcagcattagcccagcggccaacggcaaatatataataataaacaaaatggtttttcattacattacgctagcggaattaatgtagcttgctgtgcgttggttaagtgtgtcaagtgtgcggtttttctacaggtaaggtcaaacgtacactttcctagcttcagtggttggcgatctcgacacaaagagtgcataaatcaaagaaactcagcttttagttaaaagccacgggggctttcagtcataaacataattaggctgcgaagttataaccgaactaattactggaaaatcaactttaaaatgttcggttgcccatttctttcagcaacagtaggaaaggtaaatatctgaaatctagctacaagcattaattgttattaaatttaaacgattggcaatgaaccccaaagcaaaggataacaacgaaagagccaagatcaacgtgtttcggggataacctttgggatagaacaactttagcatttgccatctgcacaagtcgagcagcaacttgtaaacaggagaaaagccgagaaaacaggtaaagtgcataaaaaataaataaataaatgcagtcagcgcacacgtatatacacgtatacatatactatatgttcgggggcgactccttgggctggcaaacgatacaaagtcaaacaattccgaaattcacctttattttccgtttacgtttatggtgaatgtgtctccgtgtggccacggggcatgaggatgccgggctgggtgtggaggacatggggcagatgaagccagacagaacccaccagccactagccaccactcgtttagttttacgctccggaggacaacgtatagtgcacatatactcgtagggtcgtgtggattcagggtctataggtaaaagcttttggcaaaattgtgccacaaagggcgaacgatattgcattgctcggggtgtgtgtaagtgtgtgtgtgtctgtgtgcttgtgtgtatatttgccgtaactagtgcacttaagtcaccaatacacatgcacttaccgtaaacacgtatggagccttccgtttcccccagcgagttcttcgagatgcatcgatagttgccaaagtcaccatattgtaggtttcttatcgtcagcttcatgtgggcactgcaagaaggatacgttaagcttaaggatatatccatggagcagcttatcttcccgacattccgaaaggggggctaaaacatttgcacttgcacctgacccccaaaaaaaaatgccaagtgcaaatggttgataaatatttaagaacacaattttcgatgtagttcgtttttatattccttattctgtttttgtccaaaagtgacttaccgataggagttctccgtgtagtcggttttatactttttgctcggcaacaccatcaccgaattgtatacccaatagataatggctctgcgggcaaggaagaaaaaacatttcgaatcgaatgtaaacgaaactaatcaaattctcaaatgaaagtaaatattttaacaaaatcaaaggcaaatcgaatgaacaaaattcaacagagacacatcgaccacctgaaatatcaacagatgcacacattcatctgcaatcagatgcaatgtaaaatttgtttaatcctataaaaataatgtggaagtgactgaaaatgtaaattttaaacaaattatttcaaagagatattgcaatttaagagattagaaatttatcgaaattttattcgttcattcagtttaagaaaataacattaaattgagaactttgaataactttccttaataaatcttttgaacggctttcatacataagctaatcccattaaagaaaaattgttgaatagactagatgcaacagaaaatccaaaataaacctgtcattaagctaaaatgtgtgatacatgaatatgaaaggaaataaatatacagcaaaaggaaaagtaagagcaaaacgaaagcaatccgagtagactcacttgggatgcgcctccgtgtggcaatcgatggttacatctgtgccggatggggcgccaacaagttgattcggcacccaaatcattggcgagactgtggataaagagagatggaaacggaaaagcaggttgatatggtacgttagcgaatgtaaatgacacctgggggaaaattcaggtgatacgaaggctgggaaagtgccgctgcaaagcacgcataagcgacagaattacgcctgttcaacattttgtgtgtctgctcttctttttttttttttgctatgcgccagcttaaaatgaaagtgcaatgacaaagctggaaacttggacgagaaatacaatatggctaagacaacacgtcagtgaaatgagggtactagaaaaatagattaagttttgcaggaagtacgtgctgcggatgaagagatgcccagaccaaaagaaaatttgtatacgtattgtatatattcttgcagcatgtacccctttctcaacttaattgcaaatatctctaatgacttctaagcgctctatcaaaagattttatacttttaaagtttctcgaaaataacgtgtcggctagccgttttcaatcatacctcttaagtccaagtattctcagcatattcagctttcattttatttaacacgaaatatgttgatatttttttacgctaacctcaatgagaaaagcaaacgtgaaaccgaaaccgaagaaccctttttcaaacgtgcaacataaatgaaaaaagcagcatgctggttggaaattttagaggctcctgacaatgcctacacctgcaatatgaggatttctgctcgttttcaggtgccccgcccccttttttaacgccccccttgactcagccacgcacaaaaccgttcataataaaatagagagaaaaatacacacacacacacacacacacggcgaaacagaaaaacgccgtcaaagtcatacgtgcaacgccgccaagtgactttattgcaggtacgtgacgtgaattattgtcaaggggggtgcagattggtggaccaggggcgtagtcaggggctgaaactcgttaggattaacaagcgtttact

SEQ ID NO: 37679 - DNA, 867 bp, DROSOPHILA
atgatttgggtgccgaatcaacttgttggcgccccatccggcacagatgtaaccatcgattgccacacggaggcgcatcccaaagccattatctattgggtatacaattcggtgatggtgttgccgagcaaaaagtataaaaccgactacacggagaactcctatcgtgcccacatgaagctgacgataagaaacctacaatatggtgactttggcaactatcgatgcatctcgaagaactcgctgggggaaacggaaggctccatacgtgtttacgaccctgaatccacacgaccctacgagtatatgtgcactatacgttgtcctccggagcgtaaaactaaacgagtggtggctagtggctggtgggttctgtctggcttcatctgccccatgtcctccacacccagcccggcatcctcatgccccgtggccacacggagacacattcaccataaacaaatacctttgccatccacaccatccaagcaggttacccacaccaccgtcgagtccagggagaacaatatcataccctcatcacgcaacgacacaacgaaatccctgcaaacggatgtgggatatgccatgaagaacgatttatatccaggctcggcctcctcgtcatcttcgggaggcagttcctcggcggcctcgtcctcctcctcgatgcagacctcggcattgccaggaggagtggcgggaaatagtctatcatcgatgggctccaaaggatccttggcgataggcaagagcacgttctacacagaacgaccaccgaatgagtacgccgcctcgtcagtggctggcctgctgcttcatagagcattgctgttcggctctggaatctatctgaccctgctttga

SEQ ID NO: 37680 - protein, 288 aa, DROSOPHILA
MIWVPNQLVGAPSGTDVTIDCHTEAHPKAIIYWVYNSVMVLPSKKYKTDYTENSYRAHMKLTIRNLQYGDFGNYRCISKNSLGETEGSIRVYDPESTRPYEYMCTIRCPPERKTKRVVASGWWVLSGFICPMSSTPSPASSCPVATRRHIHHKQIPLPSTPSKQVTHTTVESRENNIIPSSRNDTTKSLQTDVGYAMKNDLYPGSASSSSSGGSSSAASSSSSMQTSALPGGVAGNSLSSMGSKGSLAIGKSTFYTERPPNEYAASSVAGLLLHRALLFGSGIYLTLL

SEQ ID NO: 37681 - DNA, 2119 bp, DROSOPHILA
gtccgccatagtgctcatagagcccggccatctttattagtgaggagcaggcggccaggttgcggacggcaggagaggtcttacctacgaggagagaagtaagaatgacagatggacgatatgaagaagtcatatcactgatcgaagtcaacataggactcagggagatgaccgttcggatgcaactgctgatcttacacaacataattgacgctctggtattgggttgggatttcctgacgagagtgggagcatgaatggactgcgccggactaagcgtaacaatacaagtttgttcagcggtgcaaaacaggccacgagaaattgtcagtggcaatcgtggagaggcctgcgaacttcttggaggaagatgtggacgaattcctgaggtcggagttgaccagtttagaaaaccatggcagtgcaccgaataacaatgaaggacgatcaaccagtcaagcaacggtactacccgaaaaaccctaagatgcaggtggagatcaacgccaaggtcgaggagctgttcgaaaaaggaagtatcgagccgtctagaaacctgtacagctcaccgatagtgatggtgagaaagaaaacagggcaatggaggttatgcgtggatttccggtagataaatgcaaatgaaggacgcgtacccgatgccgatgataaattacatcctggaccagttaagggaggcaaagtatataagcaggctactcttcaaggacggacactggcgaattccgttggaagaagggagccggcagtatacggcgtttacggtgccaggaagagtctggcctgttccagtggagagtgatgccgttttgcgtcggcaacgtttcaacgggcattggaccaagtgatattgcccgaaatgatgccgcacgccttcgcatatcaggacgatattacgcccgcaggcaggcgtcgctggacgatcagcggtggagggaagtgccggtggaagactggccactccgggtggcagaagaggctgcgcgccatggggcgcggaagcgaaaggtgcactgggccaagctgttcgagctgggcgggcagcgctatcgcctcatggtgcggagaggcggagaagtaaacgtcgtaatgggcgaataaaacgccgaacggcaagaaacaaggtatggccgggttttcataaacgggcactggcacaacactttaaaaaaattggttcgggtcatccgcagcagccgtagtagcgtgcgagggggtgacgcggggccaggcacgcgagccggcgaacgacgcggggctgctgcgggcgtgtgacgagggggggcacttccagatgcaagcgggcctcctaggcgctcggggccagggacagccacaccagagcatgaaggggcatacatgcataagtggagctggaaaaggagagattaagtcaatatagcggtcgcaaaaaaccgcaacacttacctttcattgagctgctacaccgaatcacgtgtaaaagaagcattgggatgagggcgccgtgataatggcggtcgatcgatagtgtgatcaataggggaaaatactggataagcacggattctcaaaacgcggccacactatgggcaacgagcacaagatggcagcgccggaatatcggtaatggcaacgccgctcacctatatcgataatggtgagtttggcggtgttaccgaaaattaatgagtggaaggcgggaattttcaaatattgaactggtggagaggagcagacagcagcagcagatggaagctggaggaagaccgcgaggagtttggcggtgttgccgaaaattaatgagtggaaggcgggaattttcaaatatcgaactggtggagaggagcagacagcagcagcagatggaagctggaggaagaccgcgaggatcgaggagctggagccgagacgccgaacgatagggtatattaggctgagacggccgggcctaggtcatgaaggcgcgggtcgatgagaggaggacggagaagggtatgtgaagggtcaagataccccgtcgagatgcctaacgacaggctgagaccagaaggaccaggtcaacagaaggagaaggttgaaggaacttcggagctgcctatgcgaggggtcaccggagcag

SEQ ID NO: 37682 - DNA, 474 bp, DROSOPHILA
atgaaggacgatcaaccagtcaagcaacggtactacccgaaaaaccctaagatgcaggtggagatcaacgccaaggtcgaggagctgttcgaaaaaggaagtatcgagccgtctagaaacctgtacagctcaccgatagtgatggaagagtctggcctgttccagtggagagtgatgccgttttgcgtcggcaacgtttcaacgggcattggaccaagtgatattgcccgaaatgatgccgcacgccttcgcatatcaggacgatattacgcccgcaggcaggcgtcgctggacgatcagcggtggagggaagtgccggtggaagactggccactccgggtggcagaagaggctgcgcgccatggggcgcggaagcgaaaggtgcactgggccaagctgttcgagctgggcgggcagcgctatcgcctcatggtgcggagaggcggagaagtaaacgtcgtaatgggcgaataa

SEQ ID NO: 37683 - protein, 157 aa, DROSOPHILA
MKDDQPVKQRYYPKNPKMQVEINAKVEELFEKGSIEPSRNLYSSPIVMEESGLFQWRVMPFCVGNVSTGIGPSDIARNDAARLRISGRYYARRQASLDDQRWREVPVEDWPLRVAEEAARHGARKRKVHWAKLFELGGQRYRLMVRRGGEVNVVMGE

SEQ ID NO: 37684 - DNA, 2632 bp, DROSOPHILA
aaagacattgtctttgaaaagcggtatgttgtgcaaacggaactcagtagacggaaagtgcgatagattacttattcaactatgcgtcaagatccaggaactgagtggcctttttggtgcctattatggaatgtgcctaacctaaagctaccaaccttaagtggaaattatactgaatacacatgtggaaaacatgtgtcgtcgataaaaacccaatactggctgacatatagaagcttcaacacctcaagtcttgcctaagaggtcccgctttggatgccgttggtgctttagttactgattaaaattacccgtctgccctggagttgttggataagcgctacaacaataagcggcttattttcgagtctcaaatttcggcgatcatgaacctaccaaatcatcttctgtaaagctgcgtgaactgtccgaccaaattaatttgcgtttacgggcacttcacaacatgagcacccccgtggaaatatccgagtgtattctcatttattgtcttctccaaaaggacgaccgtgaaacccagctattatggatggatgctgctcccactaaaggtcttcccgtctgtagtaaatttgtcaagtttttggagacaaggtgccagaaatttgaaaacacttcgaatcatgccactggttgtaaaatctaggaaagccatccacaactctagaaattcatttgtcgccactacccctgttgtttgctgcccgatctgtaatgctgtagaccacataaattttgatttcccacaattcagaaaactgtcgcctcaagatcgcttacaggaggcaaaaaggttggctttatgccaatactgccttcacctacgacattgtaatgccgatcgctgtcgtatttgtggatgtaaacacaacaaattgctacatttttgctcaaggctttcgtcatctcgctcccagcctgcttaacctcagctaccttctgatgctcattccggattgcaagtatgagcatccaatcagaatccagaccagacattttaagtactataaagataataaagttatagttaaaacacatacaatggccagccccgtggaactgctcagcctctccaatcccgtattcaagagtttcaccgtttgagtcgaaattttggggatcaatatgctgttgatgagccttctgacagccatccagcgtttcaagacgaagaccttcgccaaccccaaggacctaatgtcccccaagctgaaggtcaagttcgacgatccgaacgtggagcgtgtgcgccgtgcccaccgcaacgacctggagaacatcctgcccttcttcgccatcggtctgctctacgtcctgactgatccggccgcctttctggccatcaacctgtaccgcgccgtgggcatcgcccacatcgtccacacactggtcgacgccgtggtcgtggtgccccagccttcccgagccctcgccttcttcgtggccctgggcgccaccgtctacatggccctgcaggtcatcgcctcggccgccttctgagcacataggtctagtccttcttgtttttttttaaagcattttgaattaatttctttaatatagagttacgcctacctcggctttgttgctgttggatcacaaaaaaaaaaatcatcatcgggtcaattttccttagtggcttaagatctcggagcagactttgtgttgttggtcactgccgtcatcaatattcaaaataaatccggatcttgggttccttgtcgcgccctgcttgattccggctcgcaactacacataatcacctctcgtctggcacacactttgcaattgcccacgtacaagtctgccgctacaggaattggtgaatccagatttagatcagatgaatgtatggtaaatattaatctcaaatctcaaacttcagagttcgttggcaacatcgcagctttggtagttcctactatccaaacaaccagctcaacctaactgtaaattatgaagactggaaaatatcagctaatcttcgcttggccgattaccaattcttaagaccccaaaaaattgacttgctgataggcgctagtcttttctttgatctgctgtgtgtaggccaaataaaattgcccgatgcacttcccattctcctaaaaaaccgttttggatggattgtcactggtggtggatcaaagcctaacaaggcttcatcattgaccggtaaatcaaatgcgtctggaggaactggtgggcaaattttggtagacagaaaccattgctgaatccgtctctaagcgctcgaggcccactgactgcgaggcccacttcaagtctacattttctagtcttccatctggagaatattcagttcgacttcctgcaaatcacagcccggtagtgttaggaaattcctatcgacaagcctatcgccgttttttaaatctgtataagtatttaagcttgataccgtcacctacggaacagaagcagattcccgattcagaaaatgattcctttcttattcctttctgctattctccacatcgcccatgaaagcagttctaaaatccagcaagcgctctgtcctgtctacaattgctcgctcttacgaccctcttggtcttatctgccccgtcataacgaaggccaaagttct

SEQ ID NO: 37685 - DNA, 632 bp, DROSOPHILA
gaatccagaccagacattttaagtactataaagataataaagttatagttaaaacacatacaatggccagccccgtggaactgctcagcctctccaatcccgtattcaagagtttcaccgtttgagtcgaaattttggggatcaatatgctgttgatgagccttctgacagccatccagcgtttcaagacgaagaccttcgccaaccccaaggacctaatgtcccccaagctgaaggtcaagttcgacgatccgaacgtggagcgtgtgcgccgtgcccaccgcaacgacctggagaacatcctgcccttcttcgccatcggtctgctctacgtcctgactgatccggccgcctttctggccatcaacctgtaccgcgccgtgggcatcgcccacatcgtccacacactggtcgacgccgtggtcgtggtgccccagccttcccgagccctcgccttcttcgtggccctgggcgccaccgtctacatggccctgcaggtcatcgcctcggccgccttctgagcacataggtctagtccttcttgtttttttttaaagcattttgaattaatttctttaatatagagttacgcctacctcggctttgttgctgttggatcacaaaaaaaaaaa

SEQ ID NO: 37686 - protein, 121 aa, DROSOPHILA
MSLLTAIQRFKTKTFANPKDLMSPKLKVKFDDPNVERVRRAHRNDLENILPFFAIGLLYVLTDPAAFLAINLYRAVGIAHIVHTLVDAVVVVPQPSRALAFFVALGATVYMALQVIASAAF

SEQ ID NO: 37687 - DNA, 3835 bp, DROSOPHILA
gtaattggcattttaaatgataaaaatagatcatttacatacatcatattaagtcaaatgacttaataaatataattattaaagaaaatacaagggaattattataactactataatttaaaacacaagttttacaaatagaagacattacattgagtaataaatatttcataaaaataatacgtattagaaataaaaatttataaaataaataaaaatttaaaaactgtttactgcaaaagtcatatcttgaggcacgaaatgcggacactagccctcaataatgccttttaaatttttcacacgtcgcaagctgaatactctaatgacaaatattctaatatcaagtcatttttgaaatttattgtgatataatgtacatagattcggctatttctaagctatatttaaataataataacgttaaggcaatgcaaaacaattttttacatgatgccaattgatcgaaatattgatttaaagtctatgaacttctaagatgaagggcatattttataaaattcgcaatgcatgagcacacatacagttgtcggctgtcactgtataagcagaaaagagctgttcgctttatagctctccgctctctcgctcttgaacaaaaattggagagagtcttgagccatctctagagccgcggcgaaaaaattgtgtgcaaaaaaattgtatggcgttacgcatcttgttattctagtgtctttggtctgagccaagttagccggcggaatggtctgcgtctgcgccgcttcggccggcagaatatccaaacctgacgaaaggtataaaggcgcaaacctggcaggaggtataaaatgcaacacttaactggattgtctgtaaacaactatattactccaggtggcagccacacatgtggaaatccaccctcggctaatcccgaggcaagggcacggattctggaggccaagcattctccccaaacccaccccgacggcggcacacttggccgtcggcctaagcaatgcaacaagtgcacccacaactgaagaagaaagtttggtttttggctcctaaggagccctccctagaacctgagcgatggcaaccccaagaggccattagaagcgacatcccccctaccagagctcaactagcgaagcggttaaagaccgcccagctaggaatcgaggagataggagcaatcctggacgaccttctgacgaaggtcaaccacaacggggtgaggagcgtcaacctggcaatgaaaaactcattctccagattgaaggagctccaactaaagctgcgcacaaggctgccggaggcggaggactcgcatgtcggacgcacggctagaatagatgctagccaacagaccacccctaagcgcccctccaaccacgaagaaccgagtatgggaaagggaggaaagaaagcccagctatccgaccaccagaaggcagcgggaccccagcgcctacttagggctccgccccaagccactgcagcgggaagtaagccacaacccagaatgcagcaacgaaggagaggcctgatgcgctggttatcaccccatcagctggcttaccgtacagcgaagtgctgtcgctggccacaagagaccatgacgccaggctcagggccattggggaaaacgtaacgagggttaagagcacggccaaaggtgaactgctcgtcgagctatgtgcagaagctcaaggtagacatgggagcggtgctaggagaccgcgccagaattcgcgcggaaacacaatcaaaagtatttttgattcgcgaccttgacgagcttacgactaaagacgagctgaagagggtcctggagtcccaggcagagattccagcagcagtggtggctatcaagagcctccgtcaaaggcagtaggagggaagactgcggtaatagcagttccagccaatctgggggatccgccgataaagcgtggtaagctgagggtaggatggtcccaaagtctgatcaaggaactggagccacgccaaagatgcttcaaatgcctggaggaaggccacataacggcccactgtagaagcaccgtagacagaagccagtgctgcttcagatgcgggtccgcgggacaaaaggccgctgagtgccccaacgaggctaagtgcttcctgtgcgcaagcaggaagcactgcctctccgctagacgtcgctatcaacgcgatagaagtgcggagtcctttgccgaactctaatccgagtatagagcccgcaggaaagcactcaagataaccatacgggagatcaagcggaaatgcttcctcgacctatgcgattctgctgacagcggcccatggggaagtgcctacaaggtggtggtcaagaaggcatatacgaggactcccaagctactggacccagcgttgctccgaagtgtatcgaaacatctgtttcctttcatggatgggttacgccccgccgaaccagccataggggaccatgtcgaagccgacgccacgatcaggagtgaggagatcctggagctggcgaaactgctgaaggacggcagggcccccggacccgatggcattccgatcagggcgcttcgccttgctctctacctccagccagactcgtttgcgaaggaattcaccaagtgcctgactgaaggagtcttcccaagttgctggaagatacaaaagctgttgctactcccaaaaccagggaagccacccgaggagcctttgtcgttccggccgatatgcttcatcgatggaactgacaagctcctggagaaactggtgtgcattcggctagagagggctatcgctgacgcgggtgacctctctcagtcccaatatggcttcagataagcgcggtccaccgtcgacgccgtcaacagagtggtcgaagtagcggctcaagcaatcgagggcaccagatggaaggggggtagcaaagagtattgcctcatggtgacactagacatcaggaacgccttcaacacagcgaggtgggatcggatcctagaagcattaattggctacctagtcaggatcattcgcagctacttcgcagctcggttcttgacccgcttcattggaacgccatgtatgacgggatacttcgcctatcgctggttggtacgagcgagatcttaggcttcgcggacgacgtggctttgctcgctgttgaaaagcatcactgtaaggctgaggagggaaaagtgtaacagaaacttcatggccattaaacaatggctcagctcaatggggctagagctggagccaaagaagacggaggctgtactgattagctccaggaaggcagtggagacggccactgtcgtagtaggcagtacctcggtgttctcccctcgtgcaattaagtacctgggagtcatgatagataccatgctttcgtttcgtgaacaccttgccgttatcaaccataatgttgaacacccaaggcctaaaacaggcgagtagacggctgctgacgggcgtcacccgcgcgaccatgctatatgccgtcctggtgtgggttgaagcgcttgaaacagaaagctacgccaagggcctaaatgctacccatagactgtcggcactacgtatctgctgcgcctttagaacagtgtccaacgaggcgccattggtgatcgcaggcatagcgcctctaaacctatcagcgcaggaaaacaaagtggtcttcaaccaaacccacggtagaagtctctccccctgcgccaagaggtcaatacgagcagaagcaaggcagcaccccctagagacatggcagcacaggtgtaacaatggactaaaggtcgctggaggcagtagctgattcctaatctcaagccgtggatagaacgaa

SEQ ID NO: 37688 - DNA, 1485 bp, DROSOPHILA
atgcaacaagtgcacccacaactgaagaagaaagtttggtttttggctcctaaggagccctccctagaacctgagcgatggcaaccccaagaggccattagaagcgacatcccccctaccagagctcaactagcgaagcggttaaagaccgcccagctaggaatcgaggagataggagcaatcctggacgaccttctgacgaaggtcaaccacaacggggtgaggagcgtcaacctggcaatgaaaaactcattctccagattgaaggagctccaactaaagctgcgcacaaggctgccggaggcggaggactcgcatgtcggacgcacggctagaatagatgctagccaacagaccacccctaagcgcccctccaaccacgaagaaccgagtatgggaaagggaggaaagaaagcccagctatccgaccaccagaaggcagcgggaccccagcgcctacttagggctccgccccaagccactgcagcgggaactggcttaccgtacagcgaagtgctgtcgctggccacaagagaccatgacgccaggctcagggccattggggaaaacgtaacgagggttaagagcacggccaaaggtgaactgctcgtcgagctatgtgcagaagctcaagagggtcctggagtcccaggcagagattccagcagcagtggtggctatcaagagcctccgtcaaaggcagtaggagggaagactgcggtaatagcagttccagccaatctgggggatccgccgataaagcgtggtaagctgagggtaggatggtcccaaagtctgatcaaggaactggagccacgccaaagatgcttcaaatgcctggaggaaggccacataacggcccactgtagaagcaccgtagacagaagccagtgctgcttcagatgcgggtccgcgggacaaaaggccgctgagtgccccaacgaggctaagtgcttcctcggcccatggggaagtgcctacaaggtggtggtcaagaaggcatatacgaggactcccaagctactggacccagcgttgctccgaagtgtatcgaaacatctgtttcctttcatggatgggttacgccccgccgaaccagccataggggaccatgtcgaagccgacgccacgatcaggagtgaggagatcctggagctggcgaaactgctgaaggacggcagggcccccggacccgatggcattccgatcagggcgcttcgccttgctctctacctccagccagactcgtttgcgaaggaattcaccaagtgcctgactgaaggagtcttcccaagttgctggaagatacaaaagctgttgctactcccaaaaccagggaagccacccgaggagcctttgtcgttccggccgatatgcttcatcgatggaactgacaagctcctggagaaactggtgtgcattcggctagagagggctatcgctgacgcgggtgacctctctcagtcccaatatggcttcagataa

SEQ ID NO: 37689 - protein, 494 aa, DROSOPHILA
MQQVHPQLKKKVWFLAPKEPSLEPERWQPQEAIRSDIPPTRAQLAKRLKTAQLGIEEIGAILDDLLTKVNHNGVRSVNLAMKNSFSRLKELQLKLRTRLPEAEDSHVGRTARIDASQQTTPKRPSNHEEPSMGKGGKKAQLSDHQKAAGPQRLLRAPPQATAAGTGLPYSEVLSLATRDHDARLRAIGENVTRVKSTAKGELLVELCAEAQEGPGVPGRDSSSSGGYQEPPSKAVGGKTAVIAVPANLGDPPIKRGKLRVGWSQSLIKELEPRQRCFKCLEEGHITAHCRSTVDRSQCCFRCGSAGQKAAECPNEAKCFLGPWGSAYKVVVKKAYTRTPKLLDPALLRSVSKHLFPFMDGLRPAEPAIGDHVEADATIRSEEILELAKLLKDGRAPGPDGIPIRALRLALYLQPDSFAKEFTKCLTEGVFPSCWKIQKLLLLPKPGKPPEEPLSFRPICFIDGTDKLLEKLVCIRLERAIADAGDLSQSQYGFR

SEQ ID NO: 37690 - DNA, 3688 bp, DROSOPHILA
aattcctacagcagctacactcccaatgcggcgacaacaggtatgaacctgtaagtttacttttaatattacaatattaacaatattaggtagagggacttacatcgttaattttttttttgttttgcttgctttttatttgtcttacgcaatatcactgcgaaatatcgtctttgtactttgttcaaatatagaccgttactgtgatctgaagacttatggccaagaagagttagatacgcacgaaaaagtgaaattctcctgattaacttatctaatgcgtatcttattcatcaatcaaaaggcagtccaaaacaaaaaacttacatgtaaaaaaaatgttgaaaattagtctctgttgaaatcgtatacatcgtttaaagagtataaaaaacacgaatttggatagtttttcaagattaacaaaaaactaaactaaactttttttaatttgggggatataaaaaactttggttgtacgactttttcaaaattcaaaaattaggtatgatatgaatctctatgtcgagttagtagtgcaaatcaggaaattcagcattgattacgaagcccatgcccagttgactagctgcaaaatgtcgtagattaatataagttttcatagagttaagtaagtaaaggctctaggacttatgaaacttcatgtgcgtaccacttagtgcttagttagacacgcggactgacacgtagtatcaaagcaactaggagaaatccgaaagtgactactagagaaaatttgtctgttgtatgttgtttatgtactctgtgtcactacccaagtcgatatggacgcaaaagtccatctgtctagcaagttgagactaagcatgtagatgctgtagcggctacggatcgcgcttatttgtttcactgctactccccccactccttttccaattttcattttacatcttacattttacttatttttaatcctatcatttgtctcgtcaatttccatcgatatgccagaaatatcatgaaatcaaatatcgaaagttggttttattaaaaatataaatttaaataaaatccaccgcactcatatttgctattgcgttctgttctttaattaatagaccgaaggcgctacttttccttttatttttagtaaagaagttcataaagaaagaataatgcgtgtgatgtttccttatgttcacgtttatgtttactgagaaacataagttgtataaattgattatgtcactactttaatatatactccgttaatatacatacatacatatgtatgtatacctgctcccgcatggggaatgctctttgttgttcttttttaaaaacttccaatacctaagggtaactaatctgaaaaaatatatatattttatataagcatgcgcagcttctcggcagcagctggaggtgcaatcagccgccgaactgcagcggcttcgtcgccggagtgaaggcgacgcacccacgcaggagaagcattattccaaggagcaatcccataagtccaactcgcattcagttgaagctgtagacagtgcccagccaaataaccccaaagagagccggcgggcatcgttgggtgaccccgccctcgcagctacacggtcggacataggaagcggacagctgcaactcatcgagggaccgacgacgggctttggatcgggacaacatgttcgctgccgcaacaccaagtgcgaccagagtacctctcccagcgatgcaaagaaactctacaagtcgtgccacaattgttcccatttatactgctcgcgtgagtgtcggcgggcacactgggaaaagcataggaaagcttgcctgcactcgcgtgcctccaatatttgtcgccaggtgctggccacgtgcaaggacgacatcgactcgcagcgccatctaagtcttttagcccgcaaaggcagcctgtctcagggacgtggcgttgtgcgtgtgctttttcgtagtgccgaggcggcggaaggattcattaagaacgggttccagtgcatgggggaggcttcgtacgtacgttggccagaccttatgcccgccgagatgggcctggagttatactcagagcttcttaagctcagcacggagtacaagccggaaaccaaaatgctcatttacgttgctatttgcgtggtatccgaggcaccgggaatgggacaggcacctgtgcgctgggaacgccaactggtgagtcgttgtgccaagctgaaactctgcaagacagttctggctgaactagagcaacatcaggcggcgctcctgcaaccggtgtctgttgtggcagtgccggagcggacggaaatcctcattctaactttcaatcccggacagcatagtaatagagagctgatcctttcaaatattctggatattttgtctaggcgcggcgtcatgctaagcaaacactatccggaggtcttcgagcgcctgcaaacgtactctgagggacagagtgataagtttaatccggtgacactgcatccgcgggacacgcaaactgggcaaaactttgtatgcataattatggcggtgcatacggacaatgagctaacgaagcttccatcagcagcggatggcggcaatcgagttactaccatagatgtaggatctacttcggctcttgtgcaactggaactgggcgatgatcagatttgcaaaaccaaatccagggaaagttgattaagagcttacaaaaatcaaaacaatgagcttcggagagcaaacgctggcaacggtcactcttttcattccggccatttcaacgaccccttggggtgtcccatagaaagtacccgcatgtaaggaagcattattcaaatttcaattatgaaattgatcatattttcaacctaaaatctggctaaattcgtttattttattccactataaatcccaaaaattattcaaagagttattataaatacccgttactcgtagagtaaaaggttatacaagatacgttgaaaagtatgtaacaggcagaaggaagagtttccgaccatataaagtatatatattcttgatcaggatcataatccgcgtcgatctggccctgtccgtctgtctatccttatgaacgtcgatttaggaactataaaagctagaaggttgagactaagcattcagattctagagagacagacgcagcgcaagtttgttggcccatgttgccacgcccactctaatgcccactaaccgcccaaaagtgccactcccacacttttaaaaaacgtgttgatatattttaatattttaattattctgaaagatttctatcgatttgccaaaaaacattttgtcacggtcactctaacgccaaaagtttcccaaaactgcaacgcttttgaacaattaaaaaattttttctcattttcttcaccaatatctatcgatatcccagaaaaattattattgaattctcgcgttcgcatttgcactagttgagtaacgggtatctgatagtctgttaagttgactatagcattctctcttgttttgtgttagtgtcattaaaaagtgatgagcaaattaaaaaatgaatttcttttatagttagtaaaaacatcaaaagagcaagttctagctcgaaaagtaatttacaaatggaattgaaagtttgtttgaataataagtatttgattaagaggactgtgaaccaaatacattttgctgaaattat

SEQ ID NO: 37691 - DNA, 1320 bp, DROSOPHILA
atgaaatcaaatatcgaaacttctcggcagcagctggaggtgcaatcagccgccgaactgcagcggcttcgtcgccggagtgaaggcgacgcacccacgcaggagaagcattattccaaggagcaatcccataagtccaactcgcattcagttgaagctgtagacagtgcccagccaaataaccccaaagagagccggcgggcatcgttgggtgaccccgccctcgcagctacacggtcggacataggaagcggacagctgcaactcatcgagggaccgacgacgggctttggatcgggacaacatgttcgctgccgcaacaccaagtgcgaccagagtacctctcccagcgatgcaaagaaactctacaagtcgtgccacaattgttcccatttatactgctcgcgtgagtgtcggcgggcacactgggaaaagcataggaaagcttgcctgcactcgcgtgcctccaatatttgtcgccaggtgctggccacgtgcaaggacgacatcgactcgcagcgccatctaagtcttttagcccgcaaaggcagcctgtctcagggacgtggcgttgtgcgtgtgctttttcgtagtgccgaggcggcggaaggattcattaagaacgggttccagtgcatgggggaggcttcgtacgtacgttggccagaccttatgcccgccgagatgggcctggagttatactcagagcttcttaagctcagcacggagtacaagccggaaaccaaaatgctcatttacgttgctatttgcgtggtatccgaggcaccgggaatgggacaggcacctgtgcgctgggaacgccaactggtgagtcgttgtgccaagctgaaactctgcaagacagttctggctgaactagagcaacatcaggcggcgctcctgcaaccggtgtctgttgtggcagtgccggagcggacggaaatcctcattctaactttcaatcccggacagcatagtaatagagagctgatcctttcaaatattctggatattttgtctaggcgcggcgtcatgctaagcaaacactatccggaggtcttcgagcgcctgcaaacgtactctgagggacagagtgataagtttaatccggtgacactgcatccgcgggacacgcaaactgggcaaaactttgtatgcataattatggcggtgcatacggacaatgagctaacgaagcttccatcagcagcggatggcggcaatcgagttactaccatagatgtaggatctacttcggctcttgtgcaactggaactgggcgatgatcagatttgcaaaaccaaatccagggaaagttga

SEQ ID NO: 37692 - protein, 439 aa, DROSOPHILA
MKSNIETSRQQLEVQSAAELQRLRRRSEGDAPTQEKHYSKEQSHKSNSHSVEAVDSAQPNNPKESRRASLGDPALAATRSDIGSGQLQLIEGPTTGFGSGQHVRCRNTKCDQSTSPSDAKKLYKSCHNCSHLYCSRECRRAHWEKHRKACLHSRASNICRQVLATCKDDIDSQRHLSLLARKGSLSQGRGVVRVLFRSAEAAEGFIKNGFQCMGEASYVRWPDLMPAEMGLELYSELLKLSTEYKPETKMLIYVAICVVSEAPGMGQAPVRWERQLVSRCAKLKLCKTVLAELEQHQAALLQPVSVVAVPERTEILILTFNPGQHSNRELILSNILDILSRRGVMLSKHYPEVFERLQTYSEGQSDKFNPVTLHPRDTQTGQNFVCIIMAVHTDNELTKLPSAADGGNRVTTIDVGSTSALVQLELGDDQICKTKSRES

SEQ ID NO: 37693 - DNA, 4968 bp, DROSOPHILA
ttttcattttcattacaacagccccctgaaaacgaactgcagaaatcacatgaccacaatccaggcgcactaagcgagcatcaactgcgtgtccaagcttcgcttcagcggctaaatattcccgactggttccgtcattccaacaaaggccccgaaaaggcagcagatggcgaaaacgcatgcacaagtgcgactggcggtggttaccgacctggcaacttcacccgcaaacgcgcacaggaatcgggtcgctggcaagggctcaactcaaagacgacttccctcagctcgctgggatctcaacgctccgaccgaagtcctttgttgatgagtccctcagcgcacagtcatcacggcggccaaagctcctattcatgtgggtcgacgacaattcacggtccggcacctgtacagataggcatgggtgcaactcgctggtcaacctctcatctgaattccactcagatgtctcccggtgcctcgcagcgcggaagctttacgcgcggcgcccccattaatagcagctttatatctgtggccagtggtagtggcttgttgcgcaattcctaccgacagccgtatttgggttggcgcagcacagagaagctctcccaacgaactccccacgaacggtaggttccaataactcattaccataaggtttggaggtcaaaactcttgctgcttgctaatattgagtggatcgagctcgattcttaaaaacaagcacgatgaaattgagacctaaaaaacgaaaggagaacaatattttagtttaattttagagcagccatccaaagttctagagaacactaaagctaagtgcctcgattagcaggtacctatcaatcagctaaggggattgtgaagtatattaagatatgcagcaaagcgactacgtgttgcacataagctgttacaataattgctatgtttctctagcttttctttagcgtataaatggctattgctaaccaaaccacaatcttgttaacacaattatgtcagtgttgtgtgcgtatgtgagctataacggccaaagtggagagtaaaagttcttggggcttgtcggggttttattgtagtaagtgagtcacggcttaataatactagagttacgcaaaaatctgtttaactgattcctagctgtgctctagctccgatctagttcttaacatgagggaaagctattgtcgacttttgcctgttacatacaatacttttcaactaatccattagataattttcaatttactactcgtactactcctaggttgagttcaaatttggtaagctaggtaatagttgagtataagaactattttgttcttaaatcgttgagtttaaaaaaactatgtagcaggtagaaggaggagtttctgataaagttgagtagacttgtccgtctgtctctctttttgaacgctgttatccattaaaagccagaaagttgagattaggcattcggattcgagtaacgattttggtgttcatatggtcgtatctctccatataaacgctgtgatctcaggagatagaaaaaagtagattctagtaatgctttcttattgtaatatttgtcttgtcaatttctatcgttatgccacacaatttaaaaaatatcttcgcagaactttcactagctgagtaacgggtatttgatggtcgagcaaatcagctatagcgttctctatattaataattcttttgagcggtattaagtgttatcgtattaactattattgtataaagtatattattgtttcgtcctaaacccaataacgttcataactaaaaatcatgtaaaatattcacgttcgactttttatattttgatcttgcagtctggccaattcgctgctaacccaacggacagctccgccctccacacgggcgggcaatgaaacccgcaccttacattctgtatcgacagagattcaaagctccattaaggaagtcacatccgccatcgttcacttcgtgaacgaccagcagcagtcccaacatccgcggagccgttctaccagtccaaattcaaggtatacaaacggctactagccggctacaaaaacaaaattaaagtttacagtatggtatagatcgctcagtgtgtctgagcccttcctagctatctgttcactgagtgtcaaactgttgttttagagcactcctcaaaccatagccgtctagtgagaatatctatgcacattattaatgttattatttaacaactacacaattcgtagctacctgtaaaagtatgcacctcttagccaaaggtaagacttgtgcttggtttatgtgagcattgtgattagtgtagctaacagcttttaaaaactaaattactttagcaaaagcatcaggttataaaaccgcaggggtgatacaactttaacgcgtttcggaccctttgaagtatacatacatatatattcttgataaatagccctagcctagtcgatctggccatgcctgttcatagctctttacgtccgtctgtctgtcgttaagaagttgagataagaattgcagattttagtggctcctacgttgcaaaagtttgttttagatggtgggcacgcccactccaacgcccaatactgacacgtcataactttttaaaattgtcatgatgttttttcattataaagcttgtcttgcgaatttctatcgatatgtaggcaaagactagagcacgcccactcaactcccacaaaccacccaaatttgccatcttgccacctgtaaggcaacttgaataacctagccggattttttttaaagactacactagataggggacttaaaatatcatataaatatcaacatatttaaaaagaatgcgtgttcgtcttctaaccctcgcccaatggtcaacctttgcccattccatattcaatttgttatcataagataccctgtaaaagtaatcaaatataatgaaatataattttattgtacatatatttacatagattcaattccatatacattggtacatacaaacgtgtgttcatccagtggaaccattccgttaaaacctttactcttgggaaataatcttactttcaatgtcagcatatcgatagaataaaaagcacttgaaaagttaaagggcaagacaagtaaaataaactctacatacaaactctacgtaaaataaactcacaagtgttggtgtggaagttcagtttttgttatttatcacggcttgggaaaaacgatttctcggttttagtttccaatccaatatgcatagaaagacgttattgaattctattggtagaaacgtttgtaacgaaacgttataaccacgttatagaaacgttataaccattataaagtcttttttgcagttaacaataaccagtgagaaagtaactaatcagcaatgtcaattgcttttagtaaattttctgctttctgaagtacttgttctgctgctttcatatctttatccgtaccaagctcagatttttagaatcttttaattggctgacatactcgttttttctctcattaagatacccaatttcttcgaaccgtctaaattttccctattacatcgttttaaatgccatcagtcaggaagaaaatattatttataggtgactaacttaatgtttttacatttcctaaaatagcatgcttttaagtatgtgttttataaaatgtggtttcatatgatatgtttatattggccaactctcagttttgtactttctaactccaggtgctggctggaaagcagctttgttggtacacgaaccctggactcgccgcaaacacccgtcattgacaacagtcctcccgaattggcacgaaagcagcagcagctccacccgcaccaagtgcatctggatgtcggtctgtcgcctgtagtctccgctggtcagctgccacatcgcatgaacggaataaatcgtatcggcaacggtggcggtgagtccgccatccaagtttgatagtttgccagagtagaaatactggtaaccggcagtttatgctttttgtttggtgcacggcatttttgtagcctatctgcaaacagtaaattaattgtgtgaacacgtaggcatccacacctttattccgtataaaaatcatcagcctatatgaacgcaaaaaaaatatttttatttatcttctatagtggatcttaattgttttacatttaattattaatttattaaattcaaaggagcagaaacttttgctcttctaattatttatcgaatactcatgatttgcctttgcctcgggtatagaaaattgtagatttgggcagaaaaccatatccgttacttctgcagtaaaatgtcaaatagatccgcggaaaaaaatgtaataggtagaaatatgtctgtcacgtctgtccgtatttccatttgtataaacttagcgataagattaggcatgcaaatcgctttcataatattggcatgaataatttttgatatttaaattggcatttgtttttcttgcttaattcttaatatttgtcacgaaaaacactttcccaccatcatttaacgcccacaaactttacaactatgggccgataaattgttcgaatggcactattactttaaaagttttaatgacgtatcatgacataattgcgtcaaatacttatgagcagatagctgagtaacgggtatacaatagtcgaggaactcgactatagcctaactcttttacatttcaattaaacaacgaaatatgtactaagcctttcttctaatttaatgatcaaacgagactagaaacccatctttactttaaatatgtgcccaattgattaataaacccaaaatgagaccactaagaataaaattgaacgcatgtctttatatgatttgttagttatgtgcattttatattttaatatgactatacacaaaatcgggctaatctttggtatttgtttctataataaagtccaaattctattataaactggta

SEQ ID NO: 37694 - DNA, 594 bp, DROSOPHILA
atgtctcccggtgcctcgcagcgcggaagctttacgcgcggcgcccccattaatagcagctttatatctgtggccagtggtagtggcttgttgcgcaattcctaccgacagccgtatttgggttggcgcagcacagagaagctctcccaacgaactccccacgaacgtctggccaattcgctgctaacccaacggacagctccgccctccacacgggcgggcaatgaaacccgcaccttacattctgtatcgacagagattcaaagctccattaaggaagtcacatccgccatcgttcacttcgtgaacgaccagcagcagtcccaacatccgcggagccgttctaccagtccaaattcaaggtgctggctggaaagcagctttgttggtacacgaaccctggactcgccgcaaacacccgtcattgacaacagtcctcccgaattggcacgaaagcagcagcagctccacccgcaccaagtgcatctggatgtcggtctgtcgcctgtagtctccgctggtcagctgccacatcgcatgaacggaataaatcgtatcggcaacggtggcggtgagtccgccatccaagtttga

SEQ ID NO: 37695 - protein, 197 aa, DROSOPHILA
MSPGASQRGSFTRGAPINSSFISVASGSGLLRNSYRQPYLGWRSTEKLSQRTPHERLANSLLTQRTAPPSTRAGNETRTLHSVSTEIQSSIKEVTSAIVHFVNDQQQSQHPRSRSTSPNSRCWLESSFVGTRTLDSPQTPVIDNSPPELARKQQQLHPHQVHLDVGLSPVVSAGQLPHRMNGINRIGNGGGESAIQV

SEQ ID NO: 37696 - DNA, 4844 bp, DROSOPHILA
agtcagctagatcttttagcgaaaagatcgagacgtttgtaacgaagcaagtcaacgaactgagacaaagtagttgatgtttcgaaagcagagcgcggtaagtatcacatcaaagagcctggtttcagagaaatcgactttataaaatttgaaagataaaaggaaattaattatttttaacaccatttaaaaattaaattaaattgaagaacatcgaacaaagtcaataatattattttcgaacattttcgtctttagcctggaaaacgaaaccgttggcctacgacataattatatttataataaacatacgaatcgaggtagcctgggcagtcgttattattccaagtgtaccatgggcaagaataaagtccatggaaactgcaaaactgcactgttgtttctgatagccgagcaatcttcgcacactatgtatcattccaaaaattattcaaacatctaaagagttattatacccattaatcgtagagtaaaaggtgcaagattcgttgtaagtatgtatgtaacaggcagaaggaagcgtttccgaccatataaagtatatatattcttgatcaggatcaatagtcgagtcgatctggccatatctgactttccgactgtccgtctgtccgtatgaacgtcgagatctcatgaactataaaagctagatggttgagattaagcatacagtttgcggagacacatagcgccacactatttaaaaatttttagatttttcttcgttttattgtttgacttgccaatttttatctgcataccaaaaacactggccacgcccctccttttacatacaaaacccccaaaactgccacgcccacacttttgaaaaattgttctcacatatttctcatgtttatcttccactgttataaacttcgccgttactccaattccgctttgtctcaacgtttcgccaattttaataagaatctatttttgttagtgccccaatgtccaaaatatttttttctagttcatttggttttattcagttttggaaacatcatttcagcaaaattctgctaacaagtacatgtgaaagggtaaggacttaaaataagggaataaaaatcattgataaataccccgggacaatattgggcctagagtgtaaccaaaaaagaaaaccgaaccgtacgaagatccccgctctaaatcctattccgaacggttcgctagttttaatatacaaattttttttacttgtttattagtcattgcatctactagtagcgctgctgcgatggacgcccaccggcgttgtagtatccactggctcctggaggcaagctaggcggcattggtggtggtggtgcagcgctcccgctatagtgtccgaccactgtctgctggactccccatccggaagaggggtacggcggcataggcactaccggcgggggcggcggtggaggagcatgataaatgtggtacccggatggctgacctggtggtgttgggccctgtaacaggttctgggagtcgctaggaccaatgattggcacgccactggctagggatttaatgctctgaatgttgctaacttccagcacgccaccgttgccacatacggggggcggcggctgttgtggaacggaaagtggtccaatacccgtagaattggtaagcttgccggattttggactgtcggctctgcttggtggcttttggggcggactggttggctggagcgcttctttttgggttgattggtacaggtccagaacttggtggcagatgtcttcgagtatttccatcgttacatcagacacaaacatatcccaccaacgctgctgctgtggctggcggccctcccagtcttgcacagtgaatttgcttagcttgctggccaaatggataagagccacggcgataatctccggctcccactgtagacaaactactgtgctgagagagtcgttgacgaagttccacgccatttgcaccatcttttgcagcttctgctggtcgcctttgaaacacttagcgtactttaggagaaaggtgtaaggatgctctacttgcaaatcgaatttgatggtctgcagcagaatacgctctagcgtcatcacctcctccttagggtcgtcgccaaacgagtagaagtaattgtcggtaaggatgccacgcgcagttttaataatgtcgcgacacttctttggcgtctcctccaccttgccagcaaagaacaggcagcagcacgcagtcacgtaccgggggaaactccggaacgaatgaaacatgtaaaatcggtgaaaatatacaacgccggtggccatcgtgttgtggcccaagcccattttggtgccacattccataataaatcgagcaccttcttttctgtaccgccgctccgtttcgaagcttattccatccaagatcgagggcgtctcccgcagctcctttttgtcgtaataccagcacggcatcgcggcaatttaggctgcgggtactaccagtagtccgcgtcgttggaaggaatttgtgttaaacctttagccaaatggttgtcagcatatgcgcgtcctggagccgataagcgcttttgtttattgtaaataaatcagttttcgatttttatgttcacttgcagtgttaccatgtctacgacgatgaagaaaaaaactttattggaagccccttttacaccaagaccacgacgattttgagtatatggaacaactttattggtaaatagataacgcaaaaattttcgatctcttgcgggtcaaactgaatattttttgtgcgtttgctagttttggtgacttaattttgggatataattaaacagatatatttacacgtggttttggccgtcctttgactgttacgaggaacaaatgggatgtttacactggaatcgcatttccatgttttggagatatcaaaccaagcatagggattagtgatgggaattgcgcaatttgttttgttgttaaatggtatattgaaataattcattatgtataatcctactggataacaagtatttcaatttaaagcatagatagcattcgttaaacattataaaatgtaataacaagattatgagcagtgtaagcgctttctatttaatagtaattacttctagtaatgtggtgatgaatttattataaccgttagtcgtattttcgtattccgaccatttaaggtatatatattcttgatcaggaccaatatcctagtcgatctgactataatttaattagtctttttaatttctatcgatttgtcaataaaatttttgccacgcgcactctaacgccctaatgccacactttggaacaattttgaaattttttatcattttatatcccattatctatcgatattccataaaattgatgcaatttcgcgtttgtattcacactagctggtaacggttatttgatagccttggaactcgactatagtattctttcttttattattaatataaacgcgagtgatggcactataattttattatgtttctatattttttatgtttctataatgtgtgttaaattcttaaaaatcgatatatatcactcaaattacataataatggaaaaccgaaacgtgagcttgatagagcgaaacaaccaaatcagtcgagatgcttctttttaacgtagaaaatgttatgtatatttttctttgaatcatgcacttaggctagtgaacatattttcaaaccttaccgctcaagtgatcattgacttaaataaaattttacaaaactcaaagaacatccagcagcacgcagacacgtatcaggggaaactcaagaatgaatgaaacacgtaaaatcggtgaaaatatacaacgccggtggggatcgtattgttttaataatattatattttttaatgaagtacagataatatggaattgactttgattgaatttaaaaatgtatattaaaatttatcagtgataacaaacattttatatttctttcaccaagtgattcagtatatgtatacaattctagtattttaacttctatttaacgagcacttagggaatgtgaatttccgtcattcgactgcgccaattgcatgctaagtatttggttgcggttaacaaccaaggccggagtacccccaacgttgaaaactatctacgtctcacaagacaagcaattacgatctcgaacttcaaaaaggtaaacaaacccaaatgttgtgcaaattctaacgtttgatcacccctgatcgcagattccgtctatgcggattgtgttgttatcctgggaaagctacaaataccgcgtataaatttgctatattcgtaattgggttcgaagctaagcgatgcccagcctaccagttcggcgtacacggaaggattcccaattggagaacgatgacgatcttggtcgtattgcccaaatttatcccacctatgctacactcaggtagatatttttggatcagccgcaaatttcctggcttggctatgtcaaatgacttaatcgacatttgatttcacggttttatttatacggacatacatacatgtatttcatattttaaaatatacatatttgccttatttaaaaaataataattaatgcttactgactagtaccttccgattttgtttaaaataaacacgtaattattatctcctaaaactagtgcaggctcacaattaccacctgcctttcaaaaatgacttaaagataaagaaatgtgaaaaattcatttactcactaatttgaaacttaaactaataatatacacacatttgtaatattttaagcataagaaaagttagtatgcattcaattttattgtttgtgcattaatatgtagttatttttacgcttt

SEQ ID NO: 37697 - DNA, 1928 bp, DROSOPHILA
ccaccggcgttgtatattttcaccgattttacgtgtttcattcattcttgagtttcccctgatacgtgtctgcgtgctgctggatgttctttgagttttgtaaaattttatttaagtcaatgatcacttgagcgtcaaaggacggccaaaaccacgtgtaaatatatctgtttaattatatcccaaaattaagtcaccaaaactagcaaacgcacaaaaaatattcagtttgacccgcaagagatcgaaaatttttgcgttatctatttaccaataaagttgttccatatactcaaaatcgtcgtggtcttggtgtaaaaggggcttccaataaagtttttttcttcatcgtcgtagacatggtaacactgcaagtgaacataaaaatcgaaaactgatttatttacaataaacaaaagcgcttatcggctccaggacgcgcatatgctgacaaccatttggctaaaggtttaacacaaattccttccaacgacgcggactactggtagtacccgcagcctaaattgccgcgatgccgtgctggtattacgacaaaaaggagctgcgggagacgccctcgatcttggatggaataagcttcgaaacggagcggcggtacagaaaagaaggtgctcgatttattatggaatgtggcaccaaaatgggcttgggccacaacacgatggccaccggcgttgtatattttcaccgattttacatgtttcattcgttccggagtttcccccggtacgtgactgcgtgctgctgcctgttctttgctggcaaggtggaggagacgccaaagaagtgtcgcgacattattaaaactgcgcgtggcatccttaccgacaattacttctactcgtttggcgacgaccctaaggaggaggtgatgacgctagagcgtattctgctgcagaccatcaaattcgatttgcaagtagagcatccttacacctttctcctaaagtacgctaagtgtttcaaaggcgaccagcagaagctgcaaaagatggtgcaaatggcgtggaacttcgtcaacgactctctcagcacagtagtttgtctacagtgggagccggagattatcgccgtggctcttatccatttggccagcaagctaagcaaattcactgtgcaagactgggagggccgccagccacagcagcagcgttggtgggatatgtttgtgtctgatgtaacgatggaaatactcgaagacatctgccaccaagttctggacctgtaccaatcaacccaaaaagaagcgctccagccaaccagtccgccccaaaagccaccaagcagagccgacagtccaaaatccggcaagcttaccaattctacgggtattggaccactttccgttccacaacagccgccgccccccgtatgtggcaacggtggcgtgctggaagttagcaacattcagagcattaaatccctagccagtggcgtgccaatcattggtcctagcgactcccagaacctgttacagggcccaacaccaccagtgcctatgccgccgtacccctcttccggatggggagtccagcagacagtggtcggacactatagcgggagcgctgcaccaccaccaccaatgccgcctagcttgcctccaggagccagtggatactacaacgccggtgggcgtccatcgcagcagcgctactagtagatgcaatgactaataaacaagtaaaaaaaatttgtatattaaaactagcgaaccgttcggaataggatttagagcggggatcttcgtacggttcggttttcttttttggttacactctaggcccaatattgtcccggggtatttatcaatgatttttattcccttattttaagtccttaccctttcacatgtacttgttagcagaattttgctgaaatgatgtttccaaaactgaataaaaccaaat

SEQ ID NO: 37698 - protein, 381 aa, DROSOPHILA
MPCWYYDKKELRETPSILDGISFETERRYRKEGARFIMECGTKMGLGHNTMATGVVYFHRFYMFHSFRSFPRYVTACCCLFFAGKVEETPKKCRDIIKTARGILTDNYFYSFGDDPKEEVMTLERILLQTIKFDLQVEHPYTFLLKYAKCFKGDQQKLQKMVQMAWNFVNDSLSTVVCLQWEPEIIAVALIHLASKLSKFTVQDWEGRQPQQQRWWDMFVSDVTMEILEDICHQVLDLYQSTQKEALQPTSPPQKPPSRADSPKSGKLTNSTGIGPLSVPQQPPPPVCGNGGVLEVSNIQSIKSLASGVPIIGPSDSQNLLQGPTPPVPMPPYPSSGWGVQQTVVGHYSGSAAPPPPMPPSLPPGASGYYNAGGRPSQQRY

SEQ ID NO: 37699 - DNA, 2620 bp, DROSOPHILA
ccgttttaacactgctcgactcagctgttccaggttggatacgcgttcttcgctttctacgttcatttgcggatcgttttgggctgtattctcgctctcactgttaggcgaggaatcgccggaataagtctctttgacctcgatatttacatccttacgcgtttgtgccttgcaatcatcactagacttcgtctgctctgcactgtcttcggaacattttcccttgctcaatttaatggtgcgaattgccaataatcgctcaaaagcatgtgctgttttgccaccagactccagtttatttgcgatcttacgtcttgtccgtaagcgctcatccattctgcaatcctcttcgtgtcgctgcgatgtccctgcgctctttcccaacttcaatggaatgttgaatactcctcccactcataaatcgagttcgatctaattcagcgagacattcaaatttggaaggatcagctgtaacatgaattaccaattacttttaggctgagcatactttgttcggaataaaatgttactcgtatattaatatatatatatattaatatatatattcgttgaacagtatgtaacaggcagaaggcgtttccgaccatatattctcgatctggatctctagccgagtcgatctagaaatgtccgtctgaccgtataaaagtcatatctcaggaacgcagcttgcagaggctgcgtgttcccacgcatctttttaattggttttcaatattgcaatgtcaaagacattctggtgaatattaacatgcacattttttaaaatatacatatttttctaacgtgtatatatttccctttcccacttttgaaaaaggtgttgatatttttttaaatataaaaaaaaatataaaataaaataaaatataagttatattatatataaatataaaactaccacgaccacaatttttcaaaattttctttgtcttgtaaatttctatccgcccaaaactggaataataaggcatacacatttcaaaatttattttattaaattatatcaacaatttctacgaagtgcatgggtttactttagtagtatggatttccattgccccgcgactgataagcttgaccttctgggccgccaaggccgggcaatgtattatagtagtcgccttgcccactgctccgctgctgttccattggagagctaaaaagagctacacgaattcgaggaatatattgtatatatacatactaaagcccgttgcgagagttcatctcacgaagcatttttgtgtatcgcaagggactgcgatagccaggaccaccaagcgatgcagatgcaccattaaaatttgaagaaccttgtccgcaattactctgctgctggctatatccatggccactgctcgtttggttgtacagcatttcaaagccctttaaaagcaaagattgtttgggcacaacaaaaactcttgctgtatacttacctcgccaccttggctataaccatcgtattgcataccatttccgtattccatgactgaaaattttgaaaaaagattttacttgactttcttataaaatttttacaattttttttttttttgttttttagagatgtttacagtccgaaacctgaaatgaaactggaaaaaactgacaaaatgcctgggaggtgtacaaaatcaaatgtcacttctatcatagatagtgtgatgaaaaaaaggaataaaatttaaattattaaaatttacatttttttttttatttgtaaaagtaaagtcgtatatttccacacacatattacttaccctaaaaagtatatacaatatattctggaataggatcaatagccgagttaatctaggcatgtccgtctgtatgaatgtcgagatctcaaagactatgcaacttatggattaagaatgcagattctgataaagcctatgctatgcaatattgctttagttacttattttattatttgttttgcttttcctatggatatgtcaaaaagatttgggccacgttcatgctattacggccaaaattttgaaaaatgtttggatacttttctattcacttttaaacttcctcagttctaagatatgaacaagagagaatgctttagcaaaagtgtctttagtctggctgtaacttgtattgttaataatgtgttcatttgtgttctccaactcttggagcttttacatttttggataatatatttttatgtatttcgattatagctgtctctcttgttttatttatagtttcatcaaataaaaatataagttagtccgttagtcttgatatcttttaatttggtaatgaaatacgttaatatgacgttcggttatattgtataattgcaatcacccatggcaccgtctgatgtctgatgtctgctatatcgcatatcaatggaaaatttcaaagaaaataacaaaatagaaaatattattatataaacattttttggcatattgctagaaatgtaaggccaatagtaagatacagagtgaatgcacttttcaaagttgtgaacattacaggtttgttgtaatcttttggctctttctggccattttttataagcgatccggataccttatctagaccattgcagccaaagttcctgcgg

SEQ ID NO: 37700 - DNA, 503 bp, DROSOPHILA
tcatttcaggtttcggactgtaaacatctctaaaaaacaaaaaaaaaaaaaattgtaaaaattttataagaaagtcaagtaaaatcttttttcaaaattttcagtcatggaatacggaaatggtatgcaatacgatggttatagccaaggtggcgagggctttgaaatgctgtacaaccaaacgagcagtggccatggatatagccagcagcagagtaattgcggacaaggttcttcaaattttaatggtgcatctgcatcgcttggtggtcctggctatcgcagtcccttgcgatacacaaaaatgcttcgtgagatgaactctcgcaacgggctttacagcggagcagtgggcaaggcgactactataatacattgcccggccttggcggcccagaaggtcaagcttatcagtcgcggggcaatggaaatccatactactaaagtaaacccatgcacttcgtagaaattgttgatataatttaataaaataaattttgaaa

SEQ ID NO: 37701 - protein, 99 aa, DROSOPHILA
MLYNQTSSGHGYSQQQSNCGQGSSNFNGASASLGGPGYRSPLRYTKMLREMNSRNGLYSGAVGKATTIIHCPALAAQKVKLISRGAMEIHTTKVNPCTS

SEQ ID NO: 37702 - DNA, 6222 bp, DROSOPHILA
ctctgcaatccctctgctctcagtgcaggagaggtaagcgtaagcgagagccgccgctataaatcaaaacaaaggtgctcgacaaaggtgcgcatgcgtcggttagagcttgagagcgaacggtgctctcgcctcatctcatatcctctctttcatatatcattttaatggggaaactatctctttctctcgctcaactcagttgttctctcttctgctgtcgctctcgctgcccactgtcagctctcaacgttccgattgtcaaaaagatatttcagtcgaatgttttagtttcgacctcggccgagctggagactcatctaacggctttctcagcggcaagttcgaaatcatgtcgcctttgaacggtgggtggtgcagcagtaacggtacatcgctcgacctacgactaaattgcgagtgcagaaaatagtgttcacggaattaacagacctcgaaaatccaagtgtaggcgaataaataaacgaaattatcgtggaaagccatcaataaatcaccaaattaatagccctgacgagcacccacggcatacgcacagctgttgtgtgtgcaaagtgagaagaggaagctaaaggaagtgaaattggcggcagtttgaccgcaacagcaataaaatacgtctgcaacccacaaacgcacgctcacatacacccgttcgtcatcgaatcgtcgtggtcctccgcttcccagtcctcgcccgcccctcttcgacacacgaaccattgtgacatttgatttatatgacgtgtgtgtttttgatagaagttcaacacgaaactgtcacacaaacacacgtatgctcgccgaggaatttattcagtgaacgaaaataaaatcagagctccgtacgcacttggccgcagtgaaacgaatccgccaccatcgatgagcaggcggacgaaagtcggaagtatcgccaggcagtccagtaatcaaacctttggagagcgagcccggatacccagttttctacaaaatgatgctgcacgaggccgtcatgctggaaatctatcgccaggcgctgagtgcaaggtgagcgcttcctccgatttgctgttccacgccaatagcgattcgatacggggtttcccgaggaggttgggcagttccctttggagatgcagtgctttatttcgattatttagtcgaaagctgcataaagttaattgggcataaataaaagatataactaaaacaacgcaggcggcattttgaatcgagtttgttcaccctgctgaaaagtttgttgtgaatgcaacttcttgctgtgccgattgattagtgtgaagtttactccatttggcacggtttgcgttgataaacgaaaaaatgccgcttagaaaagatctttcctaggtattaaaatttttattttctcagcgcgattaatgtggctcttcgtatgaacaaataatcaattagtcattacaatataattattctgctccacaatggaatgcttgctttcctagtgataccaaattgacagaagcactgttgctgttttaatgtccgatatttaaagagcttaaagtacgaaattttaaatagaatatatatatatacctttttttcgcatgtaattgtgactcaattctaacttccatcaccttcgaattttcattttagtgagttaactagtccgcgatgtcagtctcgcgattccaacacctcagctggagcgggtgctggaatggccgatgtccgatgtccatcgaatgagtcgcattgttcggcgaacgaccgtctgaccccagctgcaacgcccactctcacgcctactgaagcaaccatctccccaaactcggtgggacttcccctgacggcgacccttcctcctgcagctgcagttgctctgctaccgccccaatccgccgccatggccgcttacctagccgctgcccaacaaaatcaccttctgctaacaaatccattggcggcagcagcttcactggtccaacatgcaacgcagcaggcagtggtggagggggaggtggagtcgccggccctcgattttagcagaaagcggcctaagagccacggagacgacgatcaggaagaagatcaggaacaggaccaggaacaggagcaggagcaggagcccgatcatgatgtccagtgcgataatggtcctttagatctatctgtaagcacagggaaaaggcaagaatcggtttctccgcctgccaggaagattccaagaagtatatccgcagattacaagtcacctcttccacctggcagctggatgccccccatcaacccatacttggcagctgtagcggcaaagacgggcggactgggatattctaagttagcacccagtgaagccagcaaagcgttggagaagatgactgagatgagccgattggaaacatccccaacagctgcccgaagcttaggcgccacatcatctgtaggagcaggagtgcctgcgggagctagttccaactccggtggccggcacagcgcgtggcagtctcattggctgaacaaaggtgctgatactgcaaaggatgtgtttaagtgtgtgtggtgcaagcagagcttttcaactctggctaacttaactgcccacatgaaggagactcagcattgcggtgtgcagataccctcgccgttgccaaccggaggagtcggcactccgtctgctcctcctcccacaaggttggccacttcagcctccaactcggcctgttccagcagcagtagctccacctccagctcttcaaactcctcgaaatcagagttaaatatgctaattaaggaaactatgccccttcccaggaaattggtgaggggtcaggatgtttggctcggaaagggtgcggagcagacccgccagatacttaagtgcatgtggtgtggacaaagcttccggtctctggccgagatgaccagccacatgcaggagacgcagcactacacgaatatcatctcgcaggagcagatcatttcctggaagtcgggcgatgaacgggagaggccgaccaacactggagttccgtctacgtccaccgctgctccctcttcgccgagttgcacagctccatcagtgagtgccgtgctcacgtgtaaagtttgtgatcaggccttcggtagcctaaaggagttaagcacccatatggcccaaaaatcgcactacaaggagtcaccggctccgtcagcatctcctccagctgccggcactggcaatccgaaaagaggaaggcaaaatcgcaacgagaaacgcaagaaatccctgccggttaggaagcttcttgagctcgagcgttccggctcgaattcaagtctggactcagcgctaaagcccttgagggactttgctgctgccaccaaaattacctgtgaaaaatgtggcagtaagattgaaactgcgttgtttgtcgagcacatacgaaagtgcctgggcgagagtattccaatccctccccgtcgatctaacgcgggagtagatcgcctgccaagtcccagtctaggacttggcgctgaaaagccaccatcagtccttaatgccctggagcaacttatagagaagagcttcgaatcgagaaccagcagaaccatgacacatggaggctattccgaagctggaactccgcttggagccagcatcctaaagcgtttgggaattgaggacagcagtgactacaccaagccccttatggatgcccaggcgatgcacctgctccgatcctccttcgcctcgagagaccgcagtgccagcgaatcgagctcagccagtagggtggaatcatcctacaccccagacagacagcaggccaccccccacaaaagtccagatactcctgctccgcctcctcccccaccgccaaccatcaaagctgaaccactagaggcggaacccttggtgggttgcgatcgggagggctgcagtcctcggcagcagatccaagtgaaaaaggagttcagcatggaagcatgtcgggagagtcctcggtctgtaagcaaatcacctgcgccgcagaccgaaagatctccaccagataatggcagtctactggcgttgaactccatgttcgatcagctcagtggagtggagaacagcggcaataacaactcgggtaagagaaaaaactcaatataaaaaaattgttttaaagcgtaaggcttaactagtgacgaggtattagtcaattgccagaaaatcgattggctcacaaccttgtaatctacgcatgccaatattattagttattaattatatattaacaattatatttctatacaaatgaaataaaataaataataatgaataatgaaaactgaactaatcattcttccagggcattgctttaacaacaacaacagctgcagtagcgtctccgcccagaagccaaaggcccatcctctagctgcgctgcagaaactgtgcgagaccacggatcccccaagcactggcctgcgcagcgcgtcctccgccggatcctccacagcatcagcaacacttccctcagcgaacggtaacgacctggtggccttcagctgggcctgcaacgaggcagttctgagtgccagtaatggtggctccgccggcgattcgtccatcattaagtgctcctactgtgataccccttttgcatcgaagggcgcctaccgccaccatctctccaaggtgcactttgtgaaagacgcaggcgaggactcgcccaggctcaagtcccccgccgttcagagccccaggtcgatgccattggcctccccaaggagatcagcttccaggagtccggcgacaggatctcagcagccccctccctcgccaaccattagcccctatgacgagagtccgcagtcaaagttcctcaaatacacggagctggccaaacagctatcctctaaaaacgcctaaactgctgaagaacggagaacttgtagagaagagatgtcatccatgaaaacagtagaagaatctattagcaaaagtgcttagggacgacttaaagcgaattaacaaattgggtcacagattgcagacacgtaagctgtatttaatattcagaatttatcctttggactgaggctacatttaaattgttcattttacgaagccgactgtttaacggtcgtatgaaatcattcaatcaaaagcccaacatactttaaactgaataaccatcctagttgatggtttaaattaaaaaaaaaacgaggatactttcgtcgatgcctgttaaacaaactttagcaatccgtttgcaaatttctaaacaactgcattgatttgtgatcattattctgatctgcacagctctcgctctttcgtccgctctctctccaaatttcaaagttctcactgtctctctctttgccgctgtacacccaacaagatttcccctacttttgctgaatttagcaggaaatttccccagaccacaaggctctctcgtgttgttgtttgttccccttcgtcagtgacgtcacggcgatgatggtctgctctttatggtttcccaatcggacagtcgcagtctaaagcgcgagcgagagaggactagcaagctggaaattcaattaccaccactttgacgaacggctgtccatcaaagcgagtcggacagggacggccatagtggcggagtgacgaaaggcgacaacacgagttcgtcaaagtggaattggatggtggcgagagagacaggcatagcacagtgggtgtgtagagagcaagagagtgagtactcctactgagtgggaaaaatgtggttcgttttcgagtgcatttgaattcagatttgagtgcactcagggaacaagccagccattacttatttatttatccgcaactccttgtcacatgaatgaaaaggaaaagagtgccaaaaatcaaaactgtttaaatctagaaagaaacctaaccagctaaattggttattctaagcaataacaaaacaaacgcaacgcagtatacgtaaatccttacacttaaacaataaccttaatgatagaaccaattaatggtcgcgtgcaactcttagcgaagcacatgtagcccaaacgatgaaatgcattgaataaatgtaaatactagccaatggcattttccttccataagtctaaagattaccgatatctacatcaatataaagccacagcaacgcatgtatacggaaacaattttaaaatgatatattcatacacatattaaactatataaaaccaatgtatattagcagttcgagt

SEQ ID NO: 37703 - DNA, 3403 bp, DROSOPHILA
atgctgcacgaggccgtcatgctggaaatctatcgccaggcgctgagtgcaagtgagttaactagtccgcgatgtcagtctcgcgattccaacacctcagctggagcgggtgctggaatggccgatgtccgatgtccatcgaatgagtcgcattgttcggcgaacgaccgtctgaccccagctgcaacgcccactctcacgcctactgaagcaaccatctccccaaactcggtgggacttcccctgacggcgacccttcctcctgcagctgcagttgctctgctaccgccccaatccgccgccatggccgcttacctagccgctgcccaacaaaatcaccttctgctaacaaatccattggcggcagcagcttcactggtccaacatgcaacgcagcaggcagtggtggagggggaggtggagtcgccggccctcgattttagcagaaagcggcctaagagccacggagacgacgatcaggaagaagatcaggaacaggaccaggaacaggagcaggagcaggagcccgatcatgatgtccagtgcgataatggtcctttagatctatctgtaagcacagggaaaaggcaagaatcggtttctccgcctgccaggaagattccaagaagtatatccgcagattacaagtcacctcttccacctggcagctggatgccccccatcaacccatacttggcagctgtagcggcaaagacgggcggactgggatattctaagttagcacccagtgaagccagcaaagcgttggagaagatgactgagatgagccgattggaaacatccccaacagctgcccgaagcttaggcgccacatcatctgtaggagcaggagtgcctgcgggagctagttccaactccggtggccggcacagcgcgtggcagtctcattggctgaacaaaggtgctgatactgcaaaggatgtgtttaagtgtgtgtggtgcaagcagagcttttcaactctggctaacttaactgcccacatgaaggagactcagcattgcggtgtgcagataccctcgccgttgccaaccggaggagtcggcactccgtctgctcctcctcccacaaggttggccacttcagcctccaactcggcctgttccagcagcagtagctccacctccagctcttcaaactcctcgaaatcagagttaaatatgctaattaaggaaactatgccccttcccaggaaattggtgaggggtcaggatgtttggctcggaaagggtgcggagcagacccgccagatacttaagtgcatgtggtgtggacaaagcttccggtctctggccgagatgaccagccacatgcaggagacgcagcactacacgaatatcatctcgcaggagcagatcatttcctggaagtcgggcgatgaacgggagaggccgaccaacactggagttccgtctacgtccaccgctgctccctcttcgccgagttgcacagctccatcagtgagtgccgtgctcacgtgtaaagtttgtgatcaggccttcggtagcctaaaggagttaagcacccatatggcccaaaaatcgcactacaaggagtcaccggctccgtcagcatctcctccagctgccggcactggcaatccgaaaagaggaaggcaaaatcgcaacgagaaacgcaagaaatccctgccggttaggaagcttcttgagctcgagcgttccggctcgaattcaagtctggactcagcgctaaagcccttgagggactttgctgctgccaccaaaattacctgtgaaaaatgtggcagtaagattgaaactgcgttgtttgtcgagcacatacgaaagtgcctgggcgagagtattccaatccctccccgtcgatctaacgcgggagtagatcgcctgccaagtcccagtctaggacttggcgctgaaaagccaccatcagtccttaatgccctggagcaacttatagagaagagcttcgaatcgagaaccagcagaaccatgacacatggaggctattccgaagctggaactccgcttggagccagcatcctaaagcgtttgggaattgaggacagcagtgactacaccaagccccttatggatgcccaggcgatgcacctgctccgatcctccttcgcctcgagagaccgcagtgccagcgaatcgagctcagccagtagggtggaatcatcctacaccccagacagacagcaggccaccccccacaaaagtccagatactcctgctccgcctcctcccccaccgccaaccatcaaagctgaaccactagaggcggaacccttggtgggttgcgatcgggagggctgcagtcctcggcagcagatccaagtgaaaaaggagttcagcatggaagcatgtcgggagagtcctcggtctgtaagcaaatcacctgcgccgcagaccgaaagatctccaccagataatggcagtctactggcgttgaactccatgttcgatcagctcagtggagtggagaacagcggcaataacaactcggggcattgctttaacaacaacaacagctgcagtagcgtctccgcccagaagccaaaggcccatcctctagctgcgctgcagaaactgtgcgagaccacggatcccccaagcactggcctgcgcagcgcgtcctccgccggatcctccacagcatcagcaacacttccctcagcgaacggtaacgacctggtggccttcagctgggcctgcaacgaggcagttctgagtgccagtaatggtggctccgccggcgattcgtccatcattaagtgctcctactgtgataccccttttgcatcgaagggcgcctaccgccaccatctctccaaggtgcactttgtgaaagacgcaggcgaggactcgcccaggctcaagtcccccgccgttcagagccccaggtcgatgccattggcctccccaaggagatcagcttccaggagtccggcgacaggatctcagcagccccctccctcgccaaccattagcccctatgacgagagtccgcagtcaaagttcctcaaatacacggagctggccaaacagctatcctctaaaaacgcctaaactgctgaagaacggagaacttgtagagaagagatgtcatccatgaaaacagtagaagaatctattagcaaaagtgcttagggacgacttaaagcgaattaacaaattgggtcacagattgcagacacgtaagctgtatttaatattcagaatttatcctttggactgaggctacatttaaattgttcattttacgaagccgactgtttaacggtcgtatgaaatcattcaatcaaaagcccaacatactttaaactgaataaccatcctagttgatggtttaaattaaaaaaaaaacgaggatactttcgtcgatgcctgttaaacaaac

SEQ ID NO: 37704 - protein, 984 aa, DROSOPHILA
MADVRCPSNESHCSANDRLTPAATPTLTPTEATISPNSVGLPLTATLPPAAAVALLPPQSAAMAAYLAAAQQNHLLLTNPLAAAASLVQHATQQAVVEGEVESPALDFSRKRPKSHGDDDQEEDQEQDQEQEQEQEPDHDVQCDNGPLDLSVSTGKRQESVSPPARKIPRSISADYKSPLPPGSWMPPINPYLAAVAAKTGGLGYSKLAPSEASKALEKMTEMSRLETSPTAARSLGATSSVGAGVPAGASSNSGGRHSAWQSHWLNKGADTAKDVFKCVWCKQSFSTLANLTAHMKETQHCGVQIPSPLPTGGVGTPSAPPPTRLATSASNSACSSSSSSTSSSSNSSKSELNMLIKETMPLPRKLVRGQDVWLGKGAEQTRQILKCMWCGQSFRSLAEMTSHMQETQHYTNIISQEQIISWKSGDERERPTNTGVPSTSTAAPSSPSCTAPSVSAVLTCKVCDQAFGSLKELSTHMAQKSHYKESPAPSASPPAAGTGNPKRGRQNRNEKRKKSLPVRKLLELERSGSNSSLDSALKPLRDFAAATKITCEKCGSKIETALFVEHIRKCLGESIPIPPRRSNAGVDRLPSPSLGLGAEKPPSVLNALEQLIEKSFESRTSRTMTHGGYSEAGTPLGASILKRLGIEDSSDYTKPLMDAQAMHLLRSSFASRDRSASESSSASRVESSYTPDRQQATPHKSPDTPAPPPPPPPTIKAEPLEAEPLVGCDREGCSPRQQIQVKKEFSMEACRESPRSVSKSPAPQTERSPPDNGSLLALNSMFDQLSGVENSGNNNSGHCFNNNNSCSSVSAQKPKAHPLAALQKLCETTDPPSTGLRSASSAGSSTASATLPSANGNDLVAFSWACNEAVLSASNGGSAGDSSIIKCSYCDTPFASKGAYRHHLSKVHFVKDAGEDSPRLKSPAVQSPRSMPLASPRRSASRSPATGSQQPPPSPTISPYDESPQSKFLKYTELAKQLSSKNA

SEQ ID NO: 37705 - DNA, 2410 bp, DROSOPHILA
taactagtcgagtggccatcgtgggacccaatggtgtgggcaaatcaaccttcctcaagctgctgctcggtgaattggaaccgcaggagggtgagcagcgcaagaatcaccgacttcatgtgggccgcttcgatcagcactcaggtgaacatctcacggcagaggaatcggctgcagagtacctgcagcgtctgttcaatctgccccacgaaaaggcgcgtaaggcattgggttcctttggtttggtcagtcatgcacacaccatcaagatgaaggatctgtccggtggtcagaaagcccgtgtggccctcgctgagctatgcttgagtgcgccggatgtactaattctcgatgagcctacgaacaatctggacatcgagagtatcgacgccttggcggaggcaatcaacgagtacgagggtggcgtgatcatcgtctcccacgacgagcgtttgatccgtgaaacaggttgcactctctacgtaattgaggatcagacgatcaacgagattgttggagagttcgatgactacagaaaggaggttctcgattcgctcggcgaggtggtcaacaatcctagcgtggtggccaatgcggctgtgctgcaataaccctcaagttgcatacggacttggagtccatgcaactggtcatcactcgtcagctggctcgccctatgttaattgttcaactgttgaattgattatctgctagttagtctttttataccaacatatatacaataacaaattgtggaagtaaatgttattacacaagagcgtttaagaatgtgttgtttatgttattaaattgtgggtattaagtatttgttgtagaatatacgtggaactggttaaaacacccgtaaattgtactcgtaatatatgtagatagatgatttatatttaaagttaatgccagctctgagtgttctccaaaaaaatggaaaaaataacattagagtacataatattaattcttagatataattgtggacatcctagccgctgcgatagaaggccttgacattgttaatcaggtggctcaatccattatagccatccttatcgaagtcgatgttctcgccgccaaactcgatgacctgcaaatgaatagtgggcaaatggtttgggatcattgaaataaatgactccatggattgagtgcacccacctccttggccctgagggtgtccgcaccatggggcactccaatgacctcgacccaggccccttcggcggcgcccagctcacccggcagattgatctttagcttgtggttgtctgtggaactggccagcaaagtggatcccgcgacgctctccacgcgaaccattatgctcacggtttggccggaaaactgcttcagcatgccgccgttgataatcgagcgtggatcaaaggcatccataataactcctcagttaataacgttcaaaaaacagccaatttcagcagaaaatgaaatgccgtaaacaagaaagagcgccaatagttatcgagcgtgctaatcgataataaaattgcatgacgtctgctatcgaaattattcgaattttgtagcaaaaatatttatggatttattgtaacatcaaaagttattacattattactgtggacttatgtattataataagaattaataaaaataatttataatagaattataaaaagacctgatagattacatgtattacaacaatgttatcgacagcgaacaagatgttcgaatctttctgatattttgtccggtgtgaacgtgcgaattttagtacgacaaccagttacatcgatgtatcgatagtttttagactggccaatgtttattgttataaaataaatgttacaaataaacaattaatcacttagtataaacaaaaataagtgcaagcagcaagtgcgttgttaaaacgaccgccgccctccgaatttccttattgcgggcattaaatcgcaacaacaacaacgccaccagcaacagcaacaacaataagcaggagattcagattcgcaacgcaatcaaaacgtaaaaaaaaaacgaaaaataaaaaactacaaggcgaaacgcataaataaatagggaagcaaataatagtaataataagactaaaagcaagtggaaaagtacgaaagcgaaaagagaaaacatatgtacgttgcgtgagagtgacgtgtgtgtgtgtgtgtcagtgagcgaaggagagtgagcgagagaggggaggcgagcaaaaacaaaaacaacagcacagcataagcgagaccttgaaaactttaaaagcagcaaaaaaaacaagacaacagccaaaaataagaaactaaaagctgcaaaagtaataaaaaatatattttagccgaaaaatttccataataacaattctagaagtgcggagcgtacaccctgttatggagag

SEQ ID NO: 37706 - DNA, 339 bp, DROSOPHILA
atggatgcctttgatccacgctcgattatcaacggcggcatgctgaagcagttttccggccaaaccgtgagcataatggttcgcgtggagagcgtcgcgggatccactttgctggccagttccacagacaaccacaagctaaagatcaatctgccgggtgagctgggcgccgccgaaggggcctgggtcgaggtcattggagtgccccatggtgcggacaccctcagggccaaggaggtcatcgagtttggcggcgagaacatcgacttcgataaggatggctataatggattgagccacctgattaacaatgtcaaggccttctatcgcagcggctag

SEQ ID NO: 37707 - protein, 112 aa, DROSOPHILA
MDAFDPRSIINGGMLKQFSGQTVSIMVRVESVAGSTLLASSTDNHKLKINLPGELGAAEGAWVEVIGVPHGADTLRAKEVIEFGGENIDFDKDGYNGLSHLINNVKAFYRSG

SEQ ID NO: 37708 - DNA, 3723 bp, DROSOPHILA
ttggccagcgaaatgaaagtgacgatggtgatgggcagtgtgtctataagatataatcgaattgaaaatcttctagaatattttagttcattcatagtgatttttgactttcgaatagatttgaaaactattcgagttatttgattcatgaatcatatagacatgttattcgtcccttaaatggttccatttccaaattgtttttaaattgttttgtttgaaatatttgtaatatttccttcttttgtagcttgaaaataattgcatattcaagggtatctttcagtcgagatttcaacttggccatatttggcccacctttgctagcattcccaaatccaattagcagcagtctgccctccatctccaacccgccctgcctgcaattgtgaaggtactggtacttaccacccggctgggtcaagtggtcaaatggtcactggtactcgtgcaccttctgcactggatggccgccaatggagacgggaaacttgagatgaatgtccggcatgctggagtcgaagaacatgagatagtagagggccagcaccattcccaggccactgatcccgcccagatacagaaagatcgaaattatccggaaggtcttcgattcgaagaaggctggtggttgctgctccttgggcaggcgcacgtcatcattttcctccggcttttcacccaaatccaaagtggacgaggccatgattaaacgccaactgagctcgcgattccctgccaagcgaaatgcttggttaaaactttaattattccataaactcaagggtttcactttgaatgacactgattgactgattccatttgattggtaaactgagaaaaaacaaaatcagttaaagttaagtaaactttaagatacataaatacctcatgcatgcaggacatatttgttatttgaaatttttagatagacccatacaaaaaagcaatattctcaataattatggcacaacaaacattttctctctgtatagcaaacatggaggggggccgcgaggagaacctgtcggagaagccccgcccccacactttcgaggaggccatcacgctgacgggagtgggccgcttccactacaagttgctgctcatctgtggactgtgctttatgggcgtgatggtggaaattatgggcgttagcctaatcatgaaccagatgaaatgcgatcttcaaccgacgctaaaccagcagggcatcctggcgtcggccggattcctgggcgtcgtactgagctcacatgccatgggctttctggccgacacttggggtcgggcaaccacattgcgatacgccctgtgcatcagttccgtgtgctccatcgtttccgctttctcggtgaacatctggatgctgatcgtgttccgcttcctgacgggcttcttcatttccggcggacaggcgtgtgtgttcagtttgtgcggtgagttccatggcacgggatcgaggatcaggcatgtgaccctgctgtccggattcctttgcatggccatgatctttgcgccaggtgagttactattgaaaaggttaaagttaattacctaaaaactacttggaattgcttttaatgttcttttagctatggcgattggtattttaccactgcgtatcgagaccattgtcttgggtatgcacttctcgtcctggcgcgttcttcttctggccaatgtgtccattcctctgctggctctggtggggattagcgcactgcccgaaacgcccaaatatttgctggtccagggacgtggcgatgagtcgctggaagttttgcgctccatttttgccaataactctggccgagatccctcggagtatccggttaaggaagtggctctggaaagcggtggcgtcagcttgtccgatgtccatggtttcctggacgcagtgcgcctcgtttggcaccagacagttccgctattctatcgcgcgcgactttggcacaccctgaacatctgttgcatccagttcatcatctatttcctggcccagggcatctttatgtggttcccaaccatcctggatgagctgggcacacgtaatggcgaaaatacgctactctgcactgtcctgcagggttttaatattaattctagttcagaggatgaggcgtcgagctgctcggtggaagtggacacctccacataccaggtgatgatcattatcgccgcctgcttcgtggtgatctacctgatctttgcctacatcatcgactatatgggcaaaaagaatctgctgagtgagtagccaaaaaagagcgcaattattgccaatcccctactaatccttgtccatttcagtggcctggatggttctgaccatgatctgtttggtggcactgcactatgtggagcagttcgccctggtggtgatcgccctgaccgttgtgatggccattggcaattgcggcggcctggttagcaccatagccatggaattctatccgacgcatatcaatgccatgggcatgtgcttcatcatgatggtgggtcgtttgggcgctgtggtgggcagcaatatccttggtcgcctgctcttcgccagctgcgatccgatcttctgggccctattggccctggtggtgttgctctgcaccttgggctacttcctgccggagaaggcacgcagccagcagaagaagccatctgccacagcaaaggccattgtgactgccaccactagtcccatttttgctattaactccaagtaggattaggcaccgttaagaagagaggcttcatacagaacattcatttaacatcttatccatcatacatcattctaaatattttcgttttcttaaatactgtatatttaatgtatagactttctaaactacttttttttttaatgattaaatatacatttaacattattatagtcaaaagtagagtacacgtaagctttataaaatgtagcacttttgtaagttccacgctgaaatattcagtgtatttaaaaaaaaaacacatttaaatattagattaaactatttgtaatgcagagttgtggtgatggtaaaaaaagaagttacacccaaatggctaaggaatcgagaacgggaacaagagcagccgccttggaaatgggaaatggattaggtaaatgtttgtgcccattcctccgccagtggcgatggatgttgtcaccgaggcaacaggcacaagtagaagtagctgcattaacattccacgcattcgtcgctgggcgcaggaggcggtggtcacgggattgaggaagactaaacgcattccaagtgccgtcgcatcaccaacttcaacttcaactgctactcaaggtagcatgaggcttgtgcggcatatttgtcacttgtcacaatgataaatactattattctgccaaataaagttatacctatatcatttaaataaattgaaagcattagttttgtccgtagactttttcgctcaagagagtaacgatcattcgtggctttactgcagttaaaacgtatcttttacagggcatagcatagtcgagctcttcaacgagttcttgcccacttgtcggccagtgttgttgtgcgcctcttttattttgtttgtatttattcagcaaaacggtatttgctccgccggctggtcacagtctgcgcctgcgtctgtggcggcacctccaacccgccgatcaggtaggaaatgggcaaccgagcaagtgaacaggtaaccaggtaagcagccaaatagcca

SEQ ID NO: 37709 - DNA, 1590 bp, DROSOPHILA
atggaggggggccgcgaggagaacctgtcggagaagccccgcccccacactttcgaggaggccatcacgctgacgggagtgggccgcttccactacaagttgctgctcatctgtggactgtgctttatgggcgtgatggtggaaattatgggcgttagcctaatcatgaaccagatgaaatgcgatcttcaaccgacgctaaaccagcagggcatcctggcgtcggccggattcctgggcgtcgtactgagctcacatgccatgggctttctggccgacacttggggtcgggcaaccacattgcgatacgccctgtgcatcagttccgtgtgctccatcgtttccgctttctcggtgaacatctggatgctgatcgtgttccgcttcctgacgggcttcttcatttccggcggacaggcgtgtgtgttcagtttgtgcggtgagttccatggcacgggatcgaggatcaggcatgtgaccctgctgtccggattcctttgcatggccatgatctttgcgccagctatggcgattggtattttaccactgcgtatcgagaccattgtcttgggtatgcacttctcgtcctggcgcgttcttcttctggccaatgtgtccattcctctgctggctctggtggggattagcgcactgcccgaaacgcccaaatatttgctggtccagggacgtggcgatgagtcgctggaagttttgcgctccatttttgccaataactctggccgagatccctcggagtatccggttaaggaagtggctctggaaagcggtggcgtcagcttgtccgatgtccatggtttcctggacgcagtgcgcctcgtttggcaccagacagttccgctattctatcgcgcgcgactttggcacaccctgaacatctgttgcatccagttcatcatctatttcctggcccagggcatctttatgtggttcccaaccatcctggatgagctgggcacacgtaatggcgaaaatacgctactctgcactgtcctgcagggttttaatattaattctagttcagaggatgaggcgtcgagctgctcggtggaagtggacacctccacataccaggtgatgatcattatcgccgcctgcttcgtggtgatctacctgatctttgcctacatcatcgactatatgggcaaaaagaatctgctgatggcctggatggttctgaccatgatctgtttggtggcactgcactatgtggagcagttcgccctggtggtgatcgccctgaccgttgtgatggccattggcaattgcggcggcctggttagcaccatagccatggaattctatccgacgcatatcaatgccatgggcatgtgcttcatcatgatggtgggtcgtttgggcgctgtggtgggcagcaatatccttggtcgcctgctcttcgccagctgcgatccgatcttctgggccctattggccctggtggtgttgctctgcaccttgggctacttcctgccggagaaggcacgcagccagcagaagaagccatctgccacagcaaaggccattgtgactgccaccactagtcccatttttgctattaactccaagtag

SEQ ID NO: 37710 - protein, 529 aa, DROSOPHILA
MEGGREENLSEKPRPHTFEEAITLTGVGRFHYKLLLICGLCFMGVMVEIMGVSLIMNQMKCDLQPTLNQQGILASAGFLGVVLSSHAMGFLADTWGRATTLRYALCISSVCSIVSAFSVNIWMLIVFRFLTGFFISGGQACVFSLCGEFHGTGSRIRHVTLLSGFLCMAMIFAPAMAIGILPLRIETIVLGMHFSSWRVLLLANVSIPLLALVGISALPETPKYLLVQGRGDESLEVLRSIFANNSGRDPSEYPVKEVALESGGVSLSDVHGFLDAVRLVWHQTVPLFYRARLWHTLNICCIQFIIYFLAQGIFMWFPTILDELGTRNGENTLLCTVLQGFNINSSSEDEASSCSVEVDTSTYQVMIIIAACFVVIYLIFAYIIDYMGKKNLLMAWMVLTMICLVALHYVEQFALVVIALTVVMAIGNCGGLVSTIAMEFYPTHINAMGMCFIMMVGRLGAVVGSNILGRLLFASCDPIFWALLALVVLLCTLGYFLPEKARSQQKKPSATAKAIVTATTSPIFAINSK

SEQ ID NO: 37711 - DNA, 2270 bp, DROSOPHILA
tcggccagattggccatcagtgccgacggtccgctcattatgccgcttcttatttatttcgagaatgtgctgaatgacccaagcgatatggaaaaaggtggccaatcgcaaccgtaaccgcctcttcgaacgaactgaacacaattgagcaattgctccgactgtccgtggatctggtcttttggttgtgtttcttttgctgttcgtgcttcctcgattttcgcattccgctcgacggttttttgcggtttctttgggtttttggatggcgtggacacccaaagggatggggaggagcgggcgtggattcatcgtcttggcggccacgctaataagattcgccagttgcactttgagtatcccaaccgagcgcaacccattccaatcggatccgcatcacgtgctgcgttcttcgacgccgtcgacgaccacttgacccggttaggcgtcactcctccaatcctgattccgagaccacttcgctttattctttattctttccccttctatacgtttccctcctattctttccgttccgttcaaatgcagattctatattcatgtttggccagcgaaatgaaagtgacgatggtgatgggcagtgtgtctataagatataatcgaattgaaaatcttctagaatattttagttcattcatagtgatttttgactttcgaatagatttgaaaactattcgagttatttgattcatgaatcatatagacatgttattcgtcccttaaatggttccatttccaaattgtttttaaattgttttgtttgaaatatttgtaatatttccttcttttgtagcttgaaaataattgcatattcaagggtatctttcagtcgagatttcaacttggccatatttggcccacctttgctagcattcccaaatccaattagcagcagtctgccctccatctccaacccgccctgcctgcaattgtgaaggtactggtacttaccacccggctgggtcaagtggtcaaatggtcactggtactcgtgcaccttctgcactggatggccgccaatggagacgggaaacttgagatgaatgtccggcatgctggagtcgaagaacatgagatagtagagggccagcaccattcccaggccactgatcccgcccagatacagaaagatcgaaattatccggaaggtcttcgattcgaagaaggctggtggttgctgctccttgggcaggcgcacgtcatcattttcctccggcttttcacccaaatccaaagtggacgaggccatgattaaacgccaactgagctcgcgattccctgccaagcgaaatgcttggttaaaactttaattattccataaactcaagggtttcactttgaatgacactgattgactgattccatttgattggtaaactgagaaaaaacaaaatcagttaaagttaagtaaactttaagatacataaatacctcatgcatgcaggacatatttgttatttgaaatttttagatagacccatacaaaaaagcaatattctcaataattatggcacaacaaacattttctctctgtatagcaaacatggaggggggccgcgaggagaacctgtcggagaagccccgcccccacactttcgaggaggccatcacgctgacgggagtgggccgcttccactacaagttgctgctcatctgtggactgtgctttatgggcgtgatggtggaaattatgggcgttagcctaatcatgaaccagatgaaatgcgatcttcaaccgacgctaaaccagcagggcatcctggcgtcggccggattcctgggcgtcgtactgagctcacatgccatgggctttctggccgacacttggggtcgggcaaccacattgcgatacgccctgtgcatcagttccgtgtgctccatcgtttccgctttctcggtgaacatctggatgctgatcgtgttccgcttcctgacgggcttcttcatttccggcggacaggcgtgtgtgttcagtttgtgcggtgagttccatggcacgggatcgaggatcaggcatgtgaccctgctgtccggattcctttgcatggccatgatctttgcgccaggtgagttactattgaaaaggttaaagttaattacctaaaaactacttggaattgcttttaatgttcttttagctatggcgattggtattttaccactgcgtatcgagaccattgtcttgggtatgcacttctcgtcctggcgcgttcttcttctggccaatgtgtccattcctctgctggctc

SEQ ID NO: 37712 - DNA, 270 bp, DROSOPHILA
atggcctcgtccactttggatttgggtgaaaagccggaggaaaatgatgacgtgcgcctgcccaaggagcagcaaccaccagccttcttcgaatcgaagaccttccggataatttcgatctttctgtatctgggcgggatcagtggcctgggaatggtgctggccctctactatctcatgttcttcgactccagcatgccggacattcatctcaagtttcccgtctccattggcggccatccagtgcagaaggtgcacgagtaccagtga

SEQ ID NO: 37713 - protein, 89 aa, DROSOPHILA
MASSTLDLGEKPEENDDVRLPKEQQPPAFFESKTFRIISIFLYLGGISGLGMVLALYYLMFFDSSMPDIHLKFPVSIGGHPVQKVHEYQ

SEQ ID NO: 37714 - DNA, 2171 bp, DROSOPHILA
tttgcgaaaaatggtaaaaaattaaaaggtcaaattttgaatgccaatcgattgggaattcaattacgagttcaacgaggtatgacaattcatattttgaccaataattccattgttctgtatcacagtgctgactatgttcggtcgaaaaaatcaggaaacaggccccactgtgccgtctggttatcaattgacttcgttgtcgctggtgttgcagttgctcatcctattatttcaacgagagcaagtggcgcacagttgttgtgcttgttgttgcctcagttgctggtgttacagtttttgttgttgcctcgacaatgccaaatgcggcagttggcaaaaatattttatggaaaagtggaacagtcgatgaaacattacaaggggagtctgcataagaaaagtccaggaaaaagccacgatatctctgccgcacttggttgtgtgtgtgtgtgtgagtcagtttttacgtattcactgccacccaagccgcccaagccaccttgcaacacccagttgccacccacttggggcggcgcagcgtgtggcaatcgaagggcgcccacacacgcatcttcccgctgctcggcttgattgcttaccacaactggagcatgggcagtggccaataattgtggagtccgcgtcttgtgggcttggtcagtggcaagcacgcagaaggcaggcggcaggtggcaggtggcaggcggcaggaggggaatagaaagtgcaaacagttagaggacttgtgccacatgcaattgtcaacgaagtcgtctgctgcttctgtaacccagcgcaactgaaagttgtacgtacatacatacatacattcatacaactaactgctgcccagtgtaaacaaacagaaggctgggggaaaccaactggcgaccgacgacgcatgccacaagcagcatcagcagcagcagcaaccatagcaataacaatatgcatggcccaagcaacaacatgagcagtatctgcaacaacaatagaaatggccaaggcaatgctgctgcagcaacatttgggcccaaaaagcaacaccaacaactgcaacagcaacaagcagcaacagcaacatgcagcagcagcagcagcagcagcagcaacggcaacaggcagcagcaacaaccacatgcaacatgagccggcaagctgtacttgaacaagtcgtacttggcatcgtattttggctttggacttggccgactgcctcagtggaggcctcaatgaaagaagaaatttcgctgccgtcgaaggcggcgacgttggcggcgacagcgcgcgctgccgctgctgctgctgctgctgcgcatgcgaagtgttccgctgcgagaaagcaggtgtctgcagcattcggcgcttaaccacggcgcgaagcagacgcgttgctccctctttctgctcctccaggcgcgatcgatcctcgttgctctcagccgcatgcatagcgaaaaacaaaaataacacaaaaaatttccgatatacaaacaaatatatattcgatatatgcgagcgttatcaactgctaaatcgaacaaacaagccaatttacatatgtaaaaagaaaaacaaaaacaaaaaagaaacaaaagtaaataaaaacaaacaaacataaggcaaagccaaacgaaacggaacggaaagaaccgctgggaaaacggttagcaaagtagtgatcaacacgctttttgtgtccttttcttttttttttttttgtttgcattttcttttgtgtgtgctccacttgcgatcgttaattgttgaccgcgtgcaacacgcccccctcctcgcccgctgctgtcattaccagcaacccatcggcaacatcggcggactgcagcagcagcaacagacgcagcaactgcagcagcagcatcaactgcagcagcaacagcaacagcaacaacatcatcattggcgggcagaagtaacggccaccgttcaagtgcaactgttttcgaaagttgccgctaacgcatcctgtttgtcagccttcggaattttgatttcgattcggaattggaattgaaattggaatcggaactttagctgcaacatcacggaatcgcaaatcggaattgggcctaggacctattaataggtgagtgccggcagatgggatccacaaaagccggaagttgccttttgcgcagcggaaacgg

SEQ ID NO: 37715 - DNA, 171 bp, DROSOPHILA
atggccaaggcaatgctgctgcagcaacatttgggcccaaaaagcaacaccaacaactgcaacagcaacaagcagcaacagcaacatgcagcagcagcagcagcagcagcagcaacggcaacaggcagcagcaacaaccacatgcaacatgagccggcaagctgtacttga

SEQ ID NO: 37716 - protein, 56 aa, DROSOPHILA
MAKAMLLQQHLGPKSNTNNCNSNKQQQQHAAAAAAAAATATGSSNNHMQHEPASCT

SEQ ID NO: 37717 - DNA, 4723 bp, DROSOPHILA
tatgggtgggtgttggtattaggggggtcatgcggtatctatgtgtgtgagcgcgtcgatgtgtgtgtgtaaatcagtgggtgagtgagtgggtgttcggttggatggggatgactgtactgtatgtttttgttggtttcattaattttcgtctacttctttgggagttggggttccggtaacttctttccttaagtagggatcttcttgccggccactactttgggaatcttcgcgcgtttgactggcgcttcgggctatggaatttatacagggtttttatttgcgttgtcgtttacataaatgctgatcgttatttgtgttctttattatttggaagtactatgttgcttatatcgttgttttctctactttaaattagtttctttttacctatcgctctacttctaactctctctctctctctctctcacacactctctttttctgtctaattcgagtatcctttttgtttgttttatttccttctttttatctttttttggtcaagtgttgcactgcctgtgtcttaaaatgttacacaaaacatacatacatacataaaatgtgaggaaacgaacatataaaaacacatacataattggttaattgactgaagaaaataatatatatatatataagcgtgtgtgtgtaggcgtttgtgggtgtgtgtgtatttgagagttatgcttgtagtccttgaacttaaacttcaatgcgaaggatattctgctcagcggtaacattcaaatttaacataaatacatgtttctgaatgaagtttagattaataagaagttgcagtgttttaaataaaaatcaacatcgcatgaagtttctcatgttttgaatgtttatgggctctaaataaatatgcgtgttgctgtgtgtccttttaactattttgttttgttatacaatttcttctgtttctgtttcttttcattttgaaatacaaacgcagttggtttttgttttttgtgttgtttttttagtttttatatttatataaatgaaactttgcgcccagcgtttaaaaacctcaatacaattgtctctccgtctctcagtgtggctgttgttgttgttgttgttgtgtgttgctgtctatcggtcttcccgttgtaaactatcatttcaatttatgtttttgtttcgtttacatgcagttaaatggattgtttgttgttgtattcgtgcgtatgtgtttgtgttgtagtatttgttgttgttggtggtgtatttattttattagtttttctacacccaattttaagaatcgatcgattggaacgatcgataatatatcgatattttggttttatgtttggttttattcagacaggcagagacatgattgtattcataatcatattcaggttcaggttgtcgatcggattttatggatgtttgatttgatttggtttggtttttttttgtggtggtggtggtggttggtttggtggttttgtatgtgtggggagagaaaacaaataaaaaagatataatatatttatatgcttagtagttgaatgatcccttggtggcgttgtgttttttttagtcaatatatagaattttagattccaaaataaaatacaacaaaaaaagatgagagagtggggtaaatggtggaaaggatactaatagctagttattaagttttaaatttaccgctcgtagtggcattttaaaattggctgctgcctgcagctgaatttgataagctaagctgtgtattttaaatccatatagcctatgtatgtgatgatcaagttgacgtcgtatcgggcacataaaacaaaagagcatattaacaatgtgcatatacagtaatgggtataaatcttaccttggaacaaactgattagtaggacgcttgggacgatattcgggatgcaccatgaagagcatgtgtggaaatccagtgccgaaataggcgccatcggtatggtggtgacgcgacgattttggtgtgtacacgtcaatgcacttggggcaataggtcttaaccattgcctcgccggggatgtccgacagacctgaggataataatcaaaggattagaccactggcagagcaactagcaactagaaaaagtcagaattcatcggtgaaatctggtacaaacatatttaacctgatttaactcaacatgatatccatcatgatcatttatcattaatagcagaaatgtttacaaggctcgtctagccactttggcctagttaattttcacagaaattgagggaccttgtttagtgaaaccctatcttgcatttgtgcatgcatttgattcagcattgctttatttgatcgttaacaacgtttagggaagtttcggtaagaatttattggagatcgggaagcgttgcgaaggttttaactagggcaagccaagccagacaattaaggtagaatttctattaagaatgcgttgtttttttcttggtgtaagatttcatgggaaagccccaatgatatgctattcaggaaactcaattagaagttgtgccaataatcgcgttgatagtttctggctatgtaattactaggcagaaaagcacgaggttcctcgtagatatgttgttttttttttttttttttagattacaatcaattacgcgcagaaagattcgcaactatgtttgttagctataggtaagagcgattgatcaaggatctggttacgcacccaatggcagcatgggctgactttcacagtagacacgtggacaatgtccgaaatcgccagtttgatatttctcgatcatttgagcgatgccgcgatttgttagtatatatctggcgtgtatgaggccgtagagcatctcggcggcctgctcggtcatgtcggactgcagtggattgtcctcgagctcgtcctctgtggatggtaaggcgcattagctatatacattacaattttggatatgggtaacagcccattctaaacttacccggttccaagtccaagatcatgtccaacgcttgccgatagttgggtacctgctcatttaaaccagttaaattgaatttatcctgtatgtagtcctcatccacctggaatcaaaagcgtatgcaattaggatctgtactggaatatactgtcatatatccactatatcgtgtgttatctggacatgtgtgtacagttgggctcggtattgccccaccttgcggcacacacgcacacacacacacacacacgcgcgcgcaaaggcagagattgagggctgcactttgcaattgttgcacttatagcgcgcgcttagataacgcgattacagcgaagaacgcgggtaattcgtcgttgatgctgatatgatgatgatatctcacctcgcagaagaactcattgccacgaagtccacagaaccaggtgacccaggagacttcctcggagctgctcattttgctgcaaagataagcgaatggagttgctaattcatattttcatcgttttttttttgctgacaaattatcctgcacacgcataccacacatgcacaccgcactctcacacacacaggcaatcatggcacacacactgggacaaacgctcacgcactattacatacattaaggggattattttgcgtaatttgggctggcgtgcgaaatttattgttaaaatatcttggaacggaatcttggcactttcttgtctaccccaccccccctgctttcttcacgtttccttttggttccgcttcttgttgctcgcacaaaccacactctctttttccgcttttttcttctttcctcctctttttttttggttggattggccttttggggtttttgttttcggttttccgtttaattcgcgttgcttgtacaatgttactagttttcggtgatcgcaccgttgaaattcgtgtggtcggggggcataaaaataaatttttatactcgtattgtgacaattgacaagcgctcatacaaaatgtgccgagcagcaagaagaagcacacactgttggaaattgagaaaaaaagagacacatatacaggggccaccacacgcacacaagcaaacacgcacaccgcgaagcgcacatagggacgtgcacacacgcacgcctttacaccgatgagcgcaatccaacgcacaccaacttgctattctgtatttttcccgctgcggctatcttccagtggccagcactcacccaaattgttaataattactcaaattgatcgacttttgtactgcagctgaaccggtaaaggcaaatattgtagcgaagacgatgatatcaggtatgcaatctcgactatcgattaccgctgtcctgcgctgtccgcaggcgattgccaatcgatgtggcgccgtgtcatcgctaagcgatgtatcggctaatcgggattgcgcgtttcgcaacactggttcggaaaagcaattaaccaaacaaaacgcggaattatttgttaaataagcaaatcaagccaaatattaaaatattgtttattaccagcatttagttggctgttttgccatttgtcaaataatttaccgattgcagctagcaatattttcttacaactactttaaggtattatttcgtttagttgtatggtaacactatgttgaaagtttgaaatgtttgaaagtgcttatttaaatttgtattattgacaaaataaatcgggttttcgtataatattttctcttagttgattgattagactaataatacaagaacgagcgataaacccac

SEQ ID NO: 37718 - DNA, 1041 bp, DROSOPHILA
gcaacaagaagcggaaccaaaaggaaacgtgaagaaagcagggggggtggggtagacaagaaagtgccaagattccgttccaagatattttaacaataaatttcgcacgccagcccaaattacgcaaaataatccccttaatatgagcagctccgaggaagtctcctgggtcacctggttctgtggacttcgtggcaatgagttcttctgcgaggtggatgaggactacatacaggataaattcaatttaactggtttaaatgagcaggtacccaactatcggcaagcgttggacatgatcttggacttggaaccggaggacgagctcgaggacaatccactgcagtccgacatgaccgagcaggccgccgagatgctctacggcctcatacacgccagatatatactaacaaatcgcggcatcgctcaaatgatcgagaaatatcaaactggcgatttcggacattgtccacgtgtctactgtgaaagtcagcccatgctgccattgggtctgtcggacatccccggcgaggcaatggttaagacctattgccccaagtgcattgacgtgtacacaccaaaatcgtcgcgtcaccaccataccgatggcgcctatttcggcactggatttccacacatgctcttcatggtgcatcccgaatatcgtcccaagcgtcctactaatcagtttgttccaaggctatatggatttaaaatacacagcttagcttatcaaattcagctgcaggcagcagccaattttaaaatgccactacgagcgaaaaactaataaaataaatacaccaccaacaacaacaaatactacaacacaaacacatacgcacgaatacaacaacaaacaatccatttaactgcatgtaaacgaaacaaaaacataaattgaaatgatagtttacaacgggaagaccgatagacagcaacacacaacaacaacaacaacaacagccacactgagagacggagagacaattgtattgaggtttttaaacgctgggcgcaaagtttcatttatataaatat

SEQ ID NO: 37719 - protein, 215 aa, DROSOPHILA; identical to SEQ ID NO: 27639

SEQ ID NO: 37720 - DNA, 2720 bp, DROSOPHILA
tgagattccttcgcaatccgttgcgtaagaaatgtcttccgccaatgacctgaacttgcgatgaggacgggtagattacttgtacgccaggtgatccaaaaacttggtaatcctgtcctgcaatcgtgttagcttggagcagcagagcaagaccaatcaaagtggctaacatgacggagttattagttaggccttcttagttcgagagttctttttaagattctgccaggcactgttggttgccacctcttatataatcaaaggcgaacacttatctaaattgttattaatggatcgatatgtggggtcgaacgcctataaatttaagtcaattcggttggccaagacatatataccggtatcaacttgtatctagaagacatatattctgggcacgccagattacattaaagattaagttaacgcgggaagtgaccttttgcgtaggtgaccttttccatgaagagaacgttcaattggtagccaaatcatttatgagttaacattttttcttaaaactatccccctttatagttgtaaacaactttctttggttaattgatgtttgacatgtttttactcccaagaattccacgtttgataatcttccgcggattttatcggcaccagtgaagtttattccaacagctgccacagagtaataaaatagatttaatcacttttcagctggccagctgggtttttggcaacaaaaatgctgaaccgttagctagctaatccataacgccgatctcaacaaataaaagctagtaacttgttgggcgtgttatgagctgatttaaatagccaaactaatttacatgcagacttggcagacgaagtgactagacgttttttttttttgtgcaaaagtttggactttttaccagaatatcatttgaaaacttttaagaactgggttaatgtttatgggcaataacttaaagggttgtcttttgcatttcttttggcgaatgtgacaagtataaaagcgcagctgatgccatctgtcaatcagttcaaagcgaacaccctcttcaccatgagcaccaaactggtactcttcctgtgcctggcgctcttcggagccatggcaatggccattcccctggaggagaatcttgagcagaactcggaggtggagaacagccaggagttgaatagcgtcgaggagaacgacgccgaggcggatccatcgacgtggcgtaagctcttcggcagcgaaggcagtgccggcaacctggtcgtcagcttcccccagaccaccactaccaccaccaagaaatccaagacgaccaagcggccatactacccgtacccacccaagtacccgccctacccgccttatccacactactcaccgtacccggctccaccgtacccctatcccggctactatccacctcccccaccaccgtatccatatccatatcccggacatggtggacatagtggaagcggcggacatgatagcggacacggaggacatcatcaccacacgactaccaccaccaccacaacgaccaccaccaagaagcccaaccacggacagtatccaccaccaccaccaccaccaccctactacccgccgtacccatactacccacccccaccaccaccaccaccactaccaccaccgagcaacgattccggtgaatccagcgagacttccgccaagatttgcaagaagttcttcggtattggactcatctgcacgtagattatagatctttcgatcaacatttaaaaccagctcaatatttatttatttctaatttattaatcgaataaacaattggcgaacactcaacttgtttttagtggcattgaaatttttagcttgagtttcatagagtttccatttcgcaaatgcactattaaatttgtttgcatccaaatttccagcatcaatttaacgtgccctgcggcatttcacacttgtcatcttgaagacatattcatttagaatggtcccacaagatttgttcgaattgatacaaaatctcaataaatatggttaggctgtcagtgggttcaacgttttgtgtcgccacaggtgccgtggagattggtttcctaattgacagcgacagcctcattaacatgattgtcagcaaacggcatatctgagtttaagctttcatttggctggcgatgaacattttccattcccctgagacactctttacacattcaaattcccctttctgtgggccagccaagtgagatgaagtcgtaagcaggccggctgatgacttcattgccagttaaaggtggtcgcgctcattatagagataaggttcgaaacctattgttcgttgacgtctgtcatctaatagtcggcttatttatcgggatcttgtgcgccgactttctggcgacactaattaaatgtccgccagccattactaaatcaaaacagatccctggcgaggaggacaaacaaaacatccaaaaagatggcgatagaatggccagactagttaaccatttccttggctctcagtgttgcgtgttccgaaaatcgtaaatttcggatgttgttaaaaaagtttttggcagcggcataaatctgcggccaacgggacaacagcatccacggcaaagtcagttcactaacgagccaaaatcgttgactggaaatccttgagtacagaaataatgcctataaatatgccgaagcagttgttgttgtctatgcccgcctctgcccttttgtg

SEQ ID NO: 37721 - DNA, 720 bp, DROSOPHILA
atgccatctgtcaatcagttcaaagcgaacaccctcttcaccatgagcaccaaactggtactcttcctgtgcctggcgctcttcggagccatggcaatggccattcccctggaggagaatcttgagcagaactcggaggtggagaacagccaggagttgaatagcgtcgaggagaacgacgccgaggcggatccatcgacgtggcgtaagctcttcggcagcgaaggcagtgccggcaacctggtcgtcagcttcccccagaccaccactaccaccaccaagaaatccaagacgaccaagcggccatactacccgtacccacccaagtacccgccctacccgccttatccacactactcaccgtacccggctccaccgtacccctatcccggctactatccacctcccccaccaccgtatccatatccatatcccggacatggtggacatagtggaagcggcggacatgatagcggacacggaggacatcatcaccacacgactaccaccaccaccacaacgaccaccaccaagaagcccaaccacggacagtatccaccaccaccaccaccaccaccctactacccgccgtacccatactacccacccccaccaccaccaccaccactaccaccaccgagcaacgattccggtgaatccagcgagacttccgccaagatttgcaagaagttcttcggtattggactcatctgcacgtag

SEQ ID NO: 37722 - protein, 239 aa, DROSOPHILA
MPSVNQFKANTLFTMSTKLVLFLCLALFGAMAMAIPLEENLEQNSEVENSQELNSVEENDAEADPSTWRKLFGSEGSAGNLVVSFPQTTTTTTKKSKTTKRPYYPYPPKYPPYPPYPHYSPYPAPPYPYPGYYPPPPPPYPYPYPGHGGHSGSGGHDSGHGGHHHHTTTTTTTTTTTKKPNHGQYPPPPPPPPYYPPYPYYPPPPPPPPLPPPSNDSGESSETSAKICKKFFGIGLICT

SEQ ID NO: 37723 - DNA, 3210 bp, DROSOPHILA
tatttaagcgatcttgcatcgcatagagcgtctctttcgctttcagattttttatttagtttattttatttggcgttcacttcactcaaaacaaccgattttgtgcggagcactgataaaaacgtcttcacacgtcggcgatcgaattatacatgtactttatacttaaaattaacttgataaattctaagttctacgtcttccaagctgacggtcgacgccttcagtggtgcaaatgctaattagttcttataattaccatttacccgagttttagtctctaaacataaaccattcccgggttcttgtatcaattatataacaaaagaaagcccattagttgttcggatgattttgttttgactttattgaataaattaaatgttggttgtctgaaatacattaaagttgcttttctatttctttccctcatatccgaagtaaggagatggctgagccctgcggtaaatattctgatatggaatatacacaggctcggactgtgcatcagctgatgccactgcggagccacggacgtagatctgattggaactgatgcgatgcagatcgtagggattgaccagagagctgtgcacatagcggtagggcagaggagtggtttgaatccgcgcattttgcaccgccgtggaagtggtgtccgtgtctgcgggtgccacagcagtggaagtggtcggagatgccgttgttgtggtttgagtggccacggcagtcgaggtggtatcggatccatcagaagtagccactgctgtggaggtggttggagatgcagtggttgtggattgggtcgctacagcggtcgaagtggttggtgatcctgtagatgtgggaatggcggtggacgttgttggagttgccgtagaggtaggattggcggtggaggtcgtagacgtagacgatgtagtgtcgggagcagcagtcgtcgaagtcacttggttattattattattatttaggctggctaagtaaaggctatacaaatacgcgttgtaagccgcctgagcctcgtagtactgctgccactggctgctgtaatactcattcaggtaagcctcgtattccgcttgagcattgctgttgcttgaggaactaggacgtgagccacctcctccaccacctccgccacctccgccaccgcctcctcctgttagagccgagactatgcttcccacggtgtagacgggaaaactgaaggactgaccccaggcctggccagtcagcagcaagaccaatccaatggtcttaaacaacattatgaagagagtttctacggtgctccggttagttcagaactaatgtgatggctccatgatgcgaacagttttatacagttggtcgggtgtcataaattgaattgtgtctgagacctacataggaccggactaaaacacgagctgcagatcaaaatgcgatctgggcttggtgtggagacccaaagcgatcatttgaatttttattgttttggctcgcgaaatcacagaagtgaaccgaaagtttatttcacataacttagtagactaatgggctaacatagtcagcagagttctacttaacgaaccaactgcaaaacaaagctattttacaaaccatctttccctatgatttttattttctttattgataaaaatagtaggctagccaactcgataataatagggcgtaggcccatatataggtctatagtaaacggtactagttggaggtctataatagagggcagggttttgttgcggattcgcagccggacgtttggtagtccgctgcagaattttgttaaccggctgctcgacatcatccaaatcgtacttgatgcgcgatccattcttaaagtctatataatcaacatcttcatcgttatcagatccatcggcatctttttgtacagccggctttcgagtggtagtagtcgcctgggcaatgaagtctgatagaacggcgggcgaaattgtgggagatcctggctgctgtaagcccagaaggattccttgcagaaactgctctcgtacctcgttgttggattgatcagaattcacgatctcatccgactggggctttttcatgatcgcactgttcgtgttagccggtgtctcatcttggggccttaggatgggtatatgtggctgggctgccgatagcgccaggatatatagccagggtattgctgttcgaatctgctcctgtcccgagttcatatcacttgcatttgccaaatggctggccgcgaccactgaacacagtagaaatccgatctgtttcatatcgaaacgcggtcgactttaaactaagtttgtctgcccattcggcttgcatatttagcaaatgtctgcaccgtaagatattaaaatgctaatttaggttcattaataagttggcgatcagagaaatagatcgcgtctctcttagttttctttattttctttgtgttgtttatctgttttatttgtttactatcggttaatttgaactgaattagcagcaaagatgcctttgcgacaggtgctttttaatgggcctattttgctatgaaatcagagtttgtattttgttttcgcttatagatctaaaggaatgtacacgaaatctcaatttgtttggtaataaagaattaagtaagtgtaagtttattttttagccacatacttaattggctgttgtaattgcagtggatatggttggagttgccttatttgtggcttgcgtcgccgtcgatttggtttggttttctttcgagttaaaaatcgcactttaattggtagaaattgccgtagtcgtcgcagtagaggttgtaggaatggatatgactgtgcttggggctgcgttggcttagggcgattgcggtgtccacgatgaccatggtgtgcacggtatttatagggatcatataccgcatatggtccgtagctttcgtagggactataaactgtgtaaagtccataatattgattgtaggccgcttgagttagatagaactgctgccattgattgctgtaatactcgttcagataggcattgtaatccgacagagtcttgtttttatgattgctgatggattgtttggggcgagagttaagaccgcttgagatctgaaagcccaaatctttaagatctatacgcacgagttctcccaaggactgaccgatgaacataagaagtaggccgactattttaatcgacattttatttaaaaaaaga

SEQ ID NO: 37724 - DNA, 1257 bp, DROSOPHILA
atgaactcgggacaggagcagattcgaacagcaataccctggctatatatcctggcgctatcggcagcccagccacatatacccatcctaaggccccaagatgagacaccggctaacacgaacagtgcgatcatgaaaaagccccagtcggatgagatcgtgaattctgatcaatccaacaacgaggtacgagagcagtttctgcaaggaatccttctgggcttacagcagccaggatctcccacaatttcgcccgccgttctatcagacttcattgcccaggcgactactaccactcgaaagccggctgtacaaaaagatgccgatggatctgataacgatgaagatgttgattatatagactttaagaatggatcgcgcatcaagtacgatttggatgatgtcgagcagccgaccattggattggtcttgctgctgactggccaggcctggggtcagtccttcagttttcccgtctacaccgtgggaagcatagtctcggctctaacaggaggaggcggtggcggaggtggcggaggtggtggaggaggtggctcacgtcctagttcctcaagcaacagcaatgctcaagcggaatacgaggcttacctgaatgagtattacagcagccagtggcagcagtactacgaggctcaggcggcttacaacgcgtatttgtatagcctttacttagccagcctaaataataataataataaccaagtgacttcgacgactgctgctcccgacactacatcgtctacgtctacgacctccaccgccaatcctacctctacggcaactccaacaacgtccaccgccattcccacatctacaggatcaccaaccacttcgaccgctgtagcgacccaatccacaaccactgcatctccaaccacctccacagcagtggctacttctgatggatccgataccacctcgactgccgtggccactcaaaccacaacaacggcatctccgaccacttccactgctgtggcacccgcagacacggacaccacttccacggcggtgcaaaatgcgcggattcaaaccactcctctgccctaccgctatgtgcacagctctctggtcaatccctacgatctgcatcgcatcagttccaatcagatctacgtccgtggctccgcagtggcatcagctgatgcacagtccgagcctgtgtatattccatatcagaatatttaccgcagggctcagccatctccttacttcggatatgagggaaagaaatag

SEQ ID NO: 37725 - protein, 418 aa, DROSOPHILA
MNSGQEQIRTAIPWLYILALSAAQPHIPILRPQDETPANTNSAIMKKPQSDEIVNSDQSNNEVREQFLQGILLGLQQPGSPTISPAVLSDFIAQATTTTRKPAVQKDADGSDNDEDVDYIDFKNGSRIKYDLDDVEQPTIGLVLLLTGQAWGQSFSFPVYTVGSIVSALTGGGGGGGGGGGGGGGSRPSSSSNSNAQAEYEAYLNEYYSSQWQQYYEAQAAYNAYLYSLYLASLNNNNNNQVTSTTAAPDTTSSTSTTSTANPTSTATPTTSTAIPTSTGSPTTSTAVATQSTTTASPTTSTAVATSDGSDTTSTAVATQTTTTASPTTSTAVAPADTDTTSTAVQNARIQTTPLPYRYVHSSLVNPYDLHRISSNQIYVRGSAVASADAQSEPVYIPYQNIYRRAQPSPYFGYEGKK

SEQ ID NO: 37726 - DNA, 2876 bp, DROSOPHILA
aactttggcagtcaggacgcaggatgcaggacccgggatgccccgcccaggagtcctgtctctgctaggtatttattccagttgcccagccttcgagtcctgtgtgcgcgctgtgtgtgtgtgtgtccgtgtctctcagtgtttgtgtgtgtgtgtcctggcacaaagccccataaaccgacatcgttgtgtgtcccctgtccttgtcgtgggcctatctgctttatggctcaccgcttccagtgcatccaacgtggtggcccaaacaaaaggatcccacattcatggcctgtgggggtcacaatttcatgggccctgaaactgaatggctcactttggggcaacaaaactttggcataacagagcctcggacgcacacggtcgtaaatgtgccagttagaagtgtaactgacctatccttgcaaattaataatccgaaccacttcgagtgcctggtcatcgggcattcgagatgccccgccaacaatcgagagcactgcacctgacttgcccagttatccaagtactgattggattaggctcgtgcccaatatggattgctcaaagtgacgggctctggccagagattccagcctgttgagtaattaataaataagtgggtcatgcaatgaggcaactaattgagaggccaaacaaagcatgaaatcaaagcctttgccacgtgatttcctaatccatgcaggctagcgtgtaggtataattatgtcgctagactattccttataagaaaatgaataatgtgaaattcggtcacttctttcaataactcactctgtttataataaaagtattaattttgcctttgaatatagaccacagatttattccacagatttttaaaataaaaatattctgacttctggattttgttgggcaagccctttatccctccctaatcgtattaatcagccttcaagattcgcgaccacatgctcttctggtcttataaggacttttaactggtagaatgttcttaccgatgatagacttatgctggctgaagttcatcagagcatttggcctggtgatgcaactggcggaggaatcaaggttcatcatgatgctaatcagctgcacgatggccgtggcctttatcctgaatctttattcgggaagaaccatttttcaggatgtggtcaatgcagtgggcaacagaagactcgaaatgaagctggccaagcaaccttccccaattactataccggaaagcaatatgatcaaaaggcagctaaagatgcccttacattggacgtactacgaggatcttccgatggcgactgttctggaaaacaacggaaacactgtgatcatgcggatatacactgcgaacaattttatgccccagcttagtggagctgagctgcttggtagataccaatttgtggaggcgatcttcaagtggggcagcctcaagtccgagcattcgattggcaagcataatttctgcctggagctgcaggcacttcatcgatgcgctcagctgaataacaacttcgaatacctcaccctgtcctatctctttgcactgagtcacgtcaagaacgagcacctcaagcaggtcaccgatcatctcaaatggatctcgcagccaggatcatcgattgagcttccacccttccacttggagtcactacttcaaccattcggatctggttacttttcctacgagggcacctacgacaacggagatgtcgttctgcccaccacctggttgatcaaccgtaagatatccgtggtcgactcgcgtcagttgtccgagtttgaggcactgtacggaaggaatggcaacaggaactgcaagaatggtcgggagaaacagcccttgggcaatcgtaatgtgtactttaatatctaataccttaatatctatatcaatacaatcataatgcaatgtaaagaaatgtagaatcaaaatgaaatcgttccatttgattgccaataaacttattgaaaacaaggcaaagggtttttataaatatattctaaaaagaatgcaaaatatatgtagatttttagatacttcatctgaaattccctatgcagattgaaggtaaaagtgaactttttcgtcctgattttgaatgcattgcctttttttcaagctgaaactttaacgccgtgcgacgtgcatggaaatgcggtgagctcaagagtcctttctgctcgaggagcagttaggcaattcggttcgtgattcgcaccccatgagcagtcagcatcctggccagctagttgccctgttgaccgactgtctgcaggtgcagccaggcaaattgtcaaagcacagggggggaggggggaggggtaagcatgggcggacaggaaccaaactggggaatttgttcatttcgtttcggggctgggtataaaaaggatcggagtatgcctcgcagctgcaattgctaaaacagttgcgaaaattttcgaaattaattttcaataaacgcccgctggccaaaaaaaaaagggaatcaaatactgattggctaaaagttacgctgaaaatcactttgaatgggtagcggggcagcctgaaactgaacgatttgccccaaaagcgaatggcgaatctgcaggaggtagagattcgcttattgacttgccaggcagcacccacttccaccgcaaaagtagccagcatagttggctacttcaaaagcggcgcaaattgttcctgcgtagccgggaattccttcgcacgaatatcaaaaggattagcttgggccccagaggtcctggcggctggactataaatttatatatatagatatatatatatgtatgtatgtatatgtaccttgtcgccggcagacattttcaactagcaactcctattacgatttatttcaggcgta

SEQ ID NO: 37727 - DNA, 876 bp, DROSOPHILA
atgatagacttatgctggctgaagttcatcagagcatttggcctggtgatgcaactggcggaggaatcaaggttcatcatgatgctaatcagctgcacgatggccgtggcctttatcctgaatctttattcgggaagaaccatttttcaggatgtggtcaatgcagtgggcaacagaagactcgaaatgaagctggccaagcaaccttccccaattactataccggaaagcaatatgatcaaaaggcagctaaagatgcccttacattggacgtactacgaggatcttccgatggcgactgttctggaaaacaacggaaacactgtgatcatgcggatatacactgcgaacaattttatgccccagcttagtggagctgagctgcttggtagataccaatttgtggaggcgatcttcaagtggggcagcctcaagtccgagcattcgattggcaagcataatttctgcctggagctgcaggcacttcatcgatgcgctcagctgaataacaacttcgaatacctcaccctgtcctatctctttgcactgagtcacgtcaagaacgagcacctcaagcaggtcaccgatcatctcaaatggatctcgcagccaggatcatcgattgagcttccacccttccacttggagtcactacttcaaccattcggatctggttacttttcctacgagggcacctacgacaacggagatgtcgttctgcccaccacctggttgatcaaccgtaagatatccgtggtcgactcgcgtcagttgtccgagtttgaggcactgtacggaaggaatggcaacaggaactgcaagaatggtcgggagaaacagcccttgggcaatcgtaatgtgtactttaatatctaa

SEQ ID NO: 37728 - protein, 291 aa, DROSOPHILA
MIDLCWLKFIRAFGLVMQLAEESRFIMMLISCTMAVAFILNLYSGRTIFQDVVNAVGNRRLEMKLAKQPSPITIPESNMIKRQLKMPLHWTYYEDLPMATVLENNGNTVIMRIYTANNFMPQLSGAELLGRYQFVEAIFKWGSLKSEHSIGKHNFCLELQALHRCAQLNNNFEYLTLSYLFALSHVKNEHLKQVTDHLKWISQPGSSIELPPFHLESLLQPFGSGYFSYEGTYDNGDVVLPTTWLINRKISVVDSRQLSEFEALYGRNGNRNCKNGREKQPLGNRNVYFNI

SEQ ID NO: 37729 - DNA, 4182 bp, DROSOPHILA
actaaatatactagattgctgagcataagcaaattctatgttctggtgtgcacacactgcaaatgatctcagctgatcagctgttcgaaaaacgaaaataaacattttaatttaaaagccggcatacaatcaacaaaattgtgaaggattctagctgttaaaggtaactagtggcacatttttagcgacttgtggaaaaagcaagctgagcattggtatttatttatagaaaagcagaggaataagtataataaaacttacaaagaattcaaagaataagaaacatcctttaaatgatcctttaagacaaacatttttatacaactaccatgccaatctaatacaatatataaagacaatccgaagttaatggagaaaaacaaagtgttaagtgattcttaaacaaaaatgtatagtaataataaagtacagaattgtatgtcgattaatcgtacttacatacctttatattcctttatatgaactgttcaatttcaacatgcattccctgcattttttcttcatatattactttcctgaaaacactttaaactgtcaattttacgtattttatcagagcctggcgacctgactttcaaaccggcgacgacttcccggctgctgcatcttatcgccggccaataaatgtgcataaatgcgcccacgacaggacgagtagggagcagcgaggagtggtggagcagtgaaacagaaacagccgcagaaacagaaacaataacaatagtaaagccgcaggactcgaccacaacaagccacaatcggcaatcatcaacactggcgcgccgcagaccgagcagaaggggtcagaggtcggtggtcggtggtcggtggtcggaggagcaggcgcttgctgacggcgccagttgcattttgacaacgacaacgaaccaaaaacacccgcgcacaggccatgacagccgaacgaggaccccgctccccgggaacggggcaaaaactaaggcttagagccactgagccaatgccacagtggacggccaaaaatctgcacgccctgctggatctgcccgcggcgatggaactgcgccaaattgagttgatctatcgggcggagggtaatgcaaatttggtgctcgccctgccgcaatttaaaaaagttttacgtttgccaaaaatgatatccagcagactgcgccaggcggcgcaccagcggcacgagctggcggatgaggttgctcggccggaagggcagcgtgtctcatccgaaagagctggaactgaaaatggttcgtatacacgagccgataaaatggaacctgagtgtttgaaatgcatgaatttgatatactcaccttttaaccacatatgtgctgttattttctaactgaattcaataacttttccattggtcacatatattcaagaatattataaaatattatagagttaatcatatatttcttcaagtgccgaggccaggctgttattgttagctgggctcgctggagctttccttttttgttggaccggaaatggttgcgtgcaacatcaaacacccagacaagctgctgctgctccatctcccggccacttggagcattgtgctctgcttattgcctgcctggctggattttgatccaccgccaaccgccgcccacttccttttccctttgccctttgccctttcggatatctctctatctctgtgcatcttttggccattgcatcaaatgtgtttatttcatttatccacatctcctctatgttgccctatgctctccgtgctgattcctcgcctccacctccgactcaatctacagctggcgacttgacaatgccggattttatggcttatatcgggataatgcgccgtctattaggaaatgagtttgtctgcggagcggatattgttgccataccaaaggaagacgatagattctggataaacgagcatatacgcgcccaaagaccgggtaagtgcactgtgcaaaaagaagtatcctaacttggccataacatcttgagcttaagcacttgttgactcgaaaacagaagcagttacatgttcaatttattaatttagtaaaccaattacaagggcttcttacaacctctcaggtttttcgaagttttcattactactgaaaaggaacaagatgaaggtttttcaatccaagcgattagattagattgtgatagatttatatctgaaccttcttactttttttttctgtgaagctatagttagggtttgctaaaccgaaaactattcaccgatggagcatttccaagcggatctccagtgtggcattttgtgttagcgccatcccgctgtggtagcaaattttgtatctgagcagcttttgctgcattgcctccctttttggcctttgccatcgcctttgcgctgcagccgcccttttcatcctggccggtatccaaagccttttagagccactgcaatcaatcataaacgagcgttttaggaccgcatcccacgtctacccatcgccagttcctttcactgacgcgctcggtatgttgaaggatccttttgctccagtttcagtttcagttgctgttgcaactggcgcaccaccccgtccacatgggactgattagtggcggacggcgtggtcgtggccatatatcaaaatcgggtttatgcccggcagccagcaacaggctgcctgctgcaaaactgcagagctggccagcgatttatcattcaccttcgcattctaacccaccgccatcggcgtctatatatcaataatcgccggatgctggcgcttgcactttacattcattcggcaacagccatccccatcccatcccatttcatcccattccatcccatccggttgcatgccccaattttgcctgacttttccgcctttcactccgtctgtgctttccaacccgttgcagtttcgcgtctggataaggaatttgtggggccattcggcctgctgctgccagatgtgacccaattgcctgccacgttcgatgttttacttgccaatttacaggtgagttggtcgtcgtcagctgctccatctcttgatatagatcctgttcatggtcctgctactgctccttctgccgctcctgctccattcccccagcaacggaatgctgaggctgctgtttttggggcggagtcgtgtggctcctgctgccgctgctgctcgtccaaataaattgtgtattttgtacaaggacaatattggcatttttggccatatgtgctggacacgttagccaaagcagccgccattccgctcctcctgctgcggtgtagtttgcctttgtgccgaggcatcggaggctaacaaacccacgagtgccacctacgccgccatccaaattcgtagctaaaccctggccgaggcccataaatcagcggttctttgttttgaattaaagtgggcaacagtgtaaacactttgttggcgttacttgcaaccgcgtcccacacccaatagcagccactggccaattcgattcgtttggtttcgtttgggttctgggttttggactttgggctttgggttttcggacttgtgcggttataaaagatgccgaaattgctttgaaagtgccgccatagctgcaagttttattatttgccccatgttccacgggaaacgggcagctatgtacatcgggtagcttagctagcaggtggtcgggtagcacaccccttacaggatcctagggtactcccctgttcgatcatctgctggcgggcattccttttatttttttttgcaattttttggctatttgttcgccgtgctcggtgggtacatattgaatttatggctttggtgccaaagcattgaccgaaataaaattgccagcaaaggaaacaaacagccagtggagcaggggcagcaaaaaaaaaaagaaaaagaggccatagaaagtggtacatatgtatataaaacgtggccataactaaggccatattggctgttcgttccatcgcacgaagcgcattgcgggcggacaaaaatatggcaaaaaaataaggtgagtgctggaaaaaaccctttaattgcggctttaaatgttaattttcaatttcaagttgggaagcgcgaatggagaactccgtccatgccgtgccgtgccggccggtcgtcggcttcataactcatcatacaatcagcgcaacaacttttgttttatgtcaca

SEQ ID NO: 37730 - DNA, 690 bp, DROSOPHILA
atgccacagtggacggccaaaaatctgcacgccctgctggatctgcccgcggcgatggaactgcgccaaattgagttgatctatcgggcggagggtaatgcaaatttggtgctcgccctgccgcaatttaaaaaagttttacgtttgccaaaaatgatatccagcagactgcgccaggcggcgcaccagcggcacgagctggcggatgaggttgctcggccggaagggcagcgtgtctcatccgaaagagctggaactgaaaatgctggcgacttgacaatgccggattttatggcttatatcgggataatgcgccgtctattaggaaatgagtttgtctgcggagcggatattgttgccataccaaaggaagacgatagattctggataaacgagcatatacgcgcccaaagaccggtttcgcgtctggataaggaatttgtggggccattcggcctgctgctgccagatgtgacccaattgcctgccacgttcgatgttttacttgccaatttacaggtgagttggtcgtcgtcagctgctccatctcttgatatagatcctgttcatggtcctgctactgctccttctgccgctcctgctccattcccccagcaacggaatgctgaggctgctgtttttggggcggagtcgtgtggctcctgctgccgctgctgctcgtccaaataa

SEQ ID NO: 37731 - protein, 229 aa, DROSOPHILA
MPQWTAKNLHALLDLPAAMELRQIELIYRAEGNANLVLALPQFKKVLRLPKMISSRLRQAAHQRHELADEVARPEGQRVSSERAGTENAGDLTMPDFMAYIGIMRRLLGNEFVCGADIVAIPKEDDRFWINEHIRAQRPVSRLDKEFVGPFGLLLPDVTQLPATFDVLLANLQVSWSSSAAPSLDIDPVHGPATAPSAAPAPFPQQRNAEAAVFGAESCGSCCRCCSSK

SEQ ID NO: 37732 - DNA, 2649 bp, DROSOPHILA
ttgttttgaattaaagtgggcaacagtgtaaacactttgttggcgttacttgcaaccgcgtcccacacccaatagcagccactggccaattcgattcgtttggtttcgtttgggttctgggttttggactttgggctttgggttttcggacttgtgcggttataaaagatgccgaaattgctttgaaagtgccgccatagctgcaagttttattatttgccccatgttccacgggaaacgggcagctatgtacatcgggtagcttagctagcaggtggtcgggtagcacaccccttacaggatcctagggtactcccctgttcgatcatctgctggcgggcattccttttatttttttttgcaattttttggctatttgttcgccgtgctcggtgggtacatattgaatttatggctttggtgccaaagcattgaccgaaataaaattgccagcaaaggaaacaaacagccagtggagcaggggcagcaaaaaaaaaaagaaaaagaggccatagaaagtggtacatatgtatataaaacgtggccataactaaggccatattggctgttcgttccatcgcacgaagcgcattgcgggcggacaaaaatatggcaaaaaaataaggtgagtgctggaaaaaaccctttaattgcggctttaaatgttaattttcaatttcaagttgggaagcgcgaatggagaactccgtccatgccgtgccgtgccggccggtcgtcggcttcataactcatcatacaatcagcgcaacaacttttgttttatgtcacaacagcaacaggagcaggagcaggagcagcgataacctggccaaggacctcgatcccaacccatgcgaaaccatggtagctttattcatgatggttgcttcccatttttttttacgtgctgcgctcgccgctgcattttcaagtcaaaatggcatcaacgacggggcaaaagttcgcggtacacggcaggcataatatttcatggcaggacatgccggcaccttccttttactccatttcctcggagtcgggatcgggatcaggggaacgtggcaaagaggcgagagcaaataagcgaaacgatataattttgcaggcaaagggcacaacaggagatgaaagtggagctgcagcgggcgtaggagatggcggtggcgttggccgtggagcaggaacaaggacgaaaaacaggagcgctgtccgtcgtctgggcgatacatatgccatcgaaataaaacccaaacaaggctggcttcagttggcaagtgatgtcaacgatttatttgatttaatgccatcgggggcagtgacaaagccaaaggagacgacctgcaatcaggaggagaatgagccctctgcccgggacaagtgctggtgtcgcttttgcagcatgcaactgctgaaggtgagtggggacgatgacgagaaggcagtctaacttactcattcactaccttcgacagatgcacaatgggaaaatcaaacgtttgggccactactgtccgctggatctattttccgggtatgtcgacaagccctgtaaccaggagccaggaaccagaaaccaggagctcaccttgctcggcacaatgaacaggcagctgaaggctgcttcttttggcacgaacatcgagtcataaatttcaatctgctccatttgcgtgtcctgtcgtgcttcataattccaacactttcggttactgtttgccactccttctgctttagtgcccagctttcttcttttttctgtatttttttttttttttttttttttgttgtatccttttggactcggaatgctccggacgttcctgggtccacttcaattgcaatcccagctccagtgcccgtcccactcattcgtttatttgcggcccgctgtttcaagtcatgcgtgcatccgtgcacaaaattcaatttgcttgcgctttcattccggtttaccgcttgctccgcgtccgccgtggcctcctgtccccggattttatggatctggcggcctccatgcccccgtgatccctcgaaaattgttgccaattcgtttgcctttgtttcgggcgcaacatcttccatatattccatatgcatatatatacatcagttttaagagtaatattcataagtacagcacgcgacgaaactgaagtggcaagtaaagctatttttaactttaacttttagaagtccctgctttactttcccttaattagctagaccaagttacttgttatactctaatcgttttgttcagcaataccttatagttattgagcacactgtacaagcgacatatccgctgatgtattttcattggttcttttctctgcttttagtacacccagtcgtatgctcgatgccttggatgcacttctcgcctgcccgcaaaataatttacgtgtgtttcagaacagcaatttaatttatggcgatcacgcgaattcgatttccttcgatgaattgagctcgcgtgtctttcccgggtaagtcagttgcgcttttcaataaatacggaaaataagatacaaatgtgggcaagtctcgcttgggatgaagattctttggcgatttcttagaggggcagagatggtttttgaagcttggattatgttttaatttcttttgaaaatgttcaaattcatt

SEQ ID NO: 37733 - DNA, 591 bp, DROSOPHILA
atgccggcaccttccttttactccatttcctcggagtcgggatcgggatcaggggaacgtggcaaagaggcgagagcaaataagcgaaacgatataattttgcaggcaaagggcacaacaggagatgaaagtggagctgcagcgggcgtaggagatggcggtggcgttggccgtggagcaggaacaaggacgaaaaacaggagcgctgtccgtcgtctgggcgatacatatgccatcgaaataaaacccaaacaaggctggcttcagttggcaagtgatgtcaacgatttatttgatttaatgccatcgggggcagtgacaaagccaaaggagacgacctgcaatcaggaggagaatgagccctctgcccgggacaagtgctggtgtcgcttttgcagcatgcaactgctgaagatgcacaatgggaaaatcaaacgtttgggccactactgtccgctggatctattttccgggtatgtcgacaagccctgtaaccaggagccaggaaccagaaaccaggagctcaccttgctcggcacaatgaacaggcagctgaaggctgcttcttttggcacgaacatcgagtcataa

SEQ ID NO: 37734 - protein, 196 aa, DROSOPHILA
MPAPSFYSISSESGSGSGERGKEARANKRNDIILQAKGTTGDESGAAAGVGDGGGVGRGAGTRTKNRSAVRRLGDTYAIEIKPKQGWLQLASDVNDLFDLMPSGAVTKPKETTCNQEENEPSARDKCWCRFCSMQLLKMHNGKIKRLGHYCPLDLFSGYVDKPCNQEPGTRNQELTLLGTMNRQLKAASFGTNIES

SEQ ID NO: 37735 - DNA, 4466 bp, DROSOPHILA
cctcgaaaattgttgccaattcgtttgcctttgtttcgggcgcaacatcttccatatattccatatgcatatatatacatcagttttaagagtaatattcataagtacagcacgcgacgaaactgaagtggcaagtaaagctatttttaactttaacttttagaagtccctgctttactttcccttaattagctagaccaagttacttgttatactctaatcgttttgttcagcaataccttatagttattgagcacactgtacaagcgacatatccgctgatgtattttcattggttcttttctctgcttttagtacacccagtcgtatgctcgatgccttggatgcacttctcgcctgcccgcaaaataatttacgtgtgtttcagaacagcaatttaatttatggcgatcacgcgaattcgatttccttcgatgaattgagctcgcgtgtctttcccgggtaagtcagttgcgcttttcaataaatacggaaaataagatacaaatgtgggcaagtctcgcttgggatgaagattctttggcgatttcttagaggggcagagatggtttttgaagcttggattatgttttaatttcttttgaaaatgttcaaattcatttgggcccacattctacggcattcaagtcgctcttataattactttctattcgagtcactcctttttggacatacattttcatgagcagcggaagaagaaaactccaaaccattcggccacacgcaaatattcaataaataatgcaagaagcaacagccaaacacaaattctcgagtgccaaatgccagcatcgccattttccgggctgcaaccacctctctgtccccagccaactggtccatccacctggttttcaacttttcccttaccacaccccccccccctccctcccccacatttctctatgtttttgccatggccgtgtcgcttcaacaccttttggcaccacgttgacaacgccgacaacgaccacacgaaatgggaatgcgcattgaaaacgctaacaaacaaaattcaaccaatgccaacgccatcgccatcgccatggccataaaatctctgaaattctccagtgaaattatggtgcttataaaacatttgctggtggcctgtctgctaagggaatacgaggtaagacgcactggaaaaataacttaagttttgctatcatataacatattgttaaaacacaataatatgctgttcagtgcagatataaatagtgctttaatttgaataagtatttaaccttttagaagatttaatagaagtgctcttactctttaaatgtgaatatatattatgattgctctgtttttattgcgctaactgctggtttaatagtacaattattcctttgaaagtgaaccaacaatatgatatcattaaagtggacataagaagcttatgtttatgcatcgatttctctccgtgcagcacccggaatccaaacgagcagagggctccaatcagagccagaagcagcagcaggagcagccggagccggagcagctgaatcagagtcgcgtttctattgcggcgacggagacaaaggccggagctgctggaattggcgccgctaatgttgtcctgccactcggaggcagggcagccgcccctgttgtcactgccggtcaatcctcgacgcggacaagagcagctgctgcaacagccacgacccaaaggtacacaaaagtggccagagtggaaacaacaataactagacaggcagccacctcgatggcagcaggaccagcatcgagcagccaactgtccggcaatgtgttggcaacggcaacggcaacggcaacggctacggcaatggcaacttcaggtcgaacggaaacaaaaacggaaccggaaactccggctgaggctgctagtacgacaagtcgcaacgtgaatcagaatgaaagccaaaaactgaatcgaaatgagcctgcgaatcaaactcaagcgcaaaacaacaaaacggaaatatttcgcttaccaaaaaattgtgtgctgcaaaaaattttgaatttgcaattgctggtaaaggtaagccaaccaatcaaactgctgcccaaactactcagtctctgtccgtttgggtttgtttattctgcctgccccccagagaaccttggcaattgcagatagttcgagttgggctctgataccctaataggggtatagccattttgtggatcactttgttcacacacacttagtcttagtaattgatttattgtataaagctggttatattactttgtaatatatctttaagctacttaaccttactgttctgtaacttaaggcgtatctcttgagtagagtatccgattagttaggccaacagactgaacttacttctttgacttcattttttcgaaaagcccaggtgagctgggagttgtaagttcagtggaagtggcggctaaatgggcaatggatggcggccaagtggctttgtgcagtgcgagtaacgattcttggcaattgcagcgccacttcgacttcatgtggcaatccgggtactccgaccactcccggcccacttacaactcgctgcggggtctcttggccgcaatcgagggagccggggatgaggaattcgagccggatgaggatcaggcttatatgttgggagccacggcgctggattgctcgattatgttgacgtttcaggaaatcgaaatcgaatgcgaaaccgattgcccggctgaccaaaggtaagtagtattatccacacaatgacgccttcccgctgctccagcgctaatcgaatccccaatctctagcagcgatgcggcactgcagccttggtgtgtctccctgctgggtcatcactttctgaccaaactttgtgtcctggatttggatcccaagcccgacagtcactttcataaattcatagcgcagacacgtgaaattgaaaagtgccgtcgagcattaaattaattaataaactttacgcccaactaaaagcagcacgcatcgactgtctggctctgaaaactgtgctacagtatctttcctcttcaatatcaattcagctgctcttttttgcagctttgcagctttgggagttccttctatgggtatgggtacgttcaattcgtgcgaaaggtttggctattaggtgcttaaagtgtaaactgacagacattctggctaagatctgccaggttcaagtcttaaatctgcttaattggccaaaagcggagttaaatcccaagtcttactgatgtcttgcaactggaaatacaagaagttagttaacaattgaatatcttttcttatttatttatgaacacattttatattgatcctcggagttcatgtaaatcagacaatgaattacccgtgccattatcaggtactttccattcgccagaccgatagagttagcttagttttccatatttttctaccgactttataggggcgcacctctaaaagcggcttttgccgcagcttgacagctaaaaagagcaaaaaaccacaggatacacggcgctgacctgcgaaagctacatggtaactgtatagttatgggcccaatgggggtgtggaagtgggaatggtagtggtagtgggagtgggagtggcgctcctgaacactccttaattaatttccatgcgaatgcgggcgccatacgctggccattcgccacaggatgtgtactaagccgtggagccgtggagtcctggtgctatgcaaagttatggcgctgcgagttggcccacagtcggcaacagtgtcagttgccattcacgcttgggactaaccggtttggccggcagctacgcaaaaaaagcaaaccaatccaaacggattcgagccaaaacgaaccgaacccaactggctggcgagtaacgatgggcaacaaagttgtgacatttacggaacaggaattggatgactaccaggtgagcgatcaatcagatgaagttcacttccacacagctaatttctcttcatgcattgctggtccgcaaatcggaaaggattgcacgttcttcacgcgcaaggagatcctgcggtaggccatttgtattcccttaataagacaaaactattccatttcatatggcggcagacaaagcaccattgtttgcagcctcccattgtttgcctctcggcggcaacaaaaagcggaaaacacaagaaaacacccacacacacacacacactcacacgacagacactcagaacacaaagcccatcatatccccgccctttgacccggccaacacatcacattccatacccattcccagggattatcattttggccagtatccacactattgatcagcagcctcgaaaaagtcagcctacttttaaaaaccaaatatagttagagtaaatttaatataatatttgcaagctcgatgaaaaattcatttttaagtttctgaatgaaaagttaagttaactgaagttactcatagt

SEQ ID NO: 37736 - DNA, 1032 bp, DROSOPHILA
atgggaatgcgcattgaaaacgctaacaaacaaaattcaaccaatgccaacgccatcgccatcgccatggccataaaatctctgaaattctccagtgaaattatggtgcttataaaacatttgctggtggcctgtctgctaagggaatacgagcacccggaatccaaacgagcagagggctccaatcagagccagaagcagcagcaggagcagccggagccggagcagctgaatcagagtcgcgtttctattgcggcgacggagacaaaggccggagctgctggaattggcgccgctaatgttgtcctgccactcggaggcagggcagccgcccctgttgtcactgccggtcaatcctcgacgcggacaagagcagctgctgcaacagccacgacccaaaggtacacaaaagtggccagagtggaaacaacaataactagacaggcagccacctcgatggcagcaggaccagcatcgagcagccaactgtccggcaatgtgttggcaacggcaacggcaacggcaacggctacggcaatggcaacttcaggtcgaacggaaacaaaaacggaaccggaaactccggctgaggctgctagtacgacaagtcgcaacgtgaatcagaatgaaagccaaaaactgaatcgaaatgagcctgcgaatcaaactcaagcgcaaaacaacaaaacggaaatatttcgcttaccaaaaaattgtgtgctgcaaaaaattttgaatttgcaattgctggtaaagcgccacttcgacttcatgtggcaatccgggtactccgaccactcccggcccacttacaactcgctgcggggtctcttggccgcaatcgagggagccggggatgaggaattcgagccggatgaggatcaggcttatatgttgggagccacggcgctggattgctcgattatgttgacgtttcaggaaatcgaaatcgaatgcgaaaccgattgcccggctgaccaaagctttgcagctttgggagttccttctatgggtatgggggcgcacctctaa

SEQ ID NO: 37737 - protein, 343 aa, DROSOPHILA
MGMRIENANKQNSTNANAIAIAMAIKSLKFSSEIMVLIKHLLVACLLREYEHPESKRAEGSNQSQKQQQEQPEPEQLNQSRVSIAATETKAGAAGIGAANVVLPLGGRAAAPVVTAGQSSTRTRAAAATATTQRYTKVARVETTITRQAATSMAAGPASSSQLSGNVLATATATATATAMATSGRTETKTEPETPAEAASTTSRNVNQNESQKLNRNEPANQTQAQNNKTEIFRLPKNCVLQKILNLQLLVKRHFDFMWQSGYSDHSRPTYNSLRGLLAAIEGAGDEEFEPDEDQAYMLGATALDCSIMLTFQEIEIECETDCPADQSFAALGVPSMGMGAHL

SEQ ID NO: 37738 - DNA, 2321 bp, DROSOPHILA
ggaaatacttgcggcgaaagtttaaaataattgttgatgtaacgaaccatatagaggcggcgttgctggtgggcgtggcacgaagtaaaacaataggccagcaaaaggagcagtttcagtggctgaaacacaggacaaccaaatagttttcgctcggcaaattgtttccagttgcgccaggcatcgttcacttatccctgtatatatgtatatttgtttaaataaatatgaactgttcttcttcttctctcgagtggctggcgctgcaattcccaaatccagccatccatttagcccagttctgcccatcttggcccgcttagccgtcagcagtttgcaagtcgggcaattaaaacaagttgcaaacaatttccatttagatacaaataacaagttgggcgcatccaccagttgcacatgactgcttgaaagcgatgagtgtgagaattggtgacattggtgagtagattcgatgtcaatcaaactcaactggtattcgagaaaaagtcaagaagagcttacaacttgtttattcttacgataatttccagttattggcacgtgacaaccactaactaaaattgtttacgaaaagcaatcagaaagtttaaacactctacaaataaatacatgttatatacatgtgcatattttagtaattttagagcagctggcatataaatatatttaaaaaaaatgccaaaacagagagaagtgttttataagtagcttgaaaaggttcttgactttataaattttgttgtttgcacacttttgattactactaaatattgcacgggctaaaatgcctcatattttgatcatcaaagttaaaatagataacttgatttatgaatatttttataaatgttttttaatgacgaaatttgcactgactttgaagtgactttttgtacttttgacttttgtactctgttcactagaatttcatacattttaaaattacaatattaatcatatattaaataataaaaatgagtttaggtaattttaaaatttttattcaaaagtccaaatggataggcaaatgtcaaatgttgggtcaacatggttctctaatcctaaccagtacgaatgtactgggtgttgtcggtctggatgagcacggttccagctgcgatatataattagttaattaatataattttaaagtatttatagtttaacacttacgttggggaacgggctcggcgttggcgagggcagcgaacatggccaagagaagggcggcggcttggaagaacttcatgttgatttctgaggtttggtggttgttggttggcttggtagtactgatgctgagttactgatgccccactaaggtgccggagctcttttatagtgaatcgatcgagccgagatctgggcgattccaagacaacctgggggattacacaggttaaaagatcggctttatctcttcgctcgtcaatcagtgagattcgtttgtttgtctgttgttcatgcgatttagtgcaattcacgtgaagcgagaacctgtctgggttttctacgcaattcaattaatgccggctactgactactaactattggcactcgactatcgactattagaataactggaactgggcgcgaatagcgcagtatgcaatccagtttgatgtgtttaccataccctttatgtggagtttctcctggaaaaggtcgataatggtttttactcggaaattatcgcttttaaatctgcaacaatttaaaagaggcagattgtattagatgtcgttttgccccatacatacggcttttttaatagtacgcatttggaatcgacttcttagtcattgcggatggtcaagatcaattcattctacagtagacattgatttatttaaggttttagtaatttacatatatgcaaactatcggtgatataaaaaatactttaactaactaactttacatagtattacaatttattacaaactaacaacagtacaataataatcaattttatattgataaaataacgcaatgtatcaattttgctacatctatattagaaaaaagaatttgagtgcaataactattaattgaatattagatatcataacttttgctagggtgcttaacaatgatgctctgtgaataatatttgaattttatgatagggatgaacagtacacatcattcgaaatctaattccatttacacctacaaaaaacctttatcgcgtggcagtgcatttagtagtattgtctcgtatcaactaaacgcgcattatcagctcagatcgcgctcaatttccgatcgtgaccctggggaattcgaaaccccctgga

SEQ ID NO: 37739 - DNA, 262 bp, DROSOPHILA
agcatcagtactaccaagccaaccaacaaccaccaaacctcagaaatcaacatgaagttcttccaagccgccgcccttctcttggccatgttcgctgccctcgccaacgccgagcccgttccccaacctggaaccgtgctcatccagaccgacaacacccagtacattcgtactggttaggattagagaaccatgttgacccaacatttgacatttgcctatccatttggacttttgaataaaaattttaaaattacctaaa

SEQ ID NO: 37740 - protein, 42 aa, DROSOPHILA
MKFFQAAALLLAMFAALANAEPVPQPGTVLIQTDNTQYIRTG

SEQ ID NO: 37741 - DNA, 3074 bp, DROSOPHILA
atattcccatggactgcaagtcagtcgagtcacgcacttcctggaccacgcccccaattgcagctgggggcagggcgagtcccacagctaaattagcaattgtcacattgcgacgaatgcatcggcacacggaagagggggcaatccaaaaagccatcggggtgcagggaaaccggagaaccagaaattttccactgctttttacagcttcccccatctgctcctccggagttgggcaaactgtggacaggcattgaaagcatcccctattcacacccctctccaatcggagggttggaaattcgttacaattagcactcaagataaatgggttcgaaatgacagggggaaaacaaaatggaaaataagcatggttgaaaataaagaaacatttatcaagaaggttccggtaaatctgagaaaattatggttcctttctcagaagcgacctttctaaattgtcctggcggacgcagcacacactctgtaatgaattgatagtatttcaatagtttaatgtgattgaaacaactttaatctctcggctaatgagccatgtcgctgtccgatgtccaacttctttcgcccgaaaatcgaagaccctcgcccgcccgcatgctccattagcgtcacacaatttgtacctaccgaaaaaagaaatccatcagaaggggcccccacaataaaatccaattccaatgaaatttttcatcccaccaaattgaaaaagcgaacagaacgagaagagcaagccagaaacaagaagacagcacagcggacgacggacaaacaaatagccaggctccgaatccactgcctcggatggaacacaataacctggggagcagtgcgacggtggcgggtctacgggacgtgggggagaatctcgagaagccctttttatggtgcaacaaatctcgagctgaatgaaaacgccagagaagcggcgagtggaccaacgcaaagtgggaaaccgaacaaacaagcaagacctccgccttcattcctgagggggtggagatgacttctccatggcgacgatgacgatggcgttgtggccatgtctgtgccatattattaagtgtagccagaagcaattaggtgtagataagtaaacaataatggtctcagtcacgtaccgccgaccaactctgggctctaggccttttcccggcccaagagctggcatttggtggtcaaatagttcaaagccgaaggatattcaacaaaggacatcaatttttcgtttcagccatttgtagtttagacctagcttgctaggtctcttcaattatgtagctgtttgccaatctaagcgaatagagcttcagtacttcctcctaaggtggaactgtcttcgctttgaacttggttagcatcgtgacatttgaggataaaaaaaaacatagtattcaacgagaattcaatgaatactttacacatttaactactgtcaatgctcaaataagttctgtaccgcatcctgcccaaactttctgagtcaagtagatcgactcggttagcatggcaaacattcccagaagagacaccaccatccggggcttgagaggtggtgttgacttgttcgagcattggcagtgctcaatgcagtccttgcatctcctgacaggtagcttctccttattgaagatacctggattaagggccaactggcagccaatcgagggcgaatacaggcagcaaaacgtctcgatgtaacctgcaggaggaaagtattgagagggcttgtggtttcagatgaagatctacaaactgaacttatttctaatgggaacggcgtgcatgctgaaaatggggtgttaaaaccctttaggtccgagtggtaatcttcctccggcaccacccactgatggacgtaagcacctggagcgcagtaaaaccccgttaagtttgtcttacagtgaaacttccaatgagcgttgcagtcaatgcactgacaaaatgtacctgatggatcagccaaaggtcatatggcacacaagttataaagaaaccacttacctggcatcaagagcaagacaatagctagggtatttaatgctccagatgacatatcaattcaaagcagagctcaaattttactgtttgtattgatgtcaaaaaatatgaaatgtgtttcgaaaataattaatgaaacccagtttgctagtcgagcgcaatactcttgaatctaaacatgtacattttcatctccaactcctctcaagaggcagcgatcatgcggagtgcacggatgtaattaacgacatctgaatgacgtttgcatatttcagaggcagcatcgaataaattcagctgatctttaatgaattctccctcagatggcgaaattccctgaattcgatgctcattatgctacgtgggttggcatcggtcaaagattcttggaaatcgtcgctgaaaatgagcattcagttatcagaggaaaccaaaagcctacatcaataacgaggtacttttgccgtacgagaccttgggtacctaaatgccttctgaaaacctccatactgatctttaagaataggattttccagtccaaaacacttggtccaaccattgcaaactgactattgtaattttctgtcccaagcattgattgaaaatgaaagcgtatctgaagaaagcctttctgatatatgtgatgcatttgtcaaccaaattatcgaatacgtttcgatccaatgtattccattgaaaaagtatcttgcttgtttcgacggagacaccaaagatgtcacttctacgaatgcagctcaaattagccccgactttgatttaattgcagcacttgctgtggcacgcctgccagaaagtattggttctccggtgactggcagtcgtttgaatttgaattgcagaatctgccacactggctctgcatcgtcattgttattcaaatgctgccattaatacttctctggcaattgaaagtgcccgacgacgagaggagcacgagtgcatgtgagtcatctgcatgtgtgggtgtgggtctatgggcacaagtcatgtgtgagtgctccttcgagctgtatccgatccccagttctcctggg

SEQ ID NO: 37742 - DNA, 459 bp, DROSOPHILA
atgtcatctggagcattaaataccctagctattgtcttgctcttgatgccaggtgcttacgtccatcagtgggtggtgccggaggaagattaccactcggacctaaagggttacatcgagacgttttgctgcctgtattcgccctcgattggctgccagttggcccttaatccaggtatcttcaataaggagaagctacctgtcaggagatgcaaggactgcattgagcactgccaatgctcgaacaagtcaacaccacctctcaagccccggatggtggtgtctcttctgggaatgtttgccatgctaaccgagtcgatctacttgactcagaaagtttgggcaggatgcgctcttgggccgggaaaaggcctagagcccagagttggtcggcgacatggccacaacgccatcgtcatcgtcgccatggagaagtcatctccaccccctcaggaatga

SEQ ID NO: 37743 - protein, 152 aa, DROSOPHILA
MSSGALNTLAIVLLLMPGAYVHQWVVPEEDYHSDLKGYIETFCCLYSPSIGCQLALNPGIFNKEKLPVRRCKDCIEHCQCSNKSTPPLKPRMVVSLLGMFAMLTESIYLTQKVWAGCALGPGKGLEPRVGRRHGHNAIVIVAMEKSSPPPQE

SEQ ID NO: 37744 - DNA, 2228 bp, DROSOPHILA
ttaagcgacattttgtgtatcggatgcaggctggcattggttataaccaaatattgatagacacatgcatatatacatatatatatatatatacatacataattaaccaatcggatcgacgaactttcactaacaagtttgtgaagatatgaggccaataactaaatgtacctgtttagaggaacatcaaacgatcgcgttctgatctaatagaactttataataattttgcgaaaaaaaaggtttcgctggtcggcattaccaagctacggaaatagaaatagtggtctattatcagagtaccagtaaccttttagatggaatgggtatactagattcattagaaagtacgtattcattcgtgtatacatatgaggatcactgtccggtcgttatagccatgtccatctgtcgaccgtatgaacaagcagcacaaaacctccaaaactttacaaaaatattttattatttttttaacggatgagaaattaaattaaatgaacattttcaggtgttttattaaacccctaacgtaatagtatagtgtagttctgttgatcaatcaatcagatccacacatttaccatacgaggcaatttagaactagaggcatttctttaatggttaaaatttccaatagatgcagattttaattctttagcagggtaagttatacatatataagtataagtaagtataaaaagtattaggctttgttcttgatattaataaaaataataaaaacttataagattaatatctaaacaaagagtcatattgttcttactaccttaacccccccactgatctgtacagccttttttttattgtggcagatggtggtttgagctgtaccgattcgtctacgagccaacaacttttaatttacgagcggacacagtagtcatttattttgctgcgtattgttcagagctctcgcggacgatttgaaaagtatccctccggggtaggccaaccgacagggtatcaattattcggctcatgcggactttttctgttgtttttcgatctgttcgactcggtctattgctgctggtgataatccctggccctggccctctttcactctcggccacacctcaggaccacgtccagttccagttccagttttaagtcctagtccagctccaggtccaggtcctcgtcctggtccccgggtctttgtcgaggaaggagcaaggcgaagccaaattgcgtgtgcaaacatagctgagctgcagcttcattagcgagggttgctcaggacaaacacaggcacacagtctggtgtgtacggcaaacatgtgtgagcactggcgttttattattattttctttattgtttagcgcgttataattggggtgccgtcagggggtccagtcaggcagaatattcatatgcttgtatgtgagtgaaggtacacacaactaagtacacagtgtatgcactctcccggaagacctatattctgtttactcggctctaataacgatgcaagtggagtctgaatagtccggcctgtgtagtcgcaaatggctaagagttgttgtttctgggagaaataaacaaagctatactataagtcctttcccttcgcctcttctttaaggactatgtaatgaatggagagacatttaacgtggcttatcaaattaaagccgtttttggaagttatagctaagttggataatcaccacttaaagcatgtatgtatggccaaattgaagtactgttgataccacaataccagtctgcttttgggaacttcaagtttctgcaacgactttgtacctaaaaaagagcactttcgtttctctaattgtttgccacttataaacgtcaatgcctaccgaaaaggataaatgtaattcaacatattgtccggcttgttactgtgtgcgtttggaatatttgaaagagattgaatagctgtgtgtatgtcaacccgcactaaggacgtccaatgcgttaattaaataaactgtaattccatttatcacggctaatgaagaacggcgggcgatttgcaaaatagtttacgcagaaggagtcaaattagcatatatgttacaaccgaacccttatcaaatgctaagtaatagatgcaggtactagccataactcatgcgtacgtcacccacaagctctacagccaaccattcaaccacccacagccccagccacatacgcaaacccaactcggctgtcaaaaacagtttataacgcc

SEQ ID NO: 37745 - DNA, 228 bp, DROSOPHILA
atgtttgcacacgcaatttggcttcgccttgctccttcctcgacaaagacccggggaccaggacgaggacctggacctggagctggactaggacttaaaactggaactggaactggacgtggtcctgaggtgtggccgagagtgaaagagggccagggccagggattatcaccagcagcaatagaccgagtcgaacagatcgaaaaacaacagaaaaagtccgcatga

SEQ ID NO: 37746 - protein, 75 aa, DROSOPHILA
MFAHAIWLRLAPSSTKTRGPGRGPGPGAGLGLKTGTGTGRGPEVWPRVKEGQGQGLSPAAIDRVEQIEKQQKKSA

SEQ ID NO: 37747 - DNA, 2523 bp, DROSOPHILA
caacatgctcaacaccatcaagattttccaaaacaacgtctcgcaggcggtcagcgccgaggaccagtcgttcggcatggtagtcacggacatgctcaacacgctgggcgtgcgacaaaaggcagaggcgaaggtgcacatcatcaagtatctgacggacatgcagcttctggcacagcacaacaagtactaactgtcgggcggctgtcatcggcagctgctgcagctgctccaactggagagcgttctgccctgagatcaaacgagaacagacccacggctacccacatccacatctacacgggtttgggggtcctgtgcggtcattttctacagttcataggtcttaaagtcaaactacagaataacattagacgtaacatcccacagcgtaaaccataacgcgtaatgatacttccccacgcccatgtagacaaacatatatatttatatgcttagttgaccccatgatcggtgatttaattcgcgcccagttctcagctctgtacaaaaaatgcgattgaaaatagcgattctagaattatgagtagcttgttaaaagaccgtggaaacactttatatgcagcgtattgtaaattttgactacgatttagttgtaatttgccatcgggtcttagctctaaaactaagtatacacgtaaaagttattttaattttataagttctgttgtaatatgccgaaaacgcttgaaagacactttgaaatgcttaattaagtgtgacaaagggaaacataaaacacctttttcatagtgatcgcatattacacactttacatggatacgagtaaaatcgaaatagttgccggcaacgccagttgctaaacatttttaatgattaattgtgcaattatttggtattaaatgaaacatttgaaagtaaccgactagtttcaatcggggtgatatggcaacgccgcgagccagcggcataaacaaaatcagctgtgcgggctaatgattgattttatgtaattgaaatggccacaaaatcggataatgctgactcaaaatcggacaaatcaaaggaatcactagatgacgcatgggcagtaagtatccagctacgttaacagatccgagactcaggaatcccctttacagatccgaccctgtcatctgtacaaggaggagtacgacgactgcacgagttttaaggcgcgcttccaccagtactttatatttggcaaggacacagattgctcccaatggctaactgattaccgtaactgcgaacgatatcagcagtccaacgggaacgatgtggctgccggcaaagcggtgattaaaagcgaggaggagcgccgaaggatccgcctgcgcgcccactttgccaacgacacttggcagaagcgtaagaagccaccgctggattgggctgctcctctgccggactggatggagaagcgaaacgagaatacctatcttgagcttaagcaaaaagagctctctggacaggcggcgccgcaaggagaggaacgctcgctgtgcacgatcatgtgaagataaatagtaaattattagttaagaaaagaaggaagttgtttcattgttcttaaaagatttcagtttttcagcaatggtttctaataatcggcggtctggcaacgctcgtgtcagctgtatttgtttctgatagtgctgctacatttattaacatttattacatttattattattattgctttcattaaacacgtaaagacacatttttcttataaaactcatttgctttcaaagtctaggtgtttgtattacgaatcaaacaagttgtgtaaaatctaataaacgttagcagtggtaatcggtctaagaacagtaatgctgagaataggtaatctagctaaaaaatagctgtattgacgacacattttgtgcgatacttcagatacgggctgatatctacctacatacctattccgcatccgcatcccaacgctccagctttgcctaaaatgctaaagggtagcacactgaaagccctggacgtcagaatcctatggccccttattgaaacaaggtcagcaggtaaatgtaaattacataacccgaggccgactccaaaccgtaacattgcggcagcaaaattgatcgtgacactcagattgctcttatcctgttgcagtggaggacaccagcgcagcttctccagcagcacccaccggtcctacataacattcaatgatttccgcaaaaaacaccgctggtacacaaaaaaggagcttgtggggtaagtgaaatgtcagcgcccttggtgaaatcatttctcaagtaccatctgctgtagctactccatgcaggacatgtacagcgtggtttccgacgtcagcaattaccacaagttcgtgccgtatgtgaagcgctccgatgtgcacagccggggaagtgagggcttcaaggcggacctcattgttggctttccgccgcttaacgaggcctacacctcgcaggtgaccctggtgccgcccagcttggttaagtcagagtgccacgatggacgtct

SEQ ID NO: 37748 - DNA, 471 bp, DROSOPHILA
atggccacaaaatcggataatgctgactcaaaatcggacaaatcaaaggaatcactagatgacgcatgggcaatccgaccctgtcatctgtacaaggaggagtacgacgactgcacgagttttaaggcgcgcttccaccagtactttatatttggcaaggacacagattgctcccaatggctaactgattaccgtaactgcgaacgatatcagcagtccaacgggaacgatgtggctgccggcaaagcggtgattaaaagcgaggaggagcgccgaaggatccgcctgcgcgcccactttgccaacgacacttggcagaagcgtaagaagccaccgctggattgggctgctcctctgccggactggatggagaagcgaaacgagaatacctatcttgagcttaagcaaaaagagctctctggacaggcggcgccgcaaggagaggaacgctcgctgtgcacgatcatgtga

SEQ ID NO: 37749 - protein, 156 aa, DROSOPHILA
MATKSDNADSKSDKSKESLDDAWAIRPCHLYKEEYDDCTSFKARFHQYFIFGKDTDCSQWLTDYRNCERYQQSNGNDVAAGKAVIKSEEERRRIRLRAHFANDTWQKRKKPPLDWAAPLPDWMEKRNENTYLELKQKELSGQAAPQGEERSLCTIM

SEQ ID NO: 37750 - DNA, 3119 bp, DROSOPHILA
tgctgcttctgctccaacccggctgcgtgtttggatgtgtgttgggagcgcggctaacgcttttgttgtctaaccattaattatggcagttggcactgccaaacaccgatcaaaattcccatgaggacgcgatacagtcgagcatcgctaacttcgattgtgtgatatttggtaaagactttagattttggatgttatttcaatgctatttatatttcaaatattttatttcatatttcaatatttactgacagtgtgaacaagttttaaagagcgcccaatcttgggaatcaccaatgttttctaaatgagttcagctacatttgctcaaaggaatccagcatctacaaaaggggatttctgttggttgaggtgaaaaagtgtgattaggcttgagatatggaagattgatgttcagactcctctgtctgtctgttcgagagctgcctgtagatttttccaaaaatttgcattatatatgtgttttttatttgatggtgcgcgtgcttgacaatagctgacggatactgcatatgaagatttcgtgctccgaggctcttctattttcgtttatttttggcaatttcgcttgttttggattttgccagatcataccttaggcatttcattcattctggtggggcatactaatttatgggtacggtatttatttattggtttattcgatttgggggtgtcaaagattttgacagacgatactttgaatttcaatatattggcgccagtagattatggctcaggttatttggcgatttaattaaatgaatccgaacttgtttccaagttaatatttcgtgattttgcgtaatagattcgagctattaaggttacgattttattgacaaaaggctggagaatctttgaaagatgaccttttgcccaccagttctcttacatctctatagcctaaccctatttttcaaaacgtaaccataaacgatatattttattaacaattattcatttactcgcagttgccatgcgatttgttctatggtgaatttttacacatttctactattccttaaacatcccttaaccaatcaatctgcacaggtatgtcttcgtgctcagctccatgaatgtatttcaaaagtccaacgccaagtcaagactcacagctaatttgacagacgacccattgcatgcctataatgaggtcgtgcagaatttgattaagaactgggagtcgccagttgtctatctgaaaaaacgaggtttcctgcccagaaactacgaggatgcgtcaagaatcaagcacagcctggatgccctgatgcaacgaataaaaagggctaaacgggatcacacaaaggaggtcactttcaatgtaagacccaaagaaatggcaaaagcttacccaaggaatcaacgtggctttcagctatcaacgggcacaatgctctctagtttggagcagttgaaagtcatcgaaggccaggcaacgaaggccaagaccacggccaagtcaagtgagcaggagcaagagctgctggcaatgaagcggcgattggaagagttgcagcaggtagcaggtaccggtcaggatcagccaggataccgtaggcagattaaagtaaatccaatagacaaggatccagggaagtcagcacaaagttatgatgaaatattgcagcgaatgattgaaaagacgagcccacactactcacagcaatccaattcgcatttagaaacccatccaaatcaactagcgccagctcctccaggagcaacccaaaaacttgataatgtgcagatggctcccaaagaagacaagccgctgactttagaacatatcgagttgcatgcgtatacagcgcaaagtgctccccgaaatttattgcataaatccgtagttgatctgcccatacttagagcagcggagacccagaggagcaagaccgcaacggaggcatctaacgtggaatcgaagttgcgcgcgcccacctatctgaattgggacatgaaaaacggtcgactggatcattactcaagcgtggacaaggaggcctatttgaaccagttggtgagagtgttcgggcgcaatttggatttcaaggaacccactcaaaaaggaaaagagccgacagtttcttagaaccgcggttctccttcccaaaaacatgcactcatcttcataaaacgttttaaaatatatgagttctgttcaatgagtcataatccatttggaatccatgcccgtgcacagtaaatacatctatacgtttccatttccgatttcatgccgatcgacaatgatggtacgtcatatcaatggcatcaccatgattatttggatttcttctgtttaccttgcgcaagaaagcaaagaaaagcaggatatttctgtttaccatttgttagtacttaagcatatttttgctttcaatgttgattaaacagagatcaatacaaattttgctaatgggttgacgacatgcagtgttcaaccgatcacttcagccttgtatgactatattatattattatgaaataatatttattgcaattcataaacaagaaagatgttcgtttgatattttcgccacggcactcatagtattctataaagtttcaatattggaattcagaaaaagccttttactgtggcatgccaccgcattgtagattggtctagaattcaactaggcgcctgacctaaggaagcgctaatactgtattatagttgttccataaacggagtgaatattattagttgaggttgtcccgcgtggacgatgccttgcgcaccgccatgggcgatcgtcgtggcgatcgctgttccatctgctgctgctggacgttcacgtagtccaactcgttttccggagagggtgacgagccggctccggagtttcgtcgcgacgacgatggtcgtacgttggtgtccaggtgtcggaaactgaaagaaaaggatgtggcggacacaaattattcgttaagctcggtggtttgtctcttcactgtttgtcttttaaaatactttccaagtactttcgaacaagactcaccgcaacgagacgttactgcccttttcctcgttgttgctgttgaagaggaatgccagcggccaggatatccacgagttgtggtccacc

SEQ ID NO: 37751 - DNA, 1059 bp, DROSOPHILA
atgcgatttgttctatggtatgtcttcgtgctcagctccatgaatgtatttcaaaagtccaacgccaagtcaagactcacagctaatttgacagacgacccattgcatgcctataatgaggtcgtgcagaatttgattaagaactgggagtcgccagttgtctatctgaaaaaacgaggtttcctgcccagaaactacgaggatgcgtcaagaatcaagcacagcctggatgccctgatgcaacgaataaaaagggctaaacgggatcacacaaaggaggtcactttcaatgtaagacccaaagaaatggcaaaagcttacccaaggaatcaacgtggctttcagctatcaacgggcacaatgctctctagtttggagcagttgaaagtcatcgaaggccaggcaacgaaggccaagaccacggccaagtcaagtgagcaggagcaagagctgctggcaatgaagcggcgattggaagagttgcagcaggtagcaggtaccggtcaggatcagccaggataccgtaggcagattaaagtaaatccaatagacaaggatccagggaagtcagcacaaagttatgatgaaatattgcagcgaatgattgaaaagacgagcccacactactcacagcaatccaattcgcatttagaaacccatccaaatcaactagcgccagctcctccaggagcaacccaaaaacttgataatgtgcagatggctcccaaagaagacaagccgctgactttagaacatatcgagttgcatgcgtatacagcgcaaagtgctccccgaaatttattgcataaatccgtagttgatctgcccatacttagagcagcggagacccagaggagcaagaccgcaacggaggcatctaacgtggaatcgaagttgcgcgcgcccacctatctgaattgggacatgaaaaacggtcgactggatcattactcaagcgtggacaaggaggcctatttgaaccagttggtgagagtgttcgggcgcaatttggatttcaaggaacccactcaaaaaggaaaagagccgacagtttcttag

SEQ ID NO: 37752 - protein, 352 aa, DROSOPHILA
MRFVLWYVFVLSSMNVFQKSNAKSRLTANLTDDPLHAYNEVVQNLIKNWESPVVYLKKRGFLPRNYEDASRIKHSLDALMQRIKRAKRDHTKEVTFNVRPKEMAKAYPRNQRGFQLSTGTMLSSLEQLKVIEGQATKAKTTAKSSEQEQELLAMKRRLEELQQVAGTGQDQPGYRRQIKVNPIDKDPGKSAQSYDEILQRMIEKTSPHYSQQSNSHLETHPNQLAPAPPGATQKLDNVQMAPKEDKPLTLEHIELHAYTAQSAPRNLLHKSVVDLPILRAAETQRSKTATEASNVESKLRAPTYLNWDMKNGRLDHYSSVDKEAYLNQLVRVFGRNLDFKEPTQKGKEPTVS

SEQ ID NO: 37753 - DNA, 2993 bp, DROSOPHILA
tatgccaaggcaaaaaacgcatgaatattttgaattgggcgtagacgaattaacacaatggaccataataataataaatttcttataatcagaatgaaagttaactttagcacttaaaagtcgaaatacctttataaattttacgctttagaacttgcccgatataaaatataagttacgacttgcaagcatataatcctgattttatcagaaatgtcgaaagcggattttaagcttcgattgagttacgtatgaataacagaggcatgatgaacgatgacgattcaagggtcttatcctcattattagatcacctccattagccctttgccggcgatactgaaaaggattgcagggcactctgcccacacttggaccacttgccaccaggaccggcactgcaattcccagtgccacatgctcgacaggccacagccaccatattagtaagctgaggtcaggcatgctgccactgtcatgccccacttaaccataaatactcgaatttccattgcagccactcgtgcacggagcgcacccgaggaggagctccacatcgagacccagaccccacacacacactgctcggccccagttcccaattcggaccatttcaattagcagacacctctctggacagaacccaccaaatgaactcggccgtggcgaggcacagatggatgtggcgccaccatatgtacgtacgtactacgtagtacagtgtacacatgtactcgtgcattcagaacactgggctggaaaaaaatgctggccaatatcctggcggaaattaatgttgctgtggcaagcacaaagccagaaggagggcaacggcggaacggaaaaaaattgaatgccacaaaccgatatgattcgctgcgggaatgggaagggggcggatacccggcctttctccgttgtcagcagttcctttttcctgctgctcacatcgacggatgaggaggggctcagaccgcagccaggcacgcccccacttgagtcaaacccaacccccaacccaggcccaaatccccggaatattgagcatgcacggcggatcggatatgcaacacggcgggtacgccgagtaatcactatcaattatattgctcagcacgcgcattgtctcgcactctgcgcacggcggaatagtgttccaggatgtctcatctcctgactggtgtaagtaaggacttaccttgccatcggcatcggcgtgggcatggtatcgcacctccagcgatccgccgagcactgcataccagaagcgtccctgctcgccggcgcgaaaaactgcggggaggagaagtttgagttagccacctctgtcgcatagttaatccccgcaatccagcactcacgagtcacccccttctccaggtcctcatagaatccgcacatggccaactgctggagcgcagatcccgggaggcgacacagcggctccacgcgacgcaaccggcacgaaattagctccacatcacgcaggttccggtcgcaaggactgaaaatcgtttaaaagtggttagacgttaatgtactttaaaatcacttgccgtgctagtatgggtttcagattaatataaacatgcagcttattaaatatttctatgtgcaatttgaattttatagaagataacacacttgagccgcgctaccgcaaaaaaaaaaaaaaacaatatcgcactcatatatgatgacttgtttacataagtggtgtataatatttgttaaaggtggaaagtttgaacgaagttttttccgtataaacatcgaaatcacggaaactttaaagatcacgcttctccctaatcacttcaataacaaatgcaatctggaaaacagtatatggttgcagtatcagcacttctctcgcactccctttacagggtaagaggtatggaatagtcgagacactgaaatattgtttctataaagttcttattatatctgacatttgaccttgtatctgatagtggattatctcgttcatagcattctctctatatgttataaaaaataaataagtacgcttgtcatgcagctttcatttcggctactgattaagtttattgttaaatactaacattctgcattaaggttaccaggaagatttacctagcttatcacaacgaataacaaattatcaaagaggacaattataaaacaaagcaaaatgctcctttgaaataacaaaagtaaaaaattaatacgtgtaaaggactctgagaaatgagtcgtttctgaactcaaaacaaccgaacaatagactgcaataaggaaagaagaaaccaaaaaaaaaagaacacgaagaataacgagtattttgcatttataatttactgactctatgaaaagcacttcacgtggattattctatttttggatctacttttggaaggccataaactgaataaaaatgaggagaaatggcaaagcaaagtattagttcaacaatgaactcaaattaaaaattccagtgtcatttgtgctcggtttgtgcgcgcattaagtatgcaaattatattttttgcctgtctgtgtgcaagtcaattgaaaaatgaataaataagtataagagtttccgggcaagaatctgcaggaaacggaagtccgcccagaataatgagaagaagggcagggaaatggcgaagcaatgagagtgaagcgtcaactaattgcatttgagaaaaagttagctgtcagatctaataaggagttctcaaattcaggaagtgcaagtaagttaattttaaataataaaaattaaatcaccttgctttaaaaaaaaaataaagtttttccccctaggaaaacaatacaaatcgcgctataaataatgtttttacatgtctaacagacaacaaattgcgccttgctgccatgcggcatgttaccaaaagttttaaacaattttcaggcgagctcccgcccaccataaatcccccaatgccgcccacactggagaccccacccaactttcgcctaattaa

SEQ ID NO: 37754 - DNA, 474 bp, DROSOPHILA
atgaacgagataatccactatcagatacaaggtcaaattccttgcgaccggaacctgcgtgatgtggagctaatttcgtgccggttgcgtcgcgtggagccgctgtgtcgcctcccgggatctgcgctccagcagttggccatgtgcggattctatgaggacctggagaagggggtgactctttttcgcgccggcgagcagggacgcttctggtatgcagtgctcggcggatcgctggaggtgcgataccatgcccacgccgatgccgatggcaaggtaagtccttacttacaccagtcaggagatgagacatcctggaacactattccgccgtgcgcagagtgcgagacaatgcgcgtgctgagcaatataattgatagtgattactcggcgtacccgccgtgttgcatatccgatccgccgtgcatgctcaatattccggggatttgggcctgggttgggggttgggtttga

SEQ ID NO: 37755 - protein, 157 aa, DROSOPHILA
MNEIIHYQIQGQIPCDRNLRDVELISCRLRRVEPLCRLPGSALQQLAMCGFYEDLEKGVTLFRAGEQGRFWYAVLGGSLEVRYHAHADADGKVSPYLHQSGDETSWNTIPPCAECETMRVLSNIIDSDYSAYPPCCISDPPCMLNIPGIWAWVGGWV

SEQ ID NO: 37756 - DNA, 6200 bp, DROSOPHILA
catctaaagtaagttcgtatatagtatagtatatagagttgtaaaaagcaaacatacgattggatttctgccgcactattttctccgcatatgattcgctcacacctctgtgggtggcgtgcactttgacctttttcaagaaccaaaccctcgagaacacactttccaggatgggttggatcctcgaagacgcctcggacaacggcagcttcgtagcccgaaactaagagaacggcgattgccgcaagtagcacggtagatgaacgcatcttggagccttcaaatcccaacctacactgaacagcccagtcaattctgagaatataaacgctttatctatcggtggccggtcaggcaagtcgtcggaataaatatttgtataagtagccagagcttcggaataaaattagtgctttgctcacacaaacgcatttattactacaataatcattcgagacgggcagcactttgttgtcgagccgataatggacaaataaaaatgccaagcactttaagtatggattttactaatctgtttgtttttataactatacttatggcccatatacatattctgtgcgttttaattaatagatagttatcattcttgttcttcatgcattttgaatacactaatgaaaagcctcaggtgaactgagatatgtggagatattttaccactgcatcaggattaacattttatcatagtttattaagaaatattttgcaagtgatttataaacgcatataattcataatgtaatcgtttacacttgttgtgctcagctaacttaaatcctattcaaaaagttttgttctgccaaataataataaagttcaggggttttatttcgatttaataaagtccaaaatgttaattagtttaatgttcacgttatcacacttttgttattcaacttgctcatatttaagccgtaatcagcagcggcaaaaccaaatcaatatatgcccaaatatttcctaataaacaaaacagcatatgctgctaaacgtgggaatatgttatgcgggtccaccctatagtaaatataatttctattttttctgactctgttcgcatgagaaaagccaaaccagcacgggattattttgcatttgttctcgccctttcgcagctttgccctttgagtatttagacgagcacgaggacttcaactacgacctggacacggcgcagtcccaggccaagtacgacgcccgtctgctctcgcagcagatgctcagcgatgcagagctgcagcggcaggggctgagcgacggccaggacaacgccctggatggcgactccgcggcagctcaggggactggagcagggtcccacttggatgcggtatcctctgtccacgacgacctggagccgcacagcagggcagcggcgtgcttcaccaacgggcacaagtacacgcacggacagaaggtaggatgacgccagaggcaatatttcaaatcggtctttcactggttgaacgctgctatttagtcagaaaagaacagttcactggcttaaaaacgagttaaatgaattataacagtgcttagccgtacatttgtggtttctgtgcaactcggaagcagctagagaagttcctgcagcacctttgtagctaaatcagtagcgaaaatgttagctagacctgtataatttaacaagtactatgatttttctacttcgtcatcttcttttgactcaaccctcgttttattcagtgaatccttcagacatccgtttttgtgggtgtaaggctgcaatggaactctgcgtctgtggtcatttgaataaccataatcggacgagcgttcctggtaattgaacaaagagagtgcataatttgaatttgtggctcgttaccgcacatgtgatgatatgaatgccagacccagagcagtctccctgctccttcagccgagatgtgtgctttgctcgcccattcattgtatctcaggccatcaaatcggctggcgttgtgattgattgtctggttgtgggtgcacatgttcccacatgttcagtgtacatatattgtataagccgcaggagcacctgctggccgaacttgtcggaggagaaacatctaagttatttgctatatccctttccaggttccgcgcctggatgcctgcgaggtgtgtctctgcatggacggcgagatcttctgctggtgggagaagtgcggttggttctgcgtcggcttttcccggcatgcataatataacgagaaacttttgcctttttctcgcagataaggccaatgtaaacaaggcgaggacggcgggggacaacgcaggacttggacttggtgtcgaggacgacggcgacggcaatggcaatggcgatggcgatggtgactattcagatccatatcgccacgagagcacaacgggaaagtcaacaaaagtgcataaagcggcgaggaaagttggcaagcggcataagcatcgcaagaatcaaaagaattttaatgactacgaagtttaccacagccagcgggagaagcagcagcagcagcagtcggattataaaaagtccgccataaagcagcagctccagatgcagcaaaaacacaaaagcgacaagagcggtgctggcaactacaatataatcaagcaacacaaacacgagcagcagcagcagcagctcaaaataccgcagcagctacatcagcaacagcagcaacagaatgtggcagctttgggtgttaatcacgcagcaaaggcaacgcattatcagcaggcagcttcgacgcccctgccaactcccccacccccgtcggagcacccgcagcacagccaccacccacaccaacaggcgcactcgtccagcaaaatcctcaacttccccgagaacttgccagccctgctctactacgactacaagacggaggagcacgagcaccaccagcaccagcaccaccagcagcacttgctgcacgaaaaacagcgcttgctgcagcagcagcagcagcaacagcaacagcagcagcagatggtgcagcaagaggcgttggcgcgacaaaaggcatctgaatccgcatctgagcccgaatcgcgggccggaggcacagcagagggaggcgttgaacccagcggagacttggccgctgataaaaactctgatgaggcggaaaccgacagcgatattctgccagagccgcctacaaagcagcccagggcagctgccacacaatggccaactccatctagtaacagctcggccagggcgttgatgacgagcaacgtggcatccacatccacggctgcgacaacgacaacgacaaagacatcgaaaacgaaaacgacaacggcgacaacgggaaggacgacgacgacgacaacggcgacaggcacaaatgaaatggtgacaagcacgctgtctggaatggagaagtccggggccacagttgcagccacagatgtgagttgggaggttgagtagggtcctcactttggtcgggcattgtgttggaaaagtagcgcaaaaacatatccatctccaaacgtaagcattggaaataaatgccagaacttcctgttagattaaaagttgagggacaatgtttgtcctttctgagtgatactgttattgtgcgaatgatagtcctaaggaatcttcaagagacttcctcctttgttgggtgatttttctaattttaagatgaactagggaagcgaactgaagccaagcctccttacagactaaaactattatcctccatttgtcagaagctcagggtatttataagactcggtccccgaaagtagcttttacggaaaaccccaagggaaggccttacccaattagtctgggggaaactgccacttcattggctgcccggacgagaagcttgaactctgcgccttcggtggtgtgcccagtgagcccgaaatgcttctggtaatggggtttttcatgctcgagctggtttattatttaccatgcagtcaagtcgaattaacagtctgtgctttattcccgaccagcttggacagatgcaacccgatcgccgtggaccagacgcggagcgagacgacgccttccaccgctggctgacatccaccgagctgaatgctgacaacacaaactccatggacgacagcctggagcgggaaacgccggcatcgacaataatcgatgatgttggcacggccaacaagagtgacaggagcatcggcggcatcggtggcatcggcaaagacaatggcaacgacgccgtcttctttcgcagctcgtacaacgattacagcagcgaattcaatgggagcgttgtcaatattgacattacactaactgcagttgatgtgcatccccgtcgccaaacggatttaattgcaaatggcaacagaacgtcaggcgctaacgacaatggcaacagctgtagcagccaggttggagcagcaggaacaacaatgaacccagtggcagtcagcaccagcagcagcaccaggagcagcaacaatcaggatcagcctcagcagagccctgttgtcccgccgtacaccctgacaacgattataacaactgcgccgatggcaccagggcgtatgtgcaatgttttgggtaagcaagcaagtcgaaggaggtggccgtccaaggggattatcgtagcacagagaaataaatatcctcgggcatttgcggtcaagctgctatttggtcagtttgcttccatctgtttgagtttatattactatactttttcattgcgacaaagattttgccagactaaaatcgtattgtcaagtcctttgcgttttgataagaactgcatcagctgagtaagcctatttaaaatattatttaagccttttcaatcattttgctaaattcagtaagagaggacaaagccaaataaaaatctctgataaaataagcggtataatcattcgattgccggctaaacattccgacgtgagtctgggtaatgaaaacaacattcccgtatttcactactgcgcataacaattgctcacttctaatcccatttaaactgcaaatcaaacgctactcgttctaggcaaactgtataaaattggtgacattctgccgcaggacacgggcaactgcctgcagtgcatttgcacggatgccgtgactcccgacgagatgccgagcgtcacctgcagtccgcacaattgcccaccgctggttcttccggatctgttcgatgcgactggttactgaggttacgggtttgtgctgtaagttgctgcaacggcaggtggcaagtggcaggtagcaggtggaacgcccctgcggcatgagctgtgggagtttttgaatagatcgaagcgtgatttaaattttgaaaccgaaagccacaactgcagccagcaaacgaaatagaatcgaaacgaacgaacaaacgaacgaatcgaatctaatcgaatcgattcgaatcacactcacaacaactgcactacagaactcactcttgaattgcatgtcacggtctcaactaactcaactcaatatgaattgtatggatttcagtgtaaagccctccctatcacgagtgccccaagcactctctaaaacgaaacctatcagcagacatatattatattcgtaccaaactatatagtatcgatccaagccgaccagaggggagagaggggaatgaataaagaagaagaaggaaatcgcagttggctcacagtttagactttaagctgaatgtttatgcattttataagaatccgtattcatctctctccgcaacaaaaatccattaatgtatacagcagtagcaatcgtaaagaatttatagatgtaccaaacagaagtatatagtatatacaaacatatacgagtatctactctatatctaaatctaatatctaaacctatacctgtgcgtagcgagttcggtgggatcagtttgattacttagattatttcccgactgagaggaaaccgtgtagagttttcagtgtatttatcaacggagagccccaagtgaaacgagtaacttatacaaatataggaaactaaatctaaacgaaaaaaactgaacaatgacaaataatgaacaacgtgtgtaacgtgtgtattttaattttgatattaaaagcaaacaacgttctcctcatttgcatgcatgttattgtttcgcgcttctttggaaattaagccatacgtaatctatgaatcgaaaattgacgttaggagcaatgtatggaca

SEQ ID NO: 37757 - DNA, 2427 bp, DROSOPHILA
atgctgctaaacgtgggaatatgttatgcgggtccaccctatactttgccctttgagtatttagacgagcacgaggacttcaactacgacctggacacggcgcagtcccaggccaagtacgacgcccgtctgctctcgcagcagatgctcagcgatgcagagctgcagcggcaggggctgagcgacggccaggacaacgccctggatggcgactccgcggcagctcaggggactggagcagggtcccacttggatgcggtatcctctgtccacgacgacctggagccgcacagcagggcagcggcgtgcttcaccaacgggcacaagtacacgcacggacagaaggttccgcgcctggatgcctgcgaggtgtgtctctgcatggacggcgagatcttctgctggtgggagaagtgcgataaggccaatgtaaacaaggcgaggacggcgggggacaacgcaggacttggacttggtgtcgaggacgacggcgacggcaatggcaatggcgatggcgatggtgactattcagatccatatcgccacgagagcacaacgggaaagtcaacaaaagtgcataaagcggcgaggaaagttggcaagcggcataagcatcgcaagaatcaaaagaattttaatgactacgaagtttaccacagccagcgggagaagcagcagcagcagcagtcggattataaaaagtccgccataaagcagcagctccagatgcagcaaaaacacaaaagcgacaagagcggtgctggcaactacaatataatcaagcaacacaaacacgagcagcagcagcagcagctcaaaataccgcagcagctacatcagcaacagcagcaacagaatgtggcagctttgggtgttaatcacgcagcaaaggcaacgcattatcagcaggcagcttcgacgcccctgccaactcccccacccccgtcggagcacccgcagcacagccaccacccacaccaacaggcgcactcgtccagcaaaatcctcaacttccccgagaacttgccagccctgctctactacgactacaagacggaggagcacgagcaccaccagcaccagcaccaccagcagcacttgctgcacgaaaaacagcgcttgctgcagcagcagcagcagcaacagcaacagcagcagcagatggtgcagcaagaggcgttggcgcgacaaaaggcatctgaatccgcatctgagcccgaatcgcgggccggaggcacagcagagggaggcgttgaacccagcggagacttggccgctgataaaaactctgatgaggcggaaaccgacagcgatattctgccagagccgcctacaaagcagcccagggcagctgccacacaatggccaactccatctagtaacagctcggccagggcgttgatgacgagcaacgtggcatccacatccacggctgcgacaacgacaacgacaaagacatcgaaaacgaaaacgacaacggcgacaacgggaaggacgacgacgacgacaacggcgacaggcacaaatgaaatggtgacaagcacgctgtctggaatggagaagtccggggccacagttgcagccacagattctgggggaaactgccacttcattggctgcccggacgagaagcttgaactctgcgccttcggtggtgtgcccagtgagcccgaaatgcttctgcttggacagatgcaacccgatcgccgtggaccagacgcggagcgagacgacgccttccaccgctggctgacatccaccgagctgaatgctgacaacacaaactccatggacgacagcctggagcgggaaacgccggcatcgacaataatcgatgatgttggcacggccaacaagagtgacaggagcatcggcggcatcggtggcatcggcaaagacaatggcaacgacgccgtcttctttcgcagctcgtacaacgattacagcagcgaattcaatgggagcgttgtcaatattgacattacactaactgcagttgatgtgcatccccgtcgccaaacggatttaattgcaaatggcaacagaacgtcaggcgctaacgacaatggcaacagctgtagcagccaggttggagcagcaggaacaacaatgaacccagtggcagtcagcaccagcagcagcaccaggagcagcaacaatcaggatcagcctcagcagagccctgttgtcccgccgtacaccctgacaacgattataacaactgcgccgatggcaccagggcgtatgtgcaatgttttgggcaaactgtataaaattggtgacattctgccgcaggacacgggcaactgcctgcagtgcatttgcacggatgccgtgactcccgacgagatgccgagcgtcacctgcagtccgcacaattgcccaccgctggttcttccggatctgttcgatgcgactggttactga

SEQ ID NO: 37758 - protein, 808 aa, DROSOPHILA
MLLNVGICYAGPPYTLPFEYLDEHEDFNYDLDTAQSQAKYDARLLSQQMLSDAELQRQGLSDGQDNALDGDSAAAQGTGAGSHLDAVSSVHDDLEPHSRAAACFTNGHKYTHGQKVPRLDACEVCLCMDGEIFCWWEKCDKANVNKARTAGDNAGLGLGVEDDGDGNGNGDGDGDYSDPYRHESTTGKSTKVHKAARKVGKRHKHRKNQKNFNDYEVYHSQREKQQQQQSDYKKSAIKQQLQMQQKHKSDKSGAGNYNIIKQHKHEQQQQQLKIPQQLHQQQQQQNVAALGVNHAAKATHYQQAASTPLPTPPPPSEHPQHSHHPHQQAHSSSKILNFPENLPALLYYDYKTEEHEHHQHQHHQQHLLHEKQRLLQQQQQQQQQQQQMVQQEALARQKASESASEPESRAGGTAEGGVEPSGDLAADKNSDEAETDSDILPEPPTKQPRAAATQWPTPSSNSSARALMTSNVASTSTAATTTTTKTSKTKTTTATTGRTTTTTTATGTNEMVTSTLSGMEKSGATVAATDSGGNCHFIGCPDEKLELCAFGGVPSEPEMLLLGQMQPDRRGPDAERDDAFHRWLTSTELNADNTNSMDDSLERETPASTIIDDVGTANKSDRSIGGIGGIGKDNGNDAVFFRSSYNDYSSEFNGSVVNIDITLTAVDVHPRRQTDLIANGNRTSGANDNGNSCSSQVGAAGTTMNPVAVSTSSSTRSSNNQDQPQQSPVVPPYTLTTIITTAPMAPGRMCNVLGKLYKIGDILPQDTGNCLQCICTDAVTPDEMPSVTCSPHNCPPLVLPDLFDATGY

SEQ ID NO: 37759 - DNA, 2476 bp, DROSOPHILA
acatgcagacctacgaggtggacctgcgcgagtgcggccccatggtgctggacgcgctgatcaagatcaagaacgagatggaccccacgctcacctttaggcgctcctgtcgcgagggcatctgcggctcctgcgccatgaacatcggcggcaccaacacgctggcctgcatcagcaagatcgacatcaacacctccaagtcgctgaaggtgtacccgctgccccatatgtacgtggtgcgcgacctggtcccggacatgaacaacttctacgagcagtaccgcaacatccagccctggctgcagcgcaagtgagtgggagcaatccctacgagctggaacgttactaataccacgccctttgcaggaacgaagcgggcgagaagaagggcaaggcccagtacctgcagtccgtcgaggatcgctccaagttggacggcctgtacgagtgcatcctgtgcgcctgctgctccacctcgtgcccctcgtactggtggaacgccgagaagtacctgggccccgccgtgctgatgcaggcctaccgctggatcatcgactcgcgtgacgagaactccgccgagcgtctgaacaagttgaaggaccccttcagcgtctaccggtgccacacgatcatgaactgcacgcgcacctgccccaaggggctcaatcccggccgtgccatcgccgagatcaagaagctgctctcgggcctggcctccaagccggctccgaagctggagacggcggcgctgcacaagtagggcccaagtcctctactcccagttcgtcccctgctgtccttaaccagtgagctaagcctccgaaaatgtgtattggagactcctccagccaacatgcttactatgttataatttatttaagcctaaagtatccgacacttgttattacagtttgtaaagggaacaagacgcgaaaataaataattgtgtatccaccagccgggcgacattgtgatgggcaatcagggcactcccattcatttagggggctgtgggtgaggtctcgtcgttcatctgaatgtcgtcggcggagtaaaagtcctgggttaccgggatgacgcggtcgttggtctcgtcatcctcctcatcgtgactgtccgtgtcctcgctgtcgtcgttggctgcacaagggcaattggacgtaaaaacgataatggtaatccgaatgcagtgtcctgccgtactcaccatcctcgtcgtcggtctcaattccgggtatggtgagcattttgcccagcggctgcagatctgtgccggccgtcttaagggactctcgctgtacggtttaagtttataacaatttatacagaaagcggtgtctggagagaactcacccagttgctcctttcatcctcataacgccgcgtctgcgattcttcgtttacggaggcaggagccatgtccaaccagtagcgattggccacggagactttgagcgtgggaaagaatggaatcattgacattttcgacggaatcttgaatgcgctgttttcaatatttgttgttctttctctggaagcctttgatgcgatctggcaacgccgcaacatacgctgtaaataataccaattttacaggggcgtagtcgtaggggcgcattaaacgcaaattacaatattaattgtaattgtaattcatcaatctaactatgtattttgttattgtcaagggaagtccgataaccaagggcttaatacagcttactcaaaaatatatatcttcactattacaaattgaccttaagaatcagaacataaccaaaacgaataatatatattattcaaaatctttttatttattaaagaagctataaaaattggacaaactagacacaggaacggtattcccttgcagttttattggtagtaaagttccagattcatgccatcgtgaatttcatctaagaaagcgaaaaagaaatgcgggtaaagcaaggcgttacaaggacactaaacaagggcttacagtcagataggcgaatcgggtccttgaagattgtgtaccacttcttcaggacaatcttctcgtgctttgtgcccgtttgtgccgcgattagtttcttgaggtccccaatcgtgtcgtccgggttgcacttgacgcgcacctgtgggttaatcgttggttaacgatgcttgcagttgccttgggtacttagctgcttaccttcttgccaagacgatcgttacacgttatttctatcatattttatggctttgctagacaaatcacaacaataaattcttgatttgttgtggtattattgcttagggttgtcaaataccctttaccgaataccgagtggtttgagggatcgctaattgtccgcaatgctatcgatattttatttaattttaaatatgtttaaataacaatcatatagaaagtcgaagttaaagatatcagaagtctgaaagtatacttagaaagctcaattgcttgtcatgacgcaaatctatc

SEQ ID NO: 37760 - DNA, 351 bp, DROSOPHILA
atgattccattctttcccacgctcaaagtctccgtggccaatcgctactggttggacatggctcctgcctccgtaaacgaagaatcgcagacgcggcgttatgaggatgaaaggagcaactggcgagagtcccttaagacggccggcacagatctgcagccgctgggcaaaatgctcaccatacccggaattgagaccgacgacgaggatgccaacgacgacagcgaggacacggacagtcacgatgaggaggatgacgagaccaacgaccgcgtcatcccggtaacccaggacttttactccgccgacgacattcagatgaacgacgagacctcacccacagccccctaa

SEQ ID NO: 37761 - protein, 116 aa, DROSOPHILA
MIPFFPTLKVSVANRYWLDMAPASVNEESQTRRYEDERSNWRESLKTAGTDLQPLGKMLTIPGIETDDEDANDDSEDTDSHDEEDDETNDRVIPVTQDFYSADDIQMNDETSPTAP

SEQ ID NO: 37762 - DNA, 2258 bp, DROSOPHILA
ggctagaggtcagaggtgtcgtgctgttaaccgaaattgtgacagcaattcttccgccagttcagatatccgctgctagacagatttcaccaatgttcttgactggttacgaaagcctgcttacaactggtccacgtttgtggccaacagagttgccaagatcacgcggcgacaccagtcaactgttgggcacacgttccatctaaacaaaactccgccgatctagccagtcgaggcgtctacctatatgaaatggcagggtttaatctctggtggcacgaaccagagtggctgcaagggccacaagatctatggcgagcgaaactcatccagtgccagacctagagcagagcgacttacatttctgtggccgagggagggaagctttcaaaaaacaactgagcagtttggggtatgaaatgagaatgcccctttattacaaaagttgaatgtttcccccaaatgtcttcgtccgagttcgtattggcgatcttcaatgaatatttgctcagctttcggtttttcgttgctgggtcggtgttgtttccctggggccagagagagagggtatgtaaactcgcgcgatcaaagtgcattttgtcaatatcgacttctggaacgttttttcaaaatggtcaaggaacttcgagttctggtatatgttccacgtttccttaagcgcttcacggccgactaatgaagaaattcaaaaggcagaaagaactctgaactccattgcgcaggaacgagcaatagcatctggtagattaaaggcccattccaatgtccagttactgaatatgtttccattcattgactaacaaggcctcttaaggtcatgcggccgcctcacagaactcagaaaagtttaagtgaccgattgatcaaatattccgcctttatatgtcgctggtggcgggccctgtgagtccgccctggatagaatcgttctatttgggtatccagtctgcgaattcgtcaaccagggccattagggcatttaggtgtcggcgcgctgttttcctttatcgtcgccaacgtctccttctgtgacatccctaagggtcgtattagggtctgcctggtccaccagctttgtcatgaagcctctgggcagaaagaattcctggaagatctgtataaactcgtcccacgtctcccagaacctgttgatggcaataaaccactttaaggcccagctctttagaagttccggcatcgctcttgacatctggttaatgtgcagtccatacgtcattgctgaccattccacctgttccgaacttgtgcctttcggacctgccctcaagcttgatccctagggcgcttgctatagcgggaaagtcattcctctagaagctgtatagccgcgactttcccatattactctgtgttccgttggccaggaaaatcacggttgggcgccagatgtatccaactgtttgcttgtttctgctcgctacgagctgcagcggctagctcatagagtttgtgtgttcgccccaccaaattaattatttgtgtgattgcgcgaccaaggagaagacaatggataagggtatccacgcgacgttgctcttccgtcctctttccttcgttgtcctccgtagtcaacggaccacgtgccggcttgaatgcgcttaggatgctatgggggcagcgtgtatcgtccactaagttaaggaaatgcttttcttgcgaccatctttgccgaccactgactccactgttccttctaaccactccaggctattgtcgtctctgccgacggaccacctgccagttagattggggcttaggatgttatggggcagggtcgattttccgttaggttaagctaactgactccactgtcccatctaaccacgccagctccttgtgttcgaggattgctgcattgctccattcttcacttgcagtgattgcccttgtgtgtccgtctcgacactcactggctgattctttctatgtgctgtgcgttctcactgaccgacatcgctctctagcttattgtctcgccctctgactctattccgactgtctgactgcgcgaccgcgcccagaccacgtgacttgcgcccttactctccgcgactatccttgcgtacttatggctcctcgagtgctgtaactgactgcctcgagctgccgtgttggtgttaagaaatatctctaacgcatcattaacattcgaagagctcctgaaggtgttccttgatgtcaaagccattctcaacccaaaaccgatagctttaggc

SEQ ID NO: 37763 - DNA, 258 bp, DROSOPHILA
atgacgtatggactgcacattaaccagatgtcaagagcgatgccggaacttctaaagagctgggccttaaagtggtttattgccatcaacaggttctgggagacgtgggacgagtttatacagatcttccaggaattctttctgcccagaggcttcatgacaaagctggtggaccaggcagaccctaatacgacccttagggatgtcacagaaggagacgttggcgacgataaaggaaaacagcgcgccgacacctaa

SEQ ID NO: 37764 - protein, 85 aa, DROSOPHILA
MTYGLHINQMSRAMPELLKSWALKWFIAINRFWETWDEFIQIFQEFFLPRGFMTKLVDQADPNTTLRDVTEGDVGDDKGKQRADT

SEQ ID NO: 37765 - DNA, 3811 bp, DROSOPHILA
tcaacaagaacccgaattgctaatgtccatattttttggtaaacgggtaaaaggggagatacttttgcttttttttcgagcgggttgaacagatggagccgtagtcccttaaactatccggcgcatcacctgtgtgggttgctcactttgtatgaagtacattgggtacgcatggtgtatgaaagcgtcgattagacgcttcaatggctgcaccctgcaccctggatccagaacctatctaccgcaccccgccccatgtcagcgcgaaattggctaacggacagcttggcgcacatgttcgattatggccaaatcgagcgaccaagcagaaccagcggcacatgacctgggctcagcgatgccaagacctgggtggttgtacctagaggtacttgattgctttttaaactcagcttggtacagcgtacacgactgattatttagaagctatgacagctttctttgctttgatatttttcatatttatatataaattataaatatatatttataagcaggtgatatggttgaaacatatatcaacgaatatgtcaaatataatacagtgaagtgtctgcattattttattgtacctgcgccatcacaggtacggctcctctttccatcgactgcagacgtaccgcttatgtgcatgactgggtgtccggggtggtggatgtgaatgtggatgagtggcaggagggcgcaggcgcagctcagcccaacagccaagttggtctggactcctggcggcccatcgcattccgtggccagtcgcagcgcgagacggttagccagttagccagtgcggaccgactaattcccaatttccgctcttgactaaactaaagattgagaaataaagaaagaaatatccttcgtccgtcccccagacgaagcaggtcaatttttttttcgtgttacttgctctttttcgccaagtgtgagttgtgtgttttggcttggctaacgtgattgaaatcgagacagccgggacatcatgattgtcaacatgcccgtcaatggaacgggcagtgcatccagcccaacatcgaatcccagcagcaacaacaacaacaatagcagtaccaccaatcaaaatgatacgaacactaatcttcccggtgattacaactttcttaagcgcaagttcgacgatcaggaggatttggctttgggccacgactacgagcccatcggggcaaatccctggaagaagcgacacttggactacgatgccggggacctgcacttccacctgcagctggaacagccacctagtaatccgccaaccaacgctgcacccgcccaatcctcgacgtccttcatcaacgatctcttttcctatgagagcagtcttctggtgcccgccgtcgcctattcgcactgtccaccatcgagtgctccattggatgacaatggtggttggaccggtggcgagctgctggagctggatcatcgttataactccggcctgcaggcggaactggggcaattgaatgccactttgccgccgccaccaccaacatcatcatcagctcaaaatgcatccaatcatacgcagcagtcaacacaacagaatgtcagtcctggtcagaacccacatcagaatcaacattttctggtgccgcagaagcagcggatacagtcggcgggccgacgcacctcatccggttcggttagtggggccaatgaagccaccgaggcggacttcgaggataagaacctctcgtggctgctcaactttaagttcgacgagttcccgcacctatcgccgcacaatcagattcacggacaggcggtcaatctgccggagggcagtgctccacctcatccaccatcgacggcagtgccgatcgccacgtcgccctgcagttcctcctcgccatcatccgcctccgccgcatcggcatccgcatccgccataagcacaaatcaatctctcggatcgggtttggtggatcaacgggccagatcgcccaagagttgctccagtgcagcgatgccagcggcattaggaggaggaggcaacggctccgctggcgcttcagcagcggggggcgtggccggcgtgggctccaccaagactgggcgcaagttcgaggagctggtgatggaggtcacctcggagttggacggtaacgacatgatagttgccgagcacgttgtcgtcgaggatacttcgtccaaggcgtaagtgttgcagaaataaaacaatatgacagtgtcaacggttaaattctatatttcctaatttatttgaaacatctatttattcccgttactcatagaggaaaagggtatactagattcgttgaagtatatataaaatttgttgatcaggatcaatttttaaatttttttctcattttattccccaatatctatcgacatcccagaaagatgattaaatttcgcgttcgcattcacactagctgagtaacgggtatctgatagtcgggtaactcgactatagcattctctcttttgttttaatatatttaacaatctttttctctgatttgtgcgttctccatttgctttcaatgccgtcctccaatcgatgccgccaacgaatttccccaaccacgcaatcgccgatccactaaaccaccgaaccacccaccaatgtggctgaaatccaaaaccaaccaccgcaaaacaagcaggccaaagaaaccaccgttcacctacacggagctcatcgaatacgccctcgaggataagggtgagctgactgtgtcgggcatataccaatggatatcgtaagtactgtcccccatcgaaccacccactgaatcaaccaccaccgcccaccgcccaccgcccattcggatggacgccattttgtggagtgctagccatcctgttattttttttgatggcaaaaaacgccagccaggatgcaattaaacaaatctcaagcatttcgttttggccattcccgttggccatttgatttcctcgttcgctgggtatttcttcttaccatgttttcgttccttggttggtaaccaaacttaaacaaagtgccacacaccggcaaacaaacgatagcggccacaatgaaagtgcaaaaagttagcagctcaaacaaatttatgggctagaaaattgcatttaccttgccttcgctcgcataaggtgaaaaacaaaaatgttgttaaccaaactatttgcgggttgttcaacaagttgtttatgccaaactggtattccctggtattatcagcttatacggatagcgacccattaattttggcttttggattgtttagtggcaattgttgagtataccaaattcttagttttatggtgataagtgcttaatacggctcattccgtattagttaatcattcaatagtattcaaaactagttaatcattacctacttttcgcaaaacgttaaaatttttcaaaattccatttttaccacgctgagttcgaaaatatcaattcgtcaagaatcgctgacgaagaaaacaataagttttaacacatttttcaaggttcatcaatttggcctttcgcccccactgctccccacctgttttttgttattcatttcttttgttgtcttcgaatacccggaatcagtgtaaatatttgatgccgcagccgcgaatgttgcgtgtaaatatcctatataaatttacatataaaaccaccccgctcgggagggggaggcaaataatttatgacatttgcccatcacctgcgcacctgcactcctcaccacccccccgcatttaatgtaatgaatcgacagtccaagaagtttcggctcagttcgaatgggcgtgcagtttg

SEQ ID NO: 37766 - DNA, 1338 bp, DROSOPHILA
atgattgtcaacatgcccgtcaatggaacgggcagtgcatccagcccaacatcgaatcccagcagcaacaacaacaacaatagcagtaccaccaatcaaaatgatacgaacactaatcttcccggtgattacaactttcttaagcgcaagttcgacgatcaggaggatttggctttgggccacgactacgagcccatcggggcaaatccctggaagaagcgacacttggactacgatgccggggacctgcacttccacctgcagctggaacagccacctagtaatccgccaaccaacgctgcacccgcccaatcctcgacgtccttcatcaacgatctcttttcctatgagagcagtcttctggtgcccgccgtcgcctattcgcactgtccaccatcgagtgctccattggatgacaatggtggttggaccggtggcgagctgctggagctggatcatcgttataactccggcctgcaggcggaactggggcaattgaatgccactttgccgccgccaccaccaacatcatcatcagctcaaaatgcatccaatcatacgcagcagtcaacacaacagaatgtcagtcctggtcagaacccacatcagaatcaacattttctggtgccgcagaagcagcggatacagtcggcgggccgacgcacctcatccggttcggttagtggggccaatgaagccaccgaggcggacttcgaggataagaacctctcgtggctgctcaactttaagttcgacgagttcccgcacctatcgccgcacaatcagattcacggacaggcggtcaatctgccggagggcagtgctccacctcatccaccatcgacggcagtgccgatcgccacgtcgccctgcagttcctcctcgccatcatccgcctccgccgcatcggcatccgcatccgccataagcacaaatcaatctctcggatcgggtttggtggatcaacgggccagatcgcccaagagttgctccagtgcagcgatgccagcggcattaggaggaggaggcaacggctccgctggcgcttcagcagcggggggcgtggccggcgtgggctccaccaagactgggcgcaagttcgaggagctggtgatggaggtcacctcggagttggacggtaacgacatgatagttgccgagcacgttgtcgtcgaggatacttcgtccaaggcgtaaccaaagaaaccaccgttcacctacacggagctcatcgaatacgccctcgaggataagggtgagctgactgtgtcgggcatataccaatggatatcgtaagtactgtcccccatcgaaccacccactgaatcaaccaccacc

SEQ ID NO: 37767 - protein, 398 aa, DROSOPHILA
MIVNMPVNGTGSASSPTSNPSSNNNNNSSTTNQNDTNTNLPGDYNFLKRKFDDQEDLALGHDYEPIGANPWKKRHLDYDAGDLHFHLQLEQPPSNPPTNAAPAQSSTSFINDLFSYESSLLVPAVAYSHCPPSSAPLDDNGGWTGGELLELDHRYNSGLQAELGQLNATLPPPPPTSSSAQNASNHTQQSTQQNVSPGQNPHQNQHFLVPQKQRIQSAGRRTSSGSVSGANEATEADFEDKNLSWLLNFKFDEFPHLSPHNQIHGQAVNLPEGSAPPHPPSTAVPIATSPCSSSSPSSASAASASASAISTNQSLGSGLVDQRARSPKSCSSAAMPAALGGGGNGSAGASAAGGVAGVGSTKTGRKFEELVMEVTSELDGNDMIVAEHVVVEDTSSKA

SEQ ID NO: 37768 - DNA, 2026 bp, DROSOPHILA
ttttagttcatttctccatttatgagtcgtcatttctctcccaaaagtgggaaatccgaaaaaggaaaatacggaaaagctaaaggaataggtgggtgatttggggccatcaaagccaagctccccattttcatggctcgcgtgctgaaattttttggattgctttcgagctgaaatgtgggcgtagaaagtggtggaaagaaaaacccccgggggcagtggcagttaaccaatgacatagcctgacccattcgggggttgtttttccttaccggcgcgtgccgcccacccactccaattcgctgtgtgtcgtaatttgaaatactttccattttgttgtccgccaaaagcccccaaccgagcgcaaagcccacagcccacagcccaaaacacagcgaagaatcctggcacgcgatgtcctttccggtcgtcgttgtttcctctttacatctgaaaagtgggtgtgggtggtggatagcggtagtgggctgattgcggcctcttccacctgctagacatggggcatacatacttcattctttatttttttttttttttttaccacccgaaatcgcttgttcgtgactgactgagcaagtaaaaacgagctagaaaacccagggcaaaataaaagaaactacgcataatttgtgccagcgtccgtccctgtccatgtccttttttcgttttccgtgtccgtgtccgtgtccatgtttatgtccgtgtccgtgtccgtgtctgtataccccagtcaggcattctacggactagtatgggtctgccgcagtgctgttcaatgacgtgttttcgtgaaaattgcctcgtttccgttccggattggctggtcgaaatgggggctgaaactttcattgcaattggtcaactggccagtggtgagtgtctgtgtcggagaaccaatcctaaaagagacgataaacatagatgataaatggcggaccacaaaagctttaagtctccgtttaagcctgtctctaattccatgttatctcaacattttagcgatcgtttcccctactacaagtcgaatgatgaccgctggaagaactccgttcgacataatctatcgattaacccacattttcggaagggagttaaagcgccccaaggagccggtcacctgtgggccatttccagcggagattccgccgagaatgttctggcctgggagcatgtaagtggatatccatcaggcaaccgcatacaactaactattaatcccattgcatttgcagaagaagcagcggctggatttgttcttcaaaatggagtcgattaaccgtgagcgtatacagcagcatcagcaacagcagcaactgcagcagcatcagcagcaacaccagcagcactcgccgcagcagaaacaacattcggcggcacagcagcaacatatgccacaggccagtagctgcatgtacgatgaggcggcggtggcagttgctactctcacccaggaaatgatgcagactaacagcggcggtggcagcactgagacaagccagcagcagcagcagcagcagcagcatcaccaccaccacagccaccagaatcaccaaaatcacaatcaacaccaccaaagactgctgcccttcaacgatctgttgagcgacgatgagctgcgaaagacggcgggtcaaatactgaatggcatccatcgcgaggtggaagtacagtcggtcaactctatcatcagcacctaccacgatgtcctgttggataatggtgagttaacactaatcttgttcatacttatcccatgattattcaatgaactctcatcttgtctttcaatcctattcaaagactatttgaatcccatacacaaggacgtggttgttacggaaagtgtcctacggcagcagcatggcaccaacttgggcggaggcaataacaaccaaaataaccaaatgggcggcaatagccacatgggtggcggcaactcgcagtactacatcaccgaaattgatcccatggagctcggcattcagatgtcgcaccaagtggagcc

SEQ ID NO: 37769 - DNA, 717 bp, DROSOPHILA
atgttatctcaacattttagcgatcgtttcccctactacaagtcgaatgatgaccgctggaagaactccgttcgacataatctatcgattaacccacattttcggaagggagttaaagcgccccaaggagccggtcacctgtgggccatttccagcggagattccgccgagaatgttctggcctgggagcataagaagcagcggctggatttgttcttcaaaatggagtcgattaaccgtgagcgtatacagcagcatcagcaacagcagcaactgcagcagcatcagcagcaacaccagcagcactcgccgcagcagaaacaacattcggcggcacagcagcaacatatgccacaggccagtagctgcatgtacgatgaggcggcggtggcagttgctactctcacccaggaaatgatgcagactaacagcggcggtggcagcactgagacaagccagcagcagcagcagcagcagcagcatcaccaccaccacagccaccagaatcaccaaaatcacaatcaacaccaccaaagactgctgcccttcaacgatctgttgagcgacgatgagctgcgaaagacggcgggtcaaatactgaatggcatccatcgcgaggtggaagtacagtcggtcaactctatcatcagcacctaccacgatgtcctgttggataatggtgagttaacactaatcttgttcatacttatcccatga

SEQ ID NO: 37770 - protein, 238 aa, DROSOPHILA
MLSQHFSDRFPYYKSNDDRWKNSVRHNLSINPHFRKGVKAPQGAGHLWAISSGDSAENVLAWEHKKQRLDLFFKMESINRERIQQHQQQQQLQQHQQQHQQHSPQQKQHSAAQQQHMPQASSCMYDEAAVAVATLTQEMMQTNSGGGSTETSQQQQQQQQHHHHHSHQNHQNHNQHHQRLLPFNDLLSDDELRKTAGQILNGIHREVEVQSVNSIISTYHDVLLDNGELTLILFILIP

SEQ ID NO: 37771 - DNA, 3630 bp, DROSOPHILA
cttccgccctccccatgccaacaagcacttgaggtaaatgagtcaatagctgaaatttcactttgccatcggtgactccccctgccacccgacaaaaaaaactcaaaaaacaaaaaaaaatgaaaaatgaaaagagcccagtttgagttggcaacgagctccaacttgttggctctgcggaaatgaatgaatggagatacataggtacacctacatacatatgtatgtataggtagtgcgctagtatatgggggctattctaatgagctaacccaattcgtcaattaaataactctgcagagagatttcactctcgttttttgtctcttcgcgatgcgttgttaaatttggcttttagtttttaaagccattgggtttcgctgttaatttgtttactttgcatttggaagtgtggagaagggaggaggggggggaggaaacgcaaaaaccgaagatgagatgaaaagagaagtgaaagaaattatgtcaatatttatttaaattcatttcttttgcaaaatacaaggcggccaaaaacgagacgaaagaatgcggtgaaatttaatcgctggccacttgaaagcgatttccgagctgttgacttttggaatacctcttggttttgtgcccgtacccaccttcctcaaccgctccacttcgatttccatttccatttcgatttcgatttcgattttgaattccgcttcgcaaacggattctgcctacgcacagaaaacgcaaagtaaatcgccattgagctcgctttttcactatatttttcactatattcattctcggaggtaattttgttaactttagtataaaatacccattaaagagtcaacaatagtgctttaacttatagcatatgcactttcaaactttgtgcatatgtgtgttagttgcaaggggattgtattttggggcttacaatacaatcccttatttgtcagcatactgatttcgatttgcatgtttcgttaaagattcgcaaatcaagatgaccagctcgaggaatatgctactgatgctgctcctggtggccagtgcctccatacttcaactggaggccaagaccgtgttccggcgcacagacaagatatcggagaacttcaagcagttagatttgccgccagaggagatcgatcccaatgtggcgccaccggaatcggagccgcccaaggtggaggatgtcgctgatgtggcggatgaggtggtcaatgccgtgtcgcctgcttcgtccatcgacgagagtgccaatgagatagccagcggtgatgtggataccccgaatgctgcagcttccgttgcagaagctgtcgccccagccgctgccgttcccgaggtcgcagaggcagctgctccggcggtggccaccactctagcggccaagcctaccactgcaccgaccaccgccaagccggagaatcccatcagcaagttctgcaagtgctcggagagccactgcgactgctgccggaagttcggattgccattgctgcccagcggacctggctgcgccaagatcgcctatgtgggcaacgacgagatgagcgtgtccctcaaatacggtggcatcaccttggcctctcgtcgcatctccagcaagcgggctcgccccatttgcgtgggcctgcccggcggctactccaagttctgcggcaaggtctatggtctgtcccgttccaaggagtccaaggacttcaaggcatgcctggcctttgaactgcgctccgacgacgaggtggaggcctccctgcgcgtctcctgtttcaagtttggaccggaaggagtccgggtggccgaggcggagccgttgcctgtgaagcccagttcggatgacgatgatgacgacgatgatgacctctttggatttgccggtgagttggcctgttcatatacgtatacataatatttttgttcgatatattgcgtatccgcctcgttgaactgactcctctagtccatgctaaaaatatctaatctaactccgttatctttataatttttttttgtttttggtgtcagctggtggcgacgatgacgaggatgaggaggacgactatgacagcgacaacgatacggatgcggatgccgatgacgacgatgacaccgaggactatgccgatgatgacgaggccgaggcgcccgaggatgctgattacggtggctttagtttggccggacttctggacgagctcgacgatgacgacgatgagaagccggttaagaagccagcggctgcggctgcgtcagcggctgctgaccaaacccgcgagcatgtaattgccgatggccaggtgaccgcgactacgacgaacggcgaccaggtgcagagcaaggacgatacgggagctcctgccgctggcgaggctgttgcagctgctgcacctgctgcgcctgctgctcctcttgctgctcctgcagccgcagcaccgattgagggagaagtggccgcagcggtgacaccggctaccacagctgccgccgatgaagactccaccacgcccaagtccaagaagtccaagaaggcgaaaaagaacaagaagaagaaggccgccgcagaggcgacggatgagactggattcgcctacgagctcctcaatggcatcctggattttttcaactgagcggccagcgcgagtttgccaacatgctgggcaatagtgtaaataccttgtaccgccgcagctggtcgacacaaatttagttcatagttcataggtcgtagcgcttaagggccccccgaaatttcacatatttatttcaacttcgataatttattttaaatttataacgaataaaaatgaaaaatgtactacccagtgaagtgacccactcggttgctggacttcatttacatctaaatcggaatgctggcctttttcgggcttttgcggccaacatttctgatttgattgaggttttgcagtcagtgctgttttcgcacctgtggcacgtttcccgttccagggccttcactttgatccgaattaatttgcatcgaaattccagctgcactgcgtggaactgtggacttagccgcaggccaacagaagttgacaagatatatacaatataaagctggccatggtcagaacccaagttcaccacaagtcacaggagttgcatttgagatttaaagcacgagtttatgtatttgacaatgattcacaaaactgtggggcaacacaaatggggaaaatattagataaaagatagaaggggcaacaataaatgaaatagtttagagtcactaaaacgtagctacggttaccacaaattcgactcgcattccgtgtaactaatctgggacttaattacaagtaaaaggtactcctttttcctgggccagcgatgactacggcactttgagttccgtttcctatataagtgtaagcatataaaggatagccaccatcgaagcagcataattaatgttccagccaaccattatccatgtttttattctccttcactttccggaggtctcggcatcgctggcattttgattagtcatttatgggacccactttcgcccttggtcctctgggcataactttcagctggggaatcccgactaagccgcagaaaacagcattttttggaggtcgaggtgctggtgctgcg

SEQ ID NO: 37772 - DNA, 1482 bp, DROSOPHILA
atgaccagctcgaggaatatgctactgatgctgctcctggtggccagtgcctccatacttcaactggaggccaagaccgtgttccggcgcacagacaagatatcggagaacttcaagcagttagatttgccgccagaggagatcgatcccaatgtggcgccaccggaatcggagccgcccaaggtggaggatgtcgctgatgtggcggatgaggtggtcaatgccgtgtcgcctgcttcgtccatcgacgagagtgccaatgagatagccagcggtgatgtggataccccgaatgctgcagcttccgttgcagaagctgtcgccccagccgctgccgttcccgaggtcgcagaggcagctgctccggcggtggccaccactctagcggccaagcctaccactgcaccgaccaccgccaagccggagaatcccatcagcaagttctgcaagtgctcggagagccactgcgactgctgccggaagttcggattgccattgctgcccagcggacctggctgcgccaagatcgcctatgtgggcaacgacgagatgagcgtgtccctcaaatacggtggcatcaccttggcctctcgtcgcatctccagcaagcgggctcgccccatttgcgtgggcctgcccggcggctactccaagttctgcggcaaggtctatggtctgtcccgttccaaggagtccaaggacttcaaggcatgcctggcctttgaactgcgctccgacgacgaggtggaggcctccctgcgcgtctcctgtttcaagtttggaccggaaggagtccgggtggccgaggcggagccgttgcctgtgaagcccagttcggatgacgatgatgacgacgatgatgacctctttggatttgccgctggtggcgacgatgacgaggatgaggaggacgactatgacagcgacaacgatacggatgcggatgccgatgacgacgatgacaccgaggactatgccgatgatgacgaggccgaggcgcccgaggatgctgattacggtggctttagtttggccggacttctggacgagctcgacgatgacgacgatgagaagccggttaagaagccagcggctgcggctgcgtcagcggctgctgaccaaacccgcgagcatgtaattgccgatggccaggtgaccgcgactacgacgaacggcgaccaggtgcagagcaaggacgatacgggagctcctgccgctggcgaggctgttgcagctgctgcacctgctgcgcctgctgctcctcttgctgctcctgcagccgcagcaccgattgagggagaagtggccgcagcggtgacaccggctaccacagctgccgccgatgaagactccaccacgcccaagtccaagaagtccaagaaggcgaaaaagaacaagaagaagaaggccgccgcagaggcgacggatgagactggattcgcctacgagctcctcaatggcatcctggattttttcaactga

SEQ ID NO: 37773 - protein, 493 aa, DROSOPHILA
MTSSRNMLLMLLLVASASILQLEAKTVFRRTDKISENFKQLDLPPEEIDPNVAPPESEPPKVEDVADVADEVVNAVSPASSIDESANEIASGDVDTPNAAASVAEAVAPAAAVPEVAEAAAPAVATTLAAKPTTAPTTAKPENPISKFCKCSESHCDCCRKFGLPLLPSGPGCAKIAYVGNDEMSVSLKYGGITLASRRISSKRARPICVGLPGGYSKFCGKVYGLSRSKESKDFKACLAFELRSDDEVEASLRVSCFKFGPEGVRVAEAEPLPVKPSSDDDDDDDDDLFGFAAGGDDDEDEEDDYDSDNDTDADADDDDDTEDYADDDEAEAPEDADYGGFSLAGLLDELDDDDDEKPVKKPAAAAASAAADQTREHVIADGQVTATTTNGDQVQSKDDTGAPAAGEAVAAAAPAAPAAPLAAPAAAAPIEGEVAAAVTPATTAAADEDSTTPKSKKSKKAKKNKKKKAAAEATDETGFAYELLNGILDFFN

SEQ ID NO: 37774 - DNA, 3820 bp, DROSOPHILA
ttcatttgccactttttaagttgatgtttaattttcgtttttgggctcccttccggatcgttcctttttttttcttttttttttttgccccattctttattttgcctctttggtgcggccttgacttatccgttttattatttaaagcgagtttaaagcgcatttaccagcagcaaatggaaggggtagatccttcgggctactttatccatttgcccaatatccgcatttcgtggattcgcacgtcgctggctgacacagatacaaaattcaacttaaagtgtattttccagctgaattttcgagaagatgattgcaatatacacaagcagccattgccagagtttccttaacgacattttcggattaaatgaaaacactttttaaagtcaagtggctgaagctaatgccctgagcagatttctagccaaattaaattaagttaaagagctttctttatgtcaacttgggcggcattcggttaatatttttccacttaccgtcacctgcggctaacatcaatgaaaacggttgagtttttaaacactagctagccagctggaaaatgaaccaacgagtgtacaataaaatggactaaattcaagtagaatgtgcattcaacaaaaatggcaaatttgtcagctagtgtagtgtctggagcaaagtaccaaagtgcttcgtacggacggacgcaaaggactcaactcctcgggacttgtcccttaacttgttgtcaggtgccacaaaacagccgcaattgcatcaatgtggcagccaccgcaacgatggcaaggcaaaaggaagttgcgatctggcaggtgacttgcggcctcgttagccggagtctgcagcccgggaaccggagtgctggagagctggagagccgaagaaccggagaaccggagcatggaccacaaagcacggagaacgaagtgtgccccatgtcattgtcaacgtaaagagtcactttgtgcccggaaaacaagtccaggcagcagtcttaattaacctgccagccgatggccgtgcagcatgcaaacaggcagctcgttctgcaattggggccaccgcccatggcacgcacttccgacttgcgcacttcgtggcaggacatgctccttgaaaggcttcgtccacttcgtccgcccgtttttgctgcccagtaacccagtgactaattccctaatcaagagccagcccctgcagcgcctgcatttccgtggcgataatccagatggccgagattttctatttttggcccgctgtgggaaaggtttgcattgcgtgcgcttttcattgcgctttacagcactgtcaagcgataagcagtgcggatacttaatcaagaagaaagagcatttctattttaaaattttgcctttatgctatgtaaatttatagtttttaaaaccactattcgaaacatacacatactttaactatgcataaaatatacatatacatatatcttgtaaaaactcaccgaaatcgaaggccctttcgaggatgaccgacccacgtttctcctgccgctcctgtcgctcctgcagatccttgttcttcgaggctgccagctcggcggaagtgaaggtgctcgtcttgtcgatggactttcccttcggcgtcggtggtagcatatatccaccagaatagcccttcaggtagttcgccccacaattgtcctcgccatcgggtccagaacgggcagccttgccactgccgcaaacgcactcgcaacaggccatagttacgtgtttctgtccagagccgagttgctgattcttgagctgctgctggagctgttggaggccatctgcgaaattgtcatggtgcagggaacagtacttgatgtgaccgcaatgaaattcaccatcgactccaacgaagagtgcgcatccacgatccaccgacgagttggtcgccttcagagcgggcttcaggtttgactttgcgggcgaaggatacacgttctggccaccgcatccagctccgccaccaccgccgccgccacctccgtccacagttccagtgccagtgccaccaggcaaggtcaagtccaggacgctgccactgctgctcgagctgacattcggtgcaagggtcacgggtcccaggcccagggcatttaagccattgctactcagagtggtcagcgatcctcgcgagcgattcctccgcaatgaattgacccggttggtggtggtcgagaaacttacattgcgattcgcataaaggtcaacgctgctgccactgccgctgcgactgcgcgactgaaagacgcgctgctgcaggcatacaaacagtagtatatcgtcatcaattcatgtacatgccacatctcatctcacctgttgggcgccttggtgttgctgctgctgctgatgctgctgctgttgctgctgctgctgctgatgatgatgatgatgattctggatctgctgctggtactgccgctcggtgcgaccccttcgatcggagcggtcgccgccgctgtgactccgcatgctgccaccgtaccgctgccgctggggctgcacggggctgttctggcgcggaatcacctaggaaagtgcgggaaaaaacaaacgaaaggagggaaagggaaatgattaatatgcaattgcaatatgccaggacatgtgcgctgtcgtaaagtcgtacgaaaagttgtggacatgggtcgcgggctaccttatcctccagcagattggcaaagagacccacatgatcctcgtcttcgttcatcatggcaaagaagttcttgaatgtgtccggaaacgaggccggaaactggccacgtgcctccaacttggtatccatgtcgcgtcaacaactctgctcaatttatttttttatatattttttctttctccttctcactctatccctctgtttttttcttcaattttttcttttatgaacaacttttttttttttttttgatccgtcgtcatcgcaaaccaagtaacatgcaagaagagaacaggcatcaaggttagagtgggacagcgaaagcgaaagcgataggtagtggacaacttataataaataaaataaatgttaattcaaaacttttttaattcatcgcagcccagagatctgtgaaacctaaggaaattcctcatgcaaatgcaggcctattctagcgaatgtgcagcttagaattattcctattcaaatggaaatatgccgcatatatattgttaatcctcgcaggtttcaaaaccacaatactacccgcaaataaataaaactctgttccttttgtacaaacaatcattcagcagtcgcaatccatactccataccgtttatagggtcggtcttcgagatttagattaaggccaacacacaagtttccccagttgttgaaccttaattgaaagcgaacttctttcaagcgcaactcaagggtaagtaagcgggtggaaaatgggaaatgggcggtggtggtatagcaccgtcgatatacttagcatactttttgggcaccccttcgccccatcgcaacccaacccacccaactccccattcaacttccacttcatcttgggcttttcctccgcggcctcttcacactctttttccgagcggctaaatttgaaaagttatcagaccgccgcgtctcgcaaaactgatgttcaagttgttgacgttggaggtgtcactccaatgtgtgtatacataatatatattcaccccggaacagatatatacccccatcacgagaactttacgaaaaagcagggaacaaaaacttatttaatggcggctttttttttttttttttttgccgaactggacgctgaacgacttattca

SEQ ID NO: 37775 - DNA, 1329 bp, DROSOPHILA
atggataccaagttggaggcacgtggccagtttccggcctcgtttccggacacattcaagaacttctttgccatgatgaacgaagacgaggatcatgtgggtctctttgccaatctgctggaggataaggtagcccgcgacccatgtccacaacttttcgtgattccgcgccagaacagccccgtgcagccccagcggcagcggtacggtggcagcatgcggagtcacagcggcggcgaccgctccgatcgaaggggtcgcaccgagcggcagtaccagcagcagatccagaatcatcatcatcatcatcagcagcagcagcagcaacagcagcagcatcagcagcagcagcaacaccaaggcgcccaacagcagcgcgtctttcagtcgcgcagtcgcagcggcagtggcagcagcgttgacctttatgcgaatcgcaatgtaagtttctcgaccaccaccaaccgggtcaattcattgcggaggaatcgctcgcgaggatcgctgaccactctgagtagcaatggcttaaatgccctgggcctgggacccgtgacccttgcaccgaatgtcagctcgagcagcagtggcagcgtcctggacttgaccttgcctggtggcactggcactggaactgtggacggaggtggcggcggcggtggtggcggagctggatgcggtggccagaacgtgtatccttcgcccgcaaagtcaaacctgaagcccgctctgaaggcgaccaactcgtcggtggatcgtggatgcgcactcttcgttggagtcgatggtgaatttcattgcggtcacatcaagtactgttccctgcaccatgacaatttcgcagatggcctccaacagctccagcagcagctcaagaatcagcaactcggctctggacagaaacacgtaactatggcctgttgcgagtgcgtttgcggcagtggcaaggctgcccgttctggacccgatggcgaggacaattgtggggcgaactacctgaagggctattctggtggatatatgctaccaccgacgccgaagggaaagtccatcgacaagacgagcaccttcacttccgccgagctggcagcctcgaagaacaaggatctgcaggagcgacaggagcggcaggagaaacgtgggtcggtcatcctcgaaagggccttcgatttcgcaaaaacgggcggacgaagtggacgaagcctttcaaggagcatgtcctgccacgaagtgcgcaagtcggaagtgcgtgccatgggcggtggccccaattgcagaacgagctgcctgtttgcatgctgcacggccatcggctggcaggttaattaa

SEQ ID NO: 37776 - protein, 442 aa, DROSOPHILA
MDTKLEARGQFPASFPDTFKNFFAMMNEDEDHVGLFANLLEDKVARDPCPQLFVIPRQNSPVQPQRQRYGGSMRSHSGGDRSDRRGRTERQYQQQIQNHHHHHQQQQQQQQQHQQQQQHQGAQQQRVFQSRSRSGSGSSVDLYANRNVSFSTTTNRVNSLRRNRSRGSLTTLSSNGLNALGLGPVTLAPNVSSSSSGSVLDLTLPGGTGTGTVDGGGGGGGGGAGCGGQNVYPSPAKSNLKPALKATNSSVDRGCALFVGVDGEFHCGHIKYCSLHHDNFADGLQQLQQQLKNQQLGSGQKHVTMACCECVCGSGKAARSGPDGEDNCGANYLKGYSGGYMLPPTPKGKSIDKTSTFTSAELAASKNKDLQERQERQEKRGSVILERAFDFAKTGGRSGRSLSRSMSCHEVRKSEVRAMGGGPNCRTSCLFACCTAIGWQVN

SEQ ID NO: 37777 - DNA, 4706 bp, DROSOPHILA
caggagcacggcatctgcctaatccgaccggcccactgtgcagtgggatggggagtggggagcataagtattgatttttctcacatgtccccggcaaacacacacatcttgtctagggagccgcatcgcccgcccccaccccactgcccctgctcggagcaacttcctccgacacctggcagcgatttggaagttttcgcagctcgtaaatgctgcactgcagccataaaacggccgctgcaatgactcgcatgaattgcgtttgtttatgctatggaaaaggaatccggggtctgctgtatgtcgtttgggatgctccataggcagagaaatgctcgatgttactcactcgccatgtttgccgcctttgttgattattccgctgctgcttcttccgtttttatgcttttctgcttttcttgctctgcgttggttgcgattccaggcacgttgtatcactgttagcttgtaacaaacactgctgataggctaatgactgctgcgcgcaactgaacacatttcacggctttctttcagtcgcgtctccgttcaacttccgcaatatccgtataattcgtattatccgtgtaatccgtattttccgaatcgcgttcagacgttcacaccaacaactgcaattctagtgtgaccgcagagctcgagctgcacgatacctccaatgagagatgccatatcgatgcttacgcattttattaacatcgatagacatttctagaatgtctagactttaatgcttggattttccaaaaactataatctgtttccaaaaagttatcgataagtatcgatcagtgttgaaactatttgtattttatattaaattctggggtgtgactagtaatattaggaatataagctttaaagaaaaaatcgaattctttataagtgatttagttcgaacgttaacttaagatttgccaccacaatcggaaagtagctattttctagctagctttgcccattaatcgattggtggcaacactggtcggcacatcccactcactcaacaaattgtttaccacaaaaaaccgtgctgaaagtgaacgaaaataaagtgcagcccggcgtcgagcatttgcagtgatcccaagacgcccaaccattgattcccgtagcggtgtccacccggattccagcccaccgccaccagcacgccattccatttggggagcctctcggtcggttcggtcaaacagtcgcgattgcccggtcgtccacgaacgcttataaaattggcaagataactaagcagagcacaaagatgccgccagcatcagcggtaaacaacagcaacgcggccgcccaggcggcgaaggccgagcgggcggagaagctgcgcggggcactgaagggcttcatcgtggcggaccgccagcggcgccaggaggagttcgaggctcagtgcgaggagcagcggctgcgacgggagcgcgaggaggtggagcgccagaaccaggtggccctggatgacacacgcggccagataacccgactggacgagcagctggccgatctgcacagccagaagcatcagctgaccgtccaactcaagaaggtgctcaacgaggacgaaacgcgcaagaagctggccaaggagaacgaactgttcgccatccagcaggcggcggccagtagcccggtcttcctgccgcccctgcgcctccaacaccagcaccatacgctgatgcagaaggtctcgactgcgcaattgtgggattcaggttctaatggtcctcttttttcctcgcagctcccgtccggcggacagccaggaaaacgtggcaggagtccatcgccgccgagtcagcagcaggcttactacaagagcgccgccagctacgcccagcagagtaagccaggaagaggtcgacaatgtggtccctgggcctccgatacagtgaacgctgcctcaggcaggcagtccaaagtctcatgcacgcaatttcggttggattttgttaactcgaatgcgggatctgctcataatttgattagtcattgaattggttagcacatatgtatggttcttgatttggacgagagatatacgtgatttttgtgatgtcatcatctctacattctgattgccaagcccttttttaagctctatgaaatattagcactaatatcaattgaacttctaattaggaatgattgcaaaaacatggttaagtgttaagtaaataatcaattcgatataaagaaagtttcgtgctgtttaggctttgtattggatggtttagtttaatgtgttttaatgtgcacaaaaattaccctattattttgaaggatatatagtgtagaaacgatatatatagggtttctagcagatagctcgagttttaaaattcaactgcaaattggcattggctaaaggtgcgatacaatcaccgattgatctgttctgcggagctttcgctgttcttcttgattaactgctcgctaacactccgtcccgttcatgagaaatccatttcactgcgcacactaacctctaacaacacaggcacacaacttatgttcatttcgttatttgtttacgatcgattcgcagaacacgatgactaccgtcgtgccgctgactatgctagattatcatggaacagtaagcacctcacttgcaataccaagcccgagatcctccgtcggaacgatcgccagattcgtcaattaaacctcacttttcctctcttccagaaacagcggcacagtatccgggcacgggaacggtcttctaccagacggtcgctcctccgccgacgacacagcaccaggcggacgcccgcttgcagtccatctacaactacaaccttccgttgcgccaggcctaccacgtggacctgcccagcgccacggtcagcaagccgcccgactcgcagtcgcccaaggcaccgtcgcagtcgcagcccatgcaagtgcttcacatcaacctcgaccagccgaccatttcgcaggcagacctggtggctcaagccggcggcagcctctcggtaaaggcctcccagccacacgtgactatggagaagctaccggaccgctaccacatcgaggtgaagcacgacggccagccgccgagccacgtcccgcctccgccacacctgctgccggagggcgtcatcttcaagccgctgctcaacgaactctcattgcacagcaacgtgctgcagataagcagcagccaggtgggtctcattctcaacatttgtggttaattagccgtggcagtgtcttagaatttacaacttagaacaaacaagttagatttacatcttcgaaatcgaagttcaacgattaggctctgcgaaaatggtttttaaagcctgagcatcttgaataagagctgttttctataaaacaaattcattgttgcaggttttcatgttttcataggaaaacgcattagaaccaacttcccaactactgattaacatgtttgatatcatttacaaggaagaactaaatattcacttgactaacgcctggccagtttcctccacagaatccgaaaacagcgggaagcatcacacagggctatgcccctggacgaggtggatccgcccacgagcagcagttggctcggcaacagctggcgatgctgcctggccagccgggagcaccgtccggatccggctccgcccagccgcctcctggtcagcagatgcattacacgcggcgattgtactagcctctaacccctaaccccttttgtcgctacggaactcgctaactgatatacttacgattttaaatagacattacaacactgactacgcttcccacgtgaagtcggataaacgaaataaagcacacaactatggcgtccctattttccaatcgacaataccatactgatatttgatattgatttgatatttggtatcaatgggcttctgtggttctgtggttataccataataactttgaggtatcgtagttctaatcaccaacaggcaaattgatctaactcgaaagagtttttgaaattctgggcaatagaaattggatcatgtatacatataaaaaatgactattatataaaatggtatgtacagctgtgttcagaaaaatagcagtgcgaggaatactaattaatacaaaggtatttttccatgtcccttttcggaattgactttttattccacttatttttgttaaatggaatgtgtatatagggaaaaaaagaaaatccggttagtttttcatgttatcctttttttatttactttcttaagcgaaatcacaacttttaggctgttcataagaatagcagtgtctggttttgaccaacgtaaagtcaggaaatgatcaatatttttaaaaagtgagtttgattaattcgtacatttaaaaggggagtaaatgaaaaaaattatatattagtgggtaaaggacagcactgctcccaggagaaaagaatgttaattattaagcttagaaaggaagtaaaaacatatatgaacattcaaaaaacccttgaatgttctgccaaaatggtatccaatgtcattaaatatgaatggaagcccgaaaaccgtggttccatagatataaccacagatatatagcatcgacgcattgtttcttacagcaaagtctatccttttgcatcctttagggacataaagtctgagctcaacttgggaatcagggacgatactattcgaagacgactactaaatcaaaat

SEQ ID NO: 37778 - DNA, 1632 bp, DROSOPHILA
cactggtcggcacatcccactcactcaacaaattgtttaccacaaaaaaccgtgctgaaagtgaacgaaaataaagtgcagcccggcgtcgagcatttgcagtgatcccaagacgcccaaccattgattcccgtagcggtgtccacccggattccagcccaccgccaccagcacgccattccatttggggagcctctcggtcggttcggtcaaacagtcgcgattgcccggtcgtccacgaacgcttataaaattggcaagataactaagcagagcacaaagatgccgccagcatcagcggtaaacaacagcaacgcggccgcccaggcggcgaaggccgagcgggcggagaagctgcgcggggcactgaagggcttcatcgtggcggaccgccagcggcgccaggaggagttcgaggctcagtgcgaggagcagcggctgcgacgggagcgcgaggaggtggagcgccagaaccaggtggccctggatgacacacgcggccagataacccgactggacgagcagctggccgatctgcacagccagaagcatcagctgaccgtccaactcaagaaggtgctcaacgaggacgaaacgcgcaagaagctggccaaggagaacgaactgttcgccatccagcaggcggcggccagtagcccggtcttcctgccgcccctgcgcctccaacaccagcaccatacgctgatgcagaaggtctcgactgcgcaattgtgggattcaggttctaatggtcctcttttttcctcgcagctcccgtccggcggacagccaggaaaacgtggcaggagtccatcgccgccgagtcagcagcaggcttactacaagagcgccgccagctacgcccagcagaaacacgatgactaccgtcgtgccgctgactatgctagattatcatggaacagtaagcacctcacttgcaataccaagcccgagatcctccaaacagcggcacagtatccgggcacgggaacggtcttctaccagacggtcgctcctccgccgacgacacagcaccaggcggacgcccgcttgcagtccatctacaactacaaccttccgttgcgccaggcctaccacgtggacctgcccagcgccacggtcagcaagccgcccgactcgcagtcgcccaaggcaccgtcgcagtcgcagcccatgcaagtgcttcacatcaacctcgaccagccgaccatttcgcaggcagacctggtggctcaagccggcggcagcctctcggtaaaggcctcccagccacacgtgactatggagaagctaccggaccgctaccacatcgaggtgaagcacgacggccagccgccgagccacgtcccgcctccgccacacctgctgccggagggcgtcatcttcaagccgctgctcaacgaactctcattgcacagcaacgtgctgcagataagcagcagccagaatccgaaaacagcgggaagcatcacacagggctatgcccctggacgaggtggatccgcccacgagcagcagttggctcggcaacagctggcgatgctgcctggccagccgggagcaccgtccggatccggctccgcccagccgcctcctggtcagcagatgcattacacgcggcgattgtactag

SEQ ID NO: 37779 - protein, 449 aa, DROSOPHILA
MPPASAVNNSNAAAQAAKAERAEKLRGALKGFIVADRQRRQEEFEAQCEEQRLRREREEVERQNQVALDDTRGQITRLDEQLADLHSQKHQLTVQLKKVLNEDETRKKLAKENELFAIQQAAASSPVFLPPLRLQHQHHTLMQKVSTAQLWDSGSNGPLFSSQLPSGGQPGKRGRSPSPPSQQQAYYKSAASYAQQKHDDYRRAADYARLSWNSKHLTCNTKPEILQTAAQYPGTGTVFYQTVAPPPTTQHQADARLQSIYNYNLPLRQAYHVDLPSATVSKPPDSQSPKAPSQSQPMQVLHINLDQPTISQADLVAQAGGSLSVKASQPHVTMEKLPDRYHIEVKHDGQPPSHVPPPPHLLPEGVIFKPLLNELSLHSNVLQISSSQNPKTAGSITQGYAPGRGGSAHEQQLARQQLAMLPGQPGAPSGSGSAQPPPGQQMHYTRRLY

SEQ ID NO: 37780 - DNA, 4229 bp, DROSOPHILA
aaaacaattgtgttaatgtgtacaattgttatgtctagctgctatgttcggaaaaaatggataaaatatacaaatcattttttgtttagatcttgacgcaggtcaccattgcaacccgttccatatgcctgcttcctcccacatggagacagtgaaatctgagatcagacaagaatgcggaatgcatttccccttcagactccacaaacaattggagagcatgagaatcatcttagttgtattaattactttgcattattccataaataactttgcgggaacaattctagatgctgttccctctgttaatgtggaacgactgatgtgcatagcttacttggtgttttgaactgtgccgagtgctctgcatgtatgatgtcagcttcaacagcaatccaaggctagttaattaaaatgaatatgaaattgcacttgtgattcacaagctgtgattaaattgcggaaagtgtccatttgacttgttgtaggtgtgtagttgtcgcacccaattatgcaaaatagttacggaatttatgaaatcgtttaattttcgatgaaaaaagtaaaaatttaatttaatcaaggagcctacaaagattttagcattgaattcaagaagaacaaaaggttatacttttacaagtataacaatctaaatgcctatttggcatacaagttgttatgctaatggctaaaacctttagtatttagcttatatatcttaataaatataagattaacaggaatgattgttttgatcgtttaataaggactattttcattggcactgatttcctcgaaacttgttatggttgaagtgagcttcttgctttaaatgtcgatttaaaataatgtctggcaaacaaaatggttgtaactttgttgcatgtcgagtggatacatgatgacatgatagcaatgatagaagagatcatgatggcaagtactataaaagggtctcatcccaccaggtgatactattgtcatcatgagaactctcatgctgttcgtatttggctttgctagttcctgggccgcagactacgagctgttgctggaggaccctgatatcttttcaccctgcactgaaccgccgccgggatcgattggattccacgatgccttcgatattggcgatctggtagtcgaccaggacatggacatcattcacctgtccgagagtgtcacctcaatctgggatgtggagcccacagatcgcatatccgtaatgcccgcattccttatacgaaataagattattaataaacaattgcttttaaggccaggtttgcaataatgcattacaaccgcggcagctgggaaccgactgtatttagcatggccacgccggacttctgcgcctcaatgtttgatgagaatcagtcgtggtttaagtactggaccaaacacatttcgaaccgcgatgaggtgatggagaagtgttttaaaacgcgtggtgtgagttttccctgcaaacaaaacagtccatctctggcgcggtgactttaaccttgggattccattacagaccgttataatgcacaatccattcgatctgcagctgcgtctaacggacattcgtggtgcaactctcaggggtcgttacaaagctgtggtcacctttgaggcggtcgatgagaaggatgtgccacgccgtaattccatttgcttcgaaatcaggggagaggccgagaagataaattaattaagggcttaatctgttcaaggcgcgatatcagtaacctaaaaaacaatataaacccaatatctacatattttgaaaataaaaagcaatcttaaaaatataaatataaataaaatatatcaactattctgaacttgatatatgtacttgatttggtacaaagtgtgtaacaggtgacgcgaaccttttttttcgtttgatcaaccttatgcccgtatgtgatctcgggagctataaaagctatattgataagataagggatgcagattatagagaagtactttcagaagattgccacgcctactctaccacaccctctaacgaccaaaaaccgcccaaaactgtcacgcccacacggatatgtgatcgccaagaaaatctttggggaatttgttttttgtttcaaacttgtttttttttctagcccaaaagttattattattaaaacatcttgttttacaatgtttaagcacgaatattttcaagggtcacataacgtgatttgccaattatattgttagagtttgacaacgtctgattaacaggagatggttgttacattgttgcgtgttgaatcaatgtacgatggcataccatgattagatgtcatcattttaaaaggtgtataaataaaacatatcaaaaactctattgtggcagtggctataaaggggtcggatctcacagttttcggttctatggtcatcatgatatttgtgctgctactcttattaggagtgaccagttcctgggccacagactatgaattattgctcgaggatccggacatattttcgacgtgcactgatggtcctcccggatccatcaacatccgccaggcactcaacttagacgacattgtaatcgaccagaaaggggatatacttcatgtatccgggaacgccaccgtcgtgtgggatgtgcagcccaccgatcggattactgtaacacaaactgcaagcttcggaataatcatcgattctaatatcaaaactcttgcatccgtgtaggcgagacttgatgtttttcacttcaaccgcggcacttgggagcccactgtctttagcatggccacccagaacttttgctccatcatgtacgacaagaaccagtattggtataagtattggacaaggtttataaccaatcgccatgaggtggaaaagaagtgcttcagagggcctgatgtaagtggagttcaagcaatttgacaaccaaatacggtggaatataatagcatatgggaatagttctcatatgggatgcagattattcatatggttgtgtgcaaaggacactaccattttttattgcacaatattttgaaaatattctgatttcttacagaccgttctggtacacgagcccttcgatctcatactaaaatttgagaattttcgtggacctcttcttagaggacgtcataaacttgtcatattgtttaacgcactagatgagaggaatataccgcgcccaaacccaatttgtttggagatcataggagaaccactaaagttgcagtagttggaacaatagactattttgttgaatgtgtattttttttttcaatattgtataatattaaacatagtgttcttaattcctacattcaataacaatttaaacattgcatcgtgttttaacagatctcataactttaggggcttgttttaccttccatatccccaatcagttaacttcttgattcgttttgttttgtggttggtggcacgcgttgacggcaacttgagttcaagttgcggtttccatatcggctagctgcgtgtggcaagtaccttctcgggtaacgacgtgcagacaaaggagaaccgtatactgactgcatttttttggggtcatgactgccgttgctggatggggaatatgcaaatacaattgtcggttattggattacccgatgatgattggcataagttccgatcgattcaaatcgcagcaatcgatttgtcaatttgcaaagctcttgccaattcacggaaaatgtttcttacagatttgcgaaaacttttaaacggcagggaggtaagcctcggaacactttcatttcatattcccggcgaataattttctactttctaaaccgaagagccagaaacaaagaccgtctttaggtgcaaattagcagcgcacgattgtgcaggccgctccgggcaatccggtaaagtcaacatctggccaaagccgaaattatggccgcgggcactcactatactatatagtatatggtacgtcggacctcatagaaaatcaatcagtgcggacttctgcttcgcaggcaggctcttggatttagcataagaaacggctctttctggaggcagtggctttgttcgccaacccaaaaagctggcaatgtaggacgtggcgacggcatggctctgaacccgttttttttggccatctccgcctctatccacctagccgctgctgggaatctttggggccttatcgaggagcagcaccgaaatagcaacaaaattgcagcatgaatggggctgtgaac

SEQ ID NO: 37781 - DNA, 1092 bp, DROSOPHILA
atgctgttcgtatttggctttgctagttcctgggccgcagactacgagctgttgctggaggaccctgatatcttttcaccctgcactgaaccgccgccgggatcgattggattccacgatgccttcgatattggcgatctggtagtcgaccaggacatggacatcattcacctgtccgagagtgtcacctcaatctgggatgtggagcccacagatcgcatatccgccaggtttgcaataatgcattacaaccgcggcagctgggaaccgactgtatttagcatggccacgccggacttctgcgcctcaatgtttgatgagaatcagtcgtggtttaagtactggaccaaacacatttcgaaccgcgatgaggtgatggagaagtgttttaaaacgcgtggtaccgttataatgcacaatccattcgatctgcagctgcgtctaacggacattcgtggtgcaactctcaggggtcgttacaaagctgtggtcacctttgaggcggtcgatgagaaggatgtgccacgccgagtgaccagttcctgggccacagactatgaattattgctcgaggatccggacatattttcgacgtgcactgatggtcctcccggatccatcaacatccgccaggcactcaacttagacgacattgtaatcgaccagaaaggggatatacttcatgtatccgggaacgccaccgtcgtgtgggatgtgcagcccaccgatcggattactgcgagacttgatgtttttcacttcaaccgcggcacttgggagcccactgtctttagcatggccacccagaacttttgctccatcatgtacgacaagaaccagtattggtataagtattggacaaggtttataaccaatcgccatgaggtggaaaagaagtgcttcagagggcctgataccgttctggtacacgagcccttcgatctcatactaaaatttgagaattttcgtggacctcttcttagaggacgtcataaacttgtcatattgtttaacgcactagatgagaggaatataccgcgcccaaacccaatttgtttggagatcataggagaaccactaaagttgcagtag

SEQ ID NO: 37782 - protein, 363 aa, DROSOPHILA
MLFVFGFASSWAADYELLLEDPDIFSPCTEPPPGSIGFHDAFDIGDLVVDQDMDIIHLSESVTSIWDVEPTDRISARFAIMHYNRGSWEPTVFSMATPDFCASMFDENQSWFKYWTKHISNRDEVMEKCFKTRGTVIMHNPFDLQLRLTDIRGATLRGRYKAVVTFEAVDEKDVPRRVTSSWATDYELLLEDPDIFSTCTDGPPGSINIRQALNLDDIVIDQKGDILHVSGNATVVWDVQPTDRITARLDVFHFNRGTWEPTVFSMATQNFCSIMYDKNQYWYKYWTRFITNRHEVEKKCFRGPDTVLVHEPFDLILKFENFRGPLLRGRHKLVILFNALDERNIPRPNPICLEIIGEPLKLQ

SEQ ID NO: 37783 - DNA, 4233 bp, DROSOPHILA
gttaacgcaagttccacttgcatcagggttctcggcactcgctgccgcatacctcaccttgatatgacaaccaacatgctgtggttctccaaataatagtcaagatagttaagagggttcgagtttacgattagctttattttaagattcagttcgcgatctgctagcggttccgttatgtgtccgttcgagactgggacctcttctcccgccccgctgcttttatatccgcttcccccgttgacccctcaccctgagtgcgaccaacggcacttgttccgaatgcacacatacacaaacatgttcctagacaggccccgagtcgcctgctgacggggcccgaaaacacgagagccgagcgctggtgagtcctgacgaagatcgcaagaagagggttcgtaacttacacgaacatgttactagacaggccccgagtcgcctgctgacggggcccgaaaacacgagagccgagcgctggtgagtcctgacgaagagcgcaagaagagggttcttaacttatatgtatatatttgcattacctacatatatatgtatatattaagaagcaattttaattacttaaaaaaaaaaacgcttgcaaaatcggttcttgcatgtataagctatgaaagttagaaaaaagtataccacgccgtatatggtcatgaagctggctccaagaaagaggccaatggctccaccaaacgacattatcaactgatccgtgctgaatacaacccgccgatttatgcccatcctcgaaatttgcaggttgatgatcagcgtccgctcgaacctctcgccagagtagttgtcatcgccctgaagaaagtaaattctaaattgcaataattgggggcttaaggatacaacattctttcacccaccccagtctggtcagacactttgaagatggtaaaggtttcctcgcgacaagacggatagcaatcgcatggtctttcaagccacttggaccgggctaggcagagcattccggatactgtgcagattggaacttcgggagctgctacgtagaaatagggcttgcagttgcacaggctcagggcccatttgattcggcactcaagtcggcaaagacttgggtggtagggctaaaaggacatgttgctgttttgattggacgcaattggtacgggtaaaggtctaaaactcacactgtaatactgcagattgttttcgtcactgaagcgacacttgcgatatgctaccggtagatttcgcacctcgctttccgccgatgtggtatgtagcataatatcgagatccttggattcgatgtctttagcatcaaaagagggagttcgcatgtcgtcgggtagcatcatttcttcgacatcgtgaaggtactgtaaagttggattcgcttaacagtgtatttcaaaaaagaatgataaatgctgcctaccataaatatgggggcaacaatgctatttataggcttcagagatgtgatgcaattactcaaatagccgcactgtttcatgggttccatatcctgtgtttctcttagataaaagcgttaagtaaaaatgtaaatgtaaattctcttgatgggcacaaaaaatatgtaaagcaaaaagcgaaattaaagaaagaatagcttatttattttattatttaataatttattttttttgttttatatttaatgttatttaggcgcagacttacagtttgccgtagggatttccgtatcggtttaactggctggatgtttggcacagacccacctcagtaatgattggcgccagttctggcgggattttaaccgctattacctttttttgcagcgtgagcaaaatgttcaagtaattcacgttgtccaaagtggtatcattctcgaagggttccagcgtctccagagtggagtaacgaaggccgttgattgcaagcagaaactttctgtagtacacagctttttctttgtcttcgctgggatccactccccaagttcttgatattttataatatattagtgctttcaatttaccaatgtaaatcgaaacactcactgatttataagccttgggatctccgtttcgtcgtggtacctagggcacagtgttatccccacgaaggggaagatgcgcagcccaaagagatattcgtactcgtagacaataggattgtcccggaaccggtaccattggttaaggcagctgctgatggcgtagtaggccgagcccaggattatgaatgtccaaaagaggcgctcggcccagtgtagatccctgcgggcgatgtagggcatgccgtggatggaggactcctggcacagctcggcgagccagtccggttgcttcggccgactcattttggattccatgatgaactgaacagaagttcagaagttcgcattcaactttagcgacccgtgtaatgacacacaacaacaccacaccctcccccccctcaccaccattattcaccttgtttgatgtgctccaattatagactttaatggtgtttcgctgtatgttcagcatgcatatacaattgtcgtgattagacctgtcctgcagttccacggaactctatgcaaatgggaactgggcgccttacattgcgcttatcgaaggcctctatttggaccaccagcttgtagcgcccatccagattcggaacattcaagctggtcttcaagtccagttcgtagtctttgtactttaaaacggcctacaatattgtgtttatgagaaatgaccagtgaccaaactaggaggtacattttcttacccctggtgtggtcaagcacttttccttaatctcgtcggagttgctaatatactttgtccagaaattataccagtattggttcttatcaaacatgtttttgcaaaagttattggagctggccgtaaacatagtcttctgccaagtgcccttatccaggcgatagacttgaccaaatacctgcgcgatattcaaatagtttattaggaaaagtttccttagggacttgcctttaatgtgtctccaggctggacatctttccagaccactttctgctctccttcaattcgaactttcgaaccaaggttatgtactttaagggaggaagtatccaccatcgcttcaaaaccagaaggatttccgggctgattctcgcatggtgctaacaagccatctttgtccaatgttaactggtactcagtcgctccagccaaacagatgaccacttggagcaccaggattgtaaaagtagccttcatattaacaagctttccagtatgaggatgggtacatagtgctaaaaactgcacgttatatacagcttaggggtcgtctatgattctaattgcacacagtataatatgattatgatatgataaaatcattgtctttaataatttaaaaagggcgtatctcttttggcacgaaaataagtatgttcgattaaaaattcgcgtgactgtttttctaaactaaatattagacgaatgtcaagttcataaccccatttaccccatatattttccggagttttggcagacagcaaattcatttacctgcccggctagctcagtcggtagagcatgagactcttaatctcagggtcgtgggttcgagccccacgttgggcgaccaatattttgtagtaaatattcaaattttaatagttaattgattaccagagaaaatcaattgtcgagactctcgactatcggatatcttttaattaactaattaggcttaaagcatatgcgaacatggatggatgtaattatatataaaaatgatttttatacccgttactcgtaaattaaattggttgaggagtatgtaacaggcatgaggaagcgtttgcgactatataaagtagacatattcttaatcaggatcaatagcctagtcgatctagccatgcccgtctgtccgtatgagcgtcgagatctataaaagctagaaggttgagattcagcatacagattctagagacttgagacaaagacgcagggcaattttgttgacccatgctgccacgctcactgtaacgccctaaaaccgccaaaatcggctgcgcccacatatatttgaaaaattgttggacattttttcataatgttattagttgcttaaatttctatagatttgctaaaaaaaaactttttgccacgtccactctaacgttctaaacctttccaatttttctatatctatcaatatcccagaaaaattatgaaatttcgcgttcgcattcacactagctga

SEQ ID NO: 37784 - DNA, 1809 bp, DROSOPHILA
atgaaggctacttttacaatcctggtgctccaagtggtcatctgtttggctggagcgactgagtaccagttaacattggacaaagatggcttgttagcaccatgcgagaatcagcccggaaatccttctggttttgaagcgatggtatttggtcaagtctatcgcctggataagggcacttggcagaagactatgtttacggccagctccaataacttttgcaaaaacatgtttgataagaaccaatactggtataatttctggacaaagtatattagcaactccgacgagattaaggaaaagtgcttgaccacaccaggggccgttttaaagtacaaagactacgaactggacttgaagaccagcttgaatgttccgaatctggatgggcgctacaagctggtggtccaaatagaggccttcgataagcgcaatttcatcatggaatccaaaatgagtcggccgaagcaaccggactggctcgccgagctgtgccaggagtcctccatccacggcatgccctacatcgcccgcagggatctacactgggccgagcgcctcttttggacattcataatcctgggctcggcctactacgccatcagcagctgccttaaccaatggtaccggttccgggacaatcctattgtctacgagtacgaatatctctttgggctgcgcatcttccccttcgtggggataacactgtgccctaggtaccacgacgaaacggagatcccaaggcttataaatcaaacttggggagtggatcccagcgaagacaaagaaaaagctgtgtactacagaaagtttctgcttgcaatcaacggccttcgttactccactctggagacgctggaacccttcgagaatgataccactttggacaacgtgaattacttgaacattttgctcacgctgcaaaaaaaggtaatagcggttaaaatcccgccagaactggcgccaatcattactgaggtgggtctgtgccaaacatccagccagttaaaccgatacggaaatccctacggcaaactagaaacacaggatatggaacccatgaaacagtgcggctatttgagtaattgcatcacatctctgaagcctataaatagcattgttgcccccatatttatgtaccttcacgatgtcgaagaaatgatgctacccgacgacatgcgaactccctcttttgatgctaaagacatcgaatccaaggatctcgatattatgctacataccacatcggcggaaagcgaggtgcgaaatctaccggtagcatatcgcaagtgtcgcttcagtgacgaaaacaatctgcagtattacagtccctaccacccaagtctttgccgacttgagtgccgaatcaaatgggccctgagcctgtgcaactgcaagccctatttctacgtagcagctcccgaagttccaatctgcacagtatccggaatgctctgcctagcccggtccaagtggcttgaaagaccatgcgattgctatccgtcttgtcgcgaggaaacctttaccatcttcaaagtgtctgaccagactgggggcgatgacaactactctggcgagaggttcgagcggacgctgatcatcaacctgcaaatttcgaggatgggcataaatcggcgggttgtattcagcacggatcagttgataatgtcgtttggtggagccattggcctctttcttggagccagcttcatgaccatatacggcgtggactcaccagcgctcggctctcgtgttttcgggccccgtcagcaggcgactcggggcctgtctagtaacatgttcgtgtaa

SEQ ID NO: 37785 - protein, 602 aa, DROSOPHILA
MKATFTILVLQVVICLAGATEYQLTLDKDGLLAPCENQPGNPSGFEAMVFGQVYRLDKGTWQKTMFTASSNNFCKNMFDKNQYWYNFWTKYISNSDEIKEKCLTTPGAVLKYKDYELDLKTSLNVPNLDGRYKLVVQIEAFDKRNFIMESKMSRPKQPDWLAELCQESSIHGMPYIARRDLHWAERLFWTFIILGSAYYAISSCLNQWYRFRDNPIVYEYEYLFGLRIFPFVGITLCPRYHDETEIPRLINQTWGVDPSEDKEKAVYYRKFLLAINGLRYSTLETLEPFENDTTLDNVNYLNILLTLQKKVIAVKIPPELAPIITEVGLCQTSSQLNRYGNPYGKLETQDMEPMKQCGYLSNCITSLKPINSIVAPIFMYLHDVEEMMLPDDMRTPSFDAKDIESKDLDIMLHTTSAESEVRNLPVAYRKCRFSDENNLQYYSPYHPSLCRLECRIKWALSLCNCKPYFYVAAPEVPICTVSGMLCLARSKWLERPCDCYPSCREETFTIFKVSDQTGGDDNYSGERFERTLIINLQISRMGINRRVVFSTDQLIMSFGGAIGLFLGASFMTIYGVDSPALGSRVFGPRQQATRGLSSNMFV

SEQ ID NO: 37786 - DNA, 2298 bp, DROSOPHILA
gcgagttcggctttggccaatataaacattcttatcggagctgtattaatatatagatgtgtacacggaacgttcaaatattaaccatggtgtcggctaagggtgcagatagagattcataaagtagtatcctagaatgtaccttagggctatgccacctgtcacaatattatgacaatccgccagtcgaaaacgcgcttaacctagtcctgcctcgaaaaacctcgtactcagtcgcgttgagccattattttgccatcaaaaggaactcctttcgaggagaacggcactacgagtcttcaaaatgccttctcccgtgggagacatctaaattaaattcaaatcgggcacccagagctgtactgaagtttgcgaaaatcgaaattgtttgtcgtataaaagttaattttaaatttaaataaacctggtcccttccaaccttaatgaccgcaactcaaatcgatttgtgtgcacaatgcctcgcaagtcagctcagtgtcggaataataccttatcttttatgccgctatgacactggattaaaatgtcgcagaataagtatttgtgtttgcttttgctgtacttatagcgtacttacttatagtgttgttaaagaaatttgatttgattcacggcttataagctaggatatctattcataatgaaatataaatttacctaatcagagttgcttacgaaatatcatataatctgaggccagtgtcatgacggcatcgtttcgaagctctggtggttacaaactataaaatgttttgccgcgtagcaaattcatcgaaatttttgtgcccttgagcaagaggtttttgtgaactgggtagctttatcagaataatcagctcagtgcaccgaacataaatacggcgccacttgtttatgcacgctaattaactggcgtccattattaattcacattgtggcaacatactcgtaataactaaataacataattaagctcgacgctggcggccaaaataatggtttactgcacgttgcagtcgtcggatgcgttgttgatttgctgcttggtcttgcgtgatgcacggcgtatgagcgatctggaatggaagcgggtggaagtggtcagcagggcggccaggcgggaaccggatctggccagggactctatctgaatgagcaggcacgtgttgcactcacctggaacgaggcttcagcttggcctccgcactggtggtggccacatccacggcgtccacgaggctggagccctttttgtcaccgccactgccgccggcgcctcccagggccgggctgttcatccgatttttatctgcaacaaatagatgggaacgcgcggctaattagtatccacgagtgcatttaatggtggccgtatgccgactcaaagggactgtgcgatttcggagctgcgagtgcagcgcaaatccaatttgccccactgatgtccttcccagttgccagttgccagttgccggagcaactggaacatccggacatcccaacatcccggtatcccaacagcctgccatccgctgcagccgctgacgtaattaacttatgaacgacgcacacaaagagccgggaagcgagttgcacattgcagagttaccgctcgaaatgggattttttacagtcgtttgcacagtcaaagttcatctcaagaatcgaggtaatcccactcctttcggatctgtgcgacatgcatgtgccgctcatatgaaatgcggactcaaaggagcagccagaagtggcaaggatactcattctcagttggcagaggaaggtcgtcaaaacatacgaaacaagtcgaagttcaattaaaatcatggatgtagtagtaaatggtatgcggaagtttgtttgcgcttcaaagattcaggatattctttcaagaatatcatatatcagggctagagagaaaataggtaaagcataaagaaagaaagtggtgttactgatatactaaacataaactaatgacactagttaggatacttagggcttattaagttaaatgcaagaaattgttttttgttggctgaacttcgctaaatgtatttttttagcatttttttgtgcaataaactttaagagactgcacatcactttcaattaagtggctcaaaagctgtctccaaagttgaacctattaagtagggaaaatcagtgtcaatggagtcattaactttccggtaatcctcaatcaggcggcttcgactgccaagcagagtgataaagtcgcacaaaggtgttcgctcagatgtttgccttggcggtaaacaaacctttttgttccgc

SEQ ID NO: 37787 - DNA, 198 bp, DROSOPHILA
atgaacagcccggccctgggaggcgccggcggcagtggcggtgacaaaaagggctccagcctcgtggacgccgtggatgtggccaccaccagtgcggaggccaagctgaagcctcgttccagatcgctcatacgccgtgcatcacgcaagaccaagcagcaaatcaacaacgcatccgacgactgcaacgtgcagtaa

SEQ ID NO: 37788 - protein, 65 aa, DROSOPHILA
MNSPALGGAGGSGGDKKGSSLVDAVDVATTSAEAKLKPRSRSLIRRASRKTKQQINNASDDCNVQ

SEQ ID NO: 37789 - DNA, 2993 bp, DROSOPHILA
gtctgatgaataatgaaaaagagtttgtctttgtcaattgggtcggaagaaagggtctcgacggcccgttttactccacttctgatcccgagttcccacaattaattagcccaaaggcggtggcagtggacggaggcggcaattgaagcaggaatgctaattgcattcaattagccaaattgccaaaagttatcctagctatcctggccgcatttaaagaattccaattaattggcaccatgtgcgtggggcttccctcctgtttaaaatactgaatacattcataaatgtgcatcaattattgattgggcttcagcacggcttagtgacatctgcgacccgcaaccggcttaattattgcattaatgtgcagcgcactcgcattttaatttcgcactaattaagctccttacggcggcacttaaatccccgaataaagctgttcaggttacaggtctgactttcaatcacagccggcgcatatgaatgtttaattgacatttgaaactgttacggccaaccgacgaggccaaaaacaatcaacaaagggcttgcatcatctggttttcatttccattttacctagccatggcaacaaatcaagtgttgcatccatggagagattgtgctctaagctctgggtgttatgctggttttgctggcatgatggataccaaggcaatttgccattccaggatgcattgttgagcgactcaagggatttaatcgtgttaaatgcaaccgaaactatttctgtcgctcactaccgtgaaaattgtgccataaggcataaacttttagctagctgtttagatttcatttagatattcggggcatcctttatcataaatgtgagcaagtacgctttgatatttatatatttatacaccttactcgaagggttaaaggctacactatattcgttgaaaagtatgtaccaggtagatggagccgcttccgacactttaaagtaaacatattcttgatcaaaaatacaaaactagtccgttcttttgtttgaccgtatgaacgtatagagctcgggaactataaaagattaagattaagcatgcagattctagagacgcttggtttcataagattgccacacccactctaactctcacaattgcttcaaaacttttttccttgcattcccattaactgagtaacgagtatctgatagtcgaggagattaacaatattttaagaaaatattgatattaggaaaatatcactcttgtaaaagaagttgctgtgtatgtatatttatctaatatctataatatttaatttagttcttaattttacactttgagcataaataaaaaaaaaagatgatcacatttccctatatttacgatctggccctgaaagctacaacctttcttccacttggttttatcgaggtatatgtttaaaatatgttgaattgctgacacatttaaatagtaagctggtttccctatacccccactaccatctgtatatacatatactaccagtttcacaatttttgggtctgtcagcatacatgagagcatttgcgaatacttactgcgactggacgatgcgctgacgtaggccgaagaacgccgcttgaaaccgctgggcgccgcctcgccgccgcccccgctgcccccgctcccactactgctggcgggcaggaagcgggacagggagagcagggacttgaagaggtccgtcacgttgctgtcctccttcgcggagcactccagcactttcgccctgcgggggaggaagggcggtttaaaaaggttgcataatttcaggggcgaccgtctatatagcgcatacgcaatgcatacatcagcgaattttggtggcccgaaacaaagcgattgtggcacaaaaaacccaagccgatccaaaccgaaaaccgagccaaaaaagccaaacaaaaccagcccaacaatgtggcatgttcaatgcgaaacagagtttttgtgcccgccacgaccaagtgggccatccatccggaccaccgtccggggggccgaacgaaacaaatgttgctaatggccaaattaagcatgtcatgttcgctttaaaatggtgcggcactaaggattcactgcaggatgcggccacgatccgcgctggccccacaatactgagaccagggttaagactaggatgaggataggaatgagatgggcatgaagcaaggactatgattatgacgaggacgatgatgttggcgaggacaggtgatgttcaacacacaggcgatggcaggattacacagtacccgactgtcaggaggatttccagcttaaatgtatgtggccatccgacgaaaggcttatttctagtcaaaatattccagtttggcttacatcagaattgccctttatgggcttttttccgaaaaattttcgattgtacttcgcattcacacattttcagtggaaagtttgcttactacattaatttattttagttacttctttcctccctaattagttgtttaattgaaatgaaacagatgtgcacgcagaaaatttatgaatgtcgttaaaattaatttatattttacaatcggacaagcaaaatttaatgaaattagatattaaagaaataaaaatttacaaattgtgcttaaaatttttagttttcactaagtgagtgagtgagtgtagtacctatatcacactatataatcttgaaagacccattctggaaaaatattttccttgcatttacaattttggtaataagtggcataactgtagattaaagtttcctatttctactaatttttagttcagaatttgttaagctataagttgagcttcttcttatggttttattttatgtatagttattaatattttattgcagtggtattacgctacttcggagttctacaaattaaactgttaaatattaaaatttttttgaacaaagtgaatgattgcaagatgaccccaaaaaatttggaaatgtatatttatttaaacgctgttccc

SEQ ID NO: 37790 - DNA, 297 bp, DROSOPHILA
atggcccacttggtcgtggcgggcacaaaaactctgtttcgcattgaacatgccacattggcgaaagtgctggagtgctccgcgaaggaggacagcaacgtgacggacctcttcaagtccctgctctccctgtcccgcttcctgcccgccagcagtagtgggagcgggggcagcgggggcggcggcgaggcggcgcccagcggtttcaagcggcgttcttcggcctacgtcagcgcatcgtccagtcgcattcccgagctctatacgttcatacggtcaaacaaaagaacggactag

SEQ ID NO: 37791 - protein, 98 aa, DROSOPHILA
MAHLVVAGTKTLFRIEHATLAKVLECSAKEDSNVTDLFKSLLSLSRFLPASSSGSGGSGGGGEAAPSGFKRRSSAYVSASSSRIPELYTFIRSNKRTD

SEQ ID NO: 37792 - DNA, 2231 bp, DROSOPHILA
tgcagacagtgtatttgacgttcgggagcatatgacttattggcaacggtgcgtatgaaatgcttaagcagctaccacaggggtttcccccaggaaggttttccctctctttttatttgtctcgttttgcggatcgtcatatcactgacgtcactgatttccggcgtgcaatttactaaacatgtcaacctatcgcctacaatctcgatttgggtctagattaaactgtttgcccatgacacggaaacgcttaaaatgatgatgatgttggtgatgtacgcccagtaactgcagattgctctgatttttagcgaaaatatactggtgacatatgaagtgtactttgaaagcggtcggattttcttttacaaccaactattactaatttaaactgaatgtgtactctgctcttccaagtgaatcataggattcaaacaaattttacaggaaattaaacagtcatcttagaaatccccttggcataactttcattttaagaaattatcttttttcattttatttataattgaataaggttattctacataaaagacaccacatttgtaatatggaacggtagactgaattcattagaatttcgaatttactgtattccctttacattaagcaatttgcccgccatttttcacattttttgcgtagcttctgtggcgttttggtctttttgcagcttattcagaattttctctctgcaatctatttgttgaataaatatcttttcttatgccacggcaaactttcgtaatgtaatacgtttaagcaaacattttgcgcaattgaggcgacaccatggttttttatcattatcgacatcggtttattacttatcattattactagctacaaaataaatattgtaataaatacttcgacggtcacattgtgacgtaactacgactaaaataagttagcttacgactaggtcaaaaaaaaaaaaataagtctactactaaaaaagggagatttttctgcttggtgctcaggtgctgcgtccaaagatgacggcgcgacgacaccgatcccggtgatccctcatttttccagcgggacagggtttcgtgagcctgcgggacacgaggagctgactggtgagtggcttggtatgcggattgtagaagatcaggcggcgggcttccgtaatccggggactttgggccaagatcatggccagaacgacaaaggtcaggatgagcagacgctggacttgcattttaattagataatcgctggtggtttttgtttcgtaaaatatattccgcttgctatttctgcttgctctttgaagtttcgttcttagttagttggtagttttcgtcgcgattttatatttttcgtgggtgttcgattcacttgggagtcgcttttatgactgccgttgctcttcgggcttgtgcctgccgatattcaacgccgatagccaaagacggctaccgccggcccgcatattgataagataagtccccaaaaggtattccactggcacgcgataagatattggcactatagccgcaactctcgggcccattagtatttgtatacatatacatatacctatacttatacttattgtctgctgcggtctacggtttgtgtgggctgccctggcactacgctactatggtactccaataccattggctgctattttcgatcctcgccatgacgaaagcgcaggggaatttacgagtgctccgccggttgatgtagtaaaattccaccgtcatgcgtcggcaccccctaagcgacagcactcgggatttattgtcccgttagacttcgtcatcgggtggatcactgaccaccgctcttatcggtgacgccccatccggtgtgatctatagtggtagggtagggtatgttcctggtacagcctgaaattatgcaatgccattgggtgtcttccgtctagaatgatgtagaaatcagaattcgaggcctttcgacttgtcaagtattctttacaggcaaagaacgttttatcggaaagtgacaagaaaaatataattatgaactctttaaaatcgtagaaatatatatatgtgcatgtgtatcgactttgtcttctagatttgtttttagtctaaagaggcataatatatatatatattgcttaaatcattacatcgctataatggaaaatcgatcaaatatatttattatactattatttttcgatttcccgcttaaatcgttcagtgttggtcaagtgc

SEQ ID NO: 37793 - DNA, 231 bp, DROSOPHILA
atgcaagtccagcgtctgctcatcctgacctttgtcgttctggccatgatcttggcccaaagtccccggattacggaagcccgccgcctgatcttctacaatccgcataccaagccactcaccagtcagctcctcgtgtcccgcaggctcacgaaaccctgtcccgctggaaaaatgagggatcaccgggatcggtgtcgtcgcgccgtcatctttggacgcagcacctga

SEQ ID NO: 37794 - protein, 76 aa, DROSOPHILA
MQVQRLLILTFVVLAMILAQSPRITEARRLIFYNPHTKPLTSQLLVSRRLTKPCPAGKMRDHRDRCRRAVIFGRST

SEQ ID NO: 37795 - DNA, 4743 bp, DROSOPHILA
caaaaagttgatatttacaaacggaattttcgtcataacttggctaaaaatgctcatatagatgtaagaataactgttttgagcagctaattaccagtgctaacgattactatcactttttgaagaattaagggaaattaatttttgggtaaattttcgcattttttgtaaggggtaacatcgtcaaaatttgcaaaaaatctgaaaaaaattaaatttccatttgtggattcagttcgattgggaatataaatacgagcacaacgagatactgcattccatattcagacaattatttttaaagttatggcaaaaaaactgattatttgatgaccgaaattcggaaaaacggagtttgccaaaaaattgagatttaccgattatttttttcacacaaaattctgcgaacgattgttggaatattaaaagatgtaggtttcctgctcatttacgacacctatgaatcctaaagttcccaccaaatgcaattgctgctggactacgattacggcgatatattgcgggaaaaataatgataggcaaccacctgttgcaggtaagaacgattaatgcgcgataattagtcagccaaagcattttgcgtcaagtcggcattataatcgttatatcaaatatttccgattccactcgaggtgctgatattatatacgcaatcaaagaaattcccagcgcaatgcatatttaaatgataagagaacagagtggtggcctaaagagtgccgaaaaccctttactataaccgcatgtccttgtaatgcatacactcttgttgactgaccatcaacaattgaaagtgaattcgcaattcacaccagacacatgaaaaaaataaataaataaataaacactcttactaaacggtggattttgtattattattaaaatgtatagcgtgcgaggcagataaataggataaataaatagggtttgttgagagagtgcgagattcgttcgatgattggattcacttcagatcacttcagcagcgcacgccatctgcaaaacacacagcacagattagtatctttcactccttaacgtgactaaggcgtttacggggcgtatacgtaatgcgtatacgcgatatccgacaatatccaacacccacctgcattataagctatgatgcgccggcaattgccacgatgatccagcatgtggcacttggggcaggacttctccatgccatgggtggccaggatctggccgcgatgaatgccattcggcttcaggaagatcacgcgacgggattcactgggagttggggcacaaaacacgacaacggcccaaaggcaaagtgagtatagaagcagctggtgcatcgacatcttttctctcgttatacggggttatatttatattgtgtaaatataatatataaacgtatctccgaagggcgcgtaaacaaaaagttgagctaaccaagtggcttgctccagtgccggcagttaactgattttatacaagtttcgggtagcacttcttaagtgctctgcccgcttgtcttttcattgagttgataaactggcaacagggtgttctagccccttcatcggtacgaggggccatagatttccccggctggtagtacatcaccctgttctgcgcaaaggggtaccagggggaaaatcttatctgggcctccatgccatttgcaatctgtgtaattgagtgcttcgcttgcccagcactgatttcaattcccgcccgatgcgcgaaatagagcggttgcctagggagcgggttgaataccggtatctaaaggcacggggacccgttctcataaccgtatgtagtccaacacggatccgataatatcatcatggttgagcttcttgaatttgcattcgacgtcgccatacgcaacgcccttttcggtgcattcggcgatttgttgcggttctctgcggaagatagaataggggattttcgccactcttctccgaattttctatgatttacccgaaccatcatatcacctatagatttagggactagaaaaaccagggttttcaaaaaaaaaaaaaaaaaaaaaacaaatgcaaaattcaaattactcacaaaagagagagaaaaatatttttaaaaatatgcatttaacaaaaacaataaaaataaaacaacaattggattatatacgaagtaaaatgctgagaagaaagcctatatttctaagagagcatcaccgtaagtatttttttttaacaacgatttgacaaccaactatatgcatgggtaaatataatacttaaggcgccaaatgtcttatctaaataaataaaagcccctccttctcacgagattagtacggagtaaaaccaatcactaaacgattgagcaaccaaacttccctgaacgcaaaccccattgaaatagatagcccgtatttttagagctgagtaagaacatgggttaattggcttgtgctccccgtattttatgatgagttagccataataactatctatctgatttcgaagagctttttgaactttgacaaaaaaaaaaaagtccgtggtatcaatttagcttcgcaacgatcgcgacaaagtgagccatgcgaaattccgtgtaaaattgtattttggccaatcatcggggctttctggaaaagcgatgtgggtggtggtggttgtgtttaccacgcgacaacccattgaatatttaacggcaattacggaacgagagacgtcacagatccaacatatttaccctcgttatcgcaccgcacacccgctgaaatttcccgaaaatgtgaccgaataatggtcttgccagagcaactgagtgttattattatagcgctgagtcagaagtgttcctcgactcatcgttatctcattgacgccggagttgtcgggtctagtgctctgtgtatagtatcttgtatcttgtatcttgtatctgcgttatatctgcagaaacccatagagcccagtatttcatcatacttttcgtgatcgacgacacgtgatgtgacgtagtttcgatttcatgacgaagcgaaagggttaatgtccattgggatcgtaccatctggggatttctacatgtgaaacatacttatgcaataggccataatagttttagcaaagccttgagcccttgagaaagctttcttttcagaacaactacttttctttacgataataatatttgttcataatgaattatatattaaattaattattgattttctgcctaattacttatacatttaagaaagtggccatattaatgtgaaagatggtataatcttatcttaaattgctgttgccaagcaaaaacatataatatttgctgttatctgtcatatcgttgttacaagatccgtagacagttttaatctgcgcaaggcaaacagacttaaaaataaacacgcatttaaatttaactttgctcagtgggagagtccagttttagacacgctaagtgggtaaacaagttggaattagcaaaataaacgtaattgagatcggtagagcactcacccttctgcaacgcccatgatgatcgcgaacgaatccgcgtgggcagcgatttccgcgcacatcaaggagcattcccttgcccagggcatcgctgttgtttttggccgcctctagggcttgggtggtgttcagttgattgaagtagatcaccctgccggattcagtgcacgaggagccgagcagcagagccaggagcagcagaaatcccaccgacggcagtacagatcgcatctcgttccaagggtttcagtcgcactgttttcactaatttaaaattggcccgacgaccgaccaagcttatcacttgctgattagcttgtttactgggagccacgagtgactatgtgtcgcactggacactctgcaatctcacatccaaatcatctcaatctgcttgcgagcagaattgctgcatacttctaggctgtctattggctatttgcgaattcggtgccgtactatgatttaattgagctcaaacataacaaaaacttatattttaatgttttttttttttgtttaaatagtcttacttaagtttatttatatatattcgaatggctgacagacctttttggcaacctacatttaaaaatgttcaacaacttaatgggacaaatgtcaaagtatgacaatgtcagagcttttcgccaatgggttttgataaaaatatattctggcaccaacaaaaccaaaatttaatagtctcctcattatatgttcaccttaatgaatgtgcaaataattactgctacggctgagttttaggcattgattttattttcatatgtttaatcgtcttacatcacatggaggaactctagttttgtctgttctcgaattgcctgcatttccaggccgtttgtgcagctttctagaccaaatcccgtcgtcttgggtggctttaactttcgttttgaggagtcatgtagctactcttctatcgtgcggtggcgcccggcgctgctcgatatacacaattatcgggatccacggtgatgagctctacgagtatatttatacataaattatatttattttgatcaaataatcaattttattatatttccaacttaccctgagccgcatccttgccgcagctgcgttggcttgtattcctgggcctgcccctggatcttcgtgtctcctgcgcctcattccgcacatcctcctccgacgtggagagtgtcctttcctgcgctctcctgcgagtcgtggcctgcacgacact

SEQ ID NO: 37796 - DNA, 615 bp, DROSOPHILA
atgcgatctgtactgccgtcggtgggatttctgctgctcctggctctgctgctcggctcctcgtgcactgaatccggcagggtgatctacttcaatcaactgaacaccacccaagccctagaggcggccaaaaacaacagcgatgccctgggcaagggaatgctccttgatgtgcgcggaaatcgctgcccacgcggattcgttcgcgatcatcatgggcgttgcagaaggataccggtattcaacccgctccctaggcaaccgctctatttcgcgcatcgggcgggaattgaaatcagtgctgggcaagcgaagcactcaattacacagattgcaaatggcatggaggcccagataagattttccccctggtacccctttgcgcagaacaggctgcttctatactcactttgcctttgggccgttgtcgtgttttgtgccccaactcccagtgaatcccgtcgcgtgatcttcctgaagccgaatggcattcatcgcggccagatcctggccacccatggcatggagaagtcctgccccaagtgccacatgctggatcatcgtggcaattgccggcgcatcatagcttataatgcagatggcgtgcgctgctga

SEQ ID NO: 37797 - protein, 204 aa, DROSOPHILA
MRSVLPSVGFLLLLALLLGSSCTESGRVIYFNQLNTTQALEAAKNNSDALGKGMLLDVRGNRCPRGFVRDHHGRCRRIPVFNPLPRQPLYFAHRAGIEISAGQAKHSITQIANGMEAQIRFSPWYPFAQNRLLLYSLCLWAVVVFCAPTPSESRRVIFLKPNGIHRGQILATHGMEKSCPKCHMLDHRGNCRRIIAYNADGVRC

SEQ ID NO: 37798 - DNA, 3140 bp, DROSOPHILA
agtgggtaaacaagttggaattagcaaaataaacgtaattgagatcggtagagcactcacccttctgcaacgcccatgatgatcgcgaacgaatccgcgtgggcagcgatttccgcgcacatcaaggagcattcccttgcccagggcatcgctgttgtttttggccgcctctagggcttgggtggtgttcagttgattgaagtagatcaccctgccggattcagtgcacgaggagccgagcagcagagccaggagcagcagaaatcccaccgacggcagtacagatcgcatctcgttccaagggtttcagtcgcactgttttcactaatttaaaattggcccgacgaccgaccaagcttatcacttgctgattagcttgtttactgggagccacgagtgactatgtgtcgcactggacactctgcaatctcacatccaaatcatctcaatctgcttgcgagcagaattgctgcatacttctaggctgtctattggctatttgcgaattcggtgccgtactatgatttaattgagctcaaacataacaaaaacttatattttaatgttttttttttttgtttaaatagtcttacttaagtttatttatatatattcgaatggctgacagacctttttggcaacctacatttaaaaatgttcaacaacttaatgggacaaatgtcaaagtatgacaatgtcagagcttttcgccaatgggttttgataaaaatatattctggcaccaacaaaaccaaaatttaatagtctcctcattatatgttcaccttaatgaatgtgcaaataattactgctacggctgagttttaggcattgattttattttcatatgtttaatcgtcttacatcacatggaggaactctagttttgtctgttctcgaattgcctgcatttccaggccgtttgtgcagctttctagaccaaatcccgtcgtcttgggtggctttaactttcgttttgaggagtcatgtagctactcttctatcgtgcggtggcgcccggcgctgctcgatatacacaattatcgggatccacggtgatgagctctacgagtatatttatacataaattatatttattttgatcaaataatcaattttattatatttccaacttaccctgagccgcatccttgccgcagctgcgttggcttgtattcctgggcctgcccctggatcttcgtgtctcctgcgcctcattccgcacatcctcctccgacgtggagagtgtcctttcctgcgctctcctgcgagtcgtggcctgcacgacactggtggctggcggttccttctcctgctcctgcaggatattctcgctggaggagtgcttcggcggacgacggcgacgatgtctcatcttctgggaactgaagctctcctcgcgtatcaccagagttcccgccttgctggttcgcaggtagtaacgcggcgccttgaccacatcctcctcctgggcgaactccggcgatgagtggcggcccttcgagagactgaatctctccaggatggagctttgcgagcggcggtagcgtcgcttctccctgggtcccgagctcgacgaattcagggtggatgtggaggggggcgtgggataaacgggcagatcctccgtttcctggaagcgaactgcacgcagcgaactggagcgccgcgaactcaccgatggctcccagttgggcagttcgtgggtgctgaagtcaatgcagctgccatgcgtcttccgccgcccactttcacgactcgaactgggcgtggcctcgctgggcgttacggtgggcgtgggagtgggcgtggcttctgctattcgaaggccatggaaattgcgctccaaatttgcggtggccgagcgcttgcgacgcctctgcgaatccctggatgtgtagatctcctccttctgaccatcggcatccacaagcagattgcccgtgtgatcgtataacaagatcctgggcagagcaatattactgcagctgcgagaggtgctcagctcccagttccagtggggtggtttcttcagcttcaaactcagcaaattggccagcggatcatcctcctgctccgcggcctcctcctcctcctcctcctgcagagcctcatcgtcttctgcagctgcttgggacatggcggcacatcagctgtggcaccctttttaatttggatttaaagatcaggggttgctctataggtttttgatctttttgggtcttcgtttccttccacctgttggttgtccgttgttcgcttgtttgatctgcctttatctgctgctgcttcttcttcattcacggctgatcttctgcttcttcttgattttttttggttgctgctttggcctttggccaatttattgtttatctcaactatgtctgtataggagacactcgctaaaaggtctttgactttaattttattactatttctttggtatttatatgtagatttgattttatttgtttgcctttttatttgcgatttttttttttagtttacaactcgttttatttgttccatgttcactgtagcctggcttgactgtcctttgaatgctgcccacgcttcaattatttttggcttctttttgtcagtattctctctcttttatgttctgctatttatagttgatccgctcccaaaaggcgttcccgaacgctttcccaattttcctgaacattttcccctcaccccgcgcacaatggtgacacttgagtgggacacagtgtgccacaagttccaagaacacaccacacaaaaactgagttttatgggctggcaaacaaaaacagagcgatattttccacagtcaattatatacgtgtgtgtgtatatgctaatgctggatctcgctcacacctttgggactcctcagttcccaagctcgccgtctcgctccgactcgcgtctgccgtcccgctcgtttctatgaccggcgatcagctgcgatcgcgttgtgttccgcccgccaacgtgcctcgtagccaactgttcgtcttggccgcatctagtagtgggccgagaaagccgcccctgccccgcccacacagcccccttccgcagcgggaaaaacgcaaccgcccccctccccacttcacccgctggcagacccactggcaatttgcatattt

SEQ ID NO: 37799 - DNA, 1068 bp, DROSOPHILA
atgtcccaagcagctgcagaagacgatgaggctctgcaggaggaggaggaggaggaggccgcggagcaggaggatgatccgctggccaatttgctgagtttgaagctgaagaaaccaccccactggaactgggagctgagcacctctcgcagctgcagtaatattgctctgcccaggatcttgttatacgatcacacgggcaatctgcttgtggatgccgatggtcagaaggaggagatctacacatccagggattcgcagaggcgtcgcaagcgctcggccaccgcaaatttggagcgcaatttccatggccttcgaatagcagaagccacgcccactcccacgcccaccgtaacgcccagcgaggccacgcccagttcgagtcgtgaaagtgggcggcggaagacgcatggcagctgcattgacttcagcacccacgaactgcccaactgggagccatcggtgagttcgcggcgctccagttcgctgcgtgcagttcgcttccaggaaacggaggatctgcccgtttatcccacgcccccctccacatccaccctgaattcgtcgagctcgggacccagggagaagcgacgctaccgccgctcgcaaagctccatcctggagagattcagtctctcgaagggccgccactcatcgccggagttcgcccaggaggaggatgtggtcaaggcgccgcgttactacctgcgaaccagcaaggcgggaactctggtgatacgcgaggagagcttcagttcccagaagatgagacatcgtcgccgtcgtccgccgaagcactcctccagcgagaatatcctgcaggagcaggagaaggaaccgccagccaccagtgtcgtgcaggccacgactcgcaggagagcgcaggaaaggacactctccacgtcggaggaggatgtgcggaatgaggcgcaggagacacgaagatccaggggcaggcccaggaatacaagccaacgcagctgcggcaaggatgcggctcaggagctcatcaccgtggatcccgataattgtgtatatcgagcagcgccgggcgccaccgcacgatag

SEQ ID NO: 37800 - protein, 355 aa, DROSOPHILA
MSQAAAEDDEALQEEEEEEAAEQEDDPLANLLSLKLKKPPHWNWELSTSRSCSNIALPRILLYDHTGNLLVDADGQKEEIYTSRDSQRRRKRSATANLERNFHGLRIAEATPTPTPTVTPSEATPSSSRESGRRKTHGSCIDFSTHELPNWEPSVSSRRSSSLRAVRFQETEDLPVYPTPPSTSTLNSSSSGPREKRRYRRSQSSILERFSLSKGRHSSPEFAQEEDVVKAPRYYLRTSKAGTLVIREESFSSQKMRHRRRRPPKHSSSENILQEQEKEPPATSVVQATTRRRAQERTLSTSEEDVRNEAQETRRSRGRPRNTSQRSCGKDAAQELITVDPDNCVYRAAPGATAR

SEQ ID NO: 37801 - DNA, 2216 bp, DROSOPHILA
aatatcgagaaggaggccaagatcttggaggagaaggccagggatgccaccatatcgctcttccagcgcataaataaactggtcaatgtgctcgcctcaccggttaaattcgaaaaggataaggaaaaggataaggatgagcagaaggaaccggaggaggtcaccaccacgaccaccccttccacatcggaggcttcgagttcctccaaaaacgatcttaaggaggaactaaccacttctgcgccgccagttcacttggactggctggaggatcatgccaatgaggtggactacattccagagaagaattagtgaagcacttagttaagcactatgctaatatatatgtatactaattaataaattatgttgctctttattcgatgagcctttcctatttatgaatttacagcatttaatttaatatatttttatataatctattttgtaaaatatcaaatgtaaaatgtacgaactcgtttgctgattcatcattgcaactggtatacatatgggtaagttcaagtatacaacacatttcatatattattatttctaatacatctttttgtttgcagaattcactttcgaaatgatttaaatagatcaaatctaaagggtcaatgtgtttgtagttcaagtccggtgtttacaaaagaaatcttgaatttagcataactggaacccaaaaacttgttgtgactacagagccaattgggtttaagttcttaatgaaccgcttcctccgctttggtgactcacttcacttgattgtgattctttcccgactttctcttctggacttttcttgccactgtggttattggccaaaaataaacaaacagcctgctaactgaagccctgcaactccggcataacttgtgagccggttttggtctcaacggatcagtgaatcagtgaatcatcccagcgacaggagtctcattgggccgatctcactggatgggcttcaattgctaattgccagtcgtcgggaaagatgcagcttctgggcaccagcggactactgataatcatcgtcatcatctccctgtcattgccaattatccaggggatggtctggtcgggatttatatgctctgcaagggatcatcgcggctgctgctacaattgggtataccccacacgtcccaggccgccatgtgccccccaaagaagtcggaattcgggtcaaaagaatgggacacccaaatgagtaattcgagctctacaagcacaagaaataatatatattttttaaattattataaaaacaaaacaatgcactttaaaggcctaacaccacaaagaataaatttcacagcgctaacggactcacagtataaattgcaactgtagtcagatatattataagcaaatatttttttgtagcgtgaataaagaaataatgatcttataattatctatatctgaaatgaaatgattgtttttctttcacaacttatctgtaacatgggaaagtaaattggggtgcaaataatattaaattgagcgttggttgacaacatttgatagttgtttgatatataaaaacgcttccgtagctttgttcatttaagttgattatccatcaatttcgcgtaaaatttgtataaacaataagtaaacatttaatggagcacacttttcacacagaaagccagaatgtaagcgaataaattgaaataaacatatcattcacgttattcatcaataattttctataaatttaaattaaaattgcaacaattttttttaattgaattcaaaacaagctttatgaattatttataataattacccgttaatcgcaagtttttttgttgattaagactattatttaataatcatagatataaatattctaataaatagacaaaaaacgttcgaagctcaaagtaatgaaattcattttaacaagctaagaaaacactatagatttttttttaattttttatgttttaagataaacattatatagttgatcttttcagggcctttaaaaacatctatctactttctcgcagtgcagtaaagcttacattacaaaaaagctagagcagctcgcattgagtgagcgccaaacaaccgatcgcacgaacgcaacttgtttgggatttagttttcagccagggtggataagttgcggcgggcgggatgggaggggcgtaaccggttggcggagatccgagatttcagatcgtagaccgccgtct

SEQ ID NO: 37802 - DNA, 216 bp, DROSOPHILA
atgcagcttctgggcaccagcggactactgataatcatcgtcatcatctccctgtcattgccaattatccaggggatggtctggtcgggatttatatgctctgcaagggatcatcgcggctgctgctacaattgggtataccccacacgtcccaggccgccatgtgccccccaaagaagtcggaattcgggtcaaaagaatgggacacccaaatga

SEQ ID NO: 37803 - protein, 71 aa, DROSOPHILA
MQLLGTSGLLIIIVIISLSLPIIQGMVWSGFICSARDHRGCCYNWVYPTRPRPPCAPQRSRNSGQKNGTPK

SEQ ID NO: 37804 - DNA, 2702 bp, DROSOPHILA
attttcgggaactacgagaacgacagtcattaccgccaaagttttgtcggccaacgtactttcgagacagccatctcatgggcatcgaattatgacacttttagtggtttctgctaactatgctgcggccaaaggagcaaacaggacgaggcgaaagcagatcctgctgagggcagagacagagacccaaaaactgtctttgtattttagcaagtttcgccttttggatttgtttgcaactttacttcgatttcagccaacacaaacttgcaacaattgtaggcggggaaaaaccgaagaggaatacagggaccttcttctgaaaaatctgaaaaattccataccgcagtgggtaataaagtgcatatatatgcttctataaatattttattaaaaatttattttcaaattaatgcagccagtattacattatttatttattaactacattattatttattaactaaactggatcgtttatttgtttgaaacaagtccttaagtttattttcaattcgactttccattacttgtattctatttacaatatatatcaaataataaatacacccatagaaaatctaaaaaataggaaacacaacaggctttcaatttgtgtacagttttacccagcagcttttccgtcttgcaatgttttcattttcagacttgtcctttctgttactctcatccgcttcagtgtttgtttttcgcttttttttcgatgcttctgctccttttttaacttaaaagtttatcaataaaattatgacagaaaactttttaatttgacacacaatagtcgtagacacgaatccgtatgcgtttggggacacttccacaaccgcatccacatccgccttttattccatatagttccatgccgggatgcggacaaataaataagcacaaaaaaaaaaaatgcgggggatatgcagtcatcagcctatcacagagataactatcatcaggcactgggaaaaagggggcgtggcgtggctcagcccttgagactcttcagcttgtttttcttctcaacggccaaactgttggcaaactgtttatccgcctcggatttgtactcagccagattgtacttggtggcctaaaagccaagtatgtttaagaatcaaatatttgctcaacaaatatggtggatatagtatgacttacgtttagggccgtgctgaactcactcatggccaacttttgaagaccccggaaattcctgcccagaatgcgacccagttcatagcgtgagatctggaaagcctccgtagtagtagtgggttcctcgctgttactaccattctcctctccactaatagactttattaaaatgataagtataagatatttaataactcttggatattcattcaatctaggacttacaattttctctgttgtcaccctgggccgattggttggttttgcgggacctggatcgctaaattgttcattcacagtattgtagatatcattcagggtgttgcgtgtatctgtatattgctaaacaaagcaaatcgcatatgcatattaattatagaatataagtttcagtataacaactcacatccactatgaggttcttggtgatgaccatcttctggaagaagtcccaaaagattccgcgcttgtgtcgtatatgcggtgcatcctgggaactcggatccttactttgtaccaaaaccagagccatcagtagaatgccgccaatcaagagggtcgacgttaagtttctgctatgcgcgaaatgcatgctgtgaagaggaaaaagacacacacaaatatttaattattgtagtgctctttgtgtgattaatccattgcaaattgcatcgatcaatggcagattctgtcatcgaccagggaaaaaccgacagcaatagaagtgacacgcccccgcagaggcggtgcataaatcatgttcggtgacagctctcgaaaaggagaacagcaacaccagaaagcgaaattgaaatggaaattgggtgggtgggggtattgtgaatgggaaatgggtgagctggggatgccgccaaaatagaggtcaataacaaaaggcgttgagtgtcggcaaattgcatttaaataaacaccaaaaatgccgtgaattctacaagtatgtttcaattacttttcataaatttttaaatagttttggtgtacctcgacaactgaaaaatgcttgtcatcataccaattaataccaaagaaattgttttgttcttttctcttctaaacaaaagtaagaagaggctaaacaaactcatggctgtaagaactgctttgcagaaactcaattttcagatcctgcagacaaatttgcgcctaattaatataactagctaactacaagaaatggtaattgtccaacttgtccagtggaaaatgggaaaactgttttccgcttagcatagttgcacgagaaggcggcattttcactgcgcccctgaaagtatgcagccgaaattgcgtgacaatcaaatttgcaatatttagtcaactttcgcgcggctctgggcgaaactcccttgcaaattgtgtaaaatgcgcattttttgcactatttgtttttaatgcgcgtaattaggaaaattgccaaagtagcttaataaatttttacattttaattgcatttctgctggccaaatgcaatgcgcacaaaatattcaaatgccatttaatgtcacaatgcg

SEQ ID NO: 37805 - DNA, 387 bp, DROSOPHILA
atggctctggttttggtacaaagtaaggatccgagttcccaggatgcaccgcatatacgacacaagcgcggaatcttttgggacttcttccagaagatggtcatcaccaagaacctcatagtggattctattagtggagaggagaatggtagtaacagcgaggaacccactactactacggaggctttccagatctcacgctatgaactgggtcgcattctgggcaggaatttccggggtcttcaaaagttggccatgagtgagttcagcacggccctaaacgccaccaagtacaatctggctgagtacaaatccgaggcggataaacagtttgccaacagtttggccgttgagaagaaaaacaagctgaagagtctcaagggctga

SEQ ID NO: 37806 - protein, 128 aa, DROSOPHILA
MALVLVQSKDPSSQDAPHIRHKRGIFWDFFQKMVITKNLIVDSISGEENGSNSEEPTTTTEAFQISRYELGRILGRNFRGLQKLAMSEFSTALNATKYNLAEYKSEADKQFANSLAVEKKNKLKSLKG

SEQ ID NO: 37807 - DNA, 2409 bp, DROSOPHILA
tccatttccaggaggtgttaagtgtccaggagcgcaacaaaagaaaactgcccgatgccacattcgaggctaagaacgcagtgctcggttttgtgtttggcgtgagtatttcatatgcttaaaataataagaaaaataaatatacaaactataaataaatatatgtagaaaatcgacaacttcctggatacaaagacgcgggtgatcgagcagctggaccgatcgaatatcgaaaagaacaagcagtgggacatcaagtcgccggtgcccatcaaggacttccagactctgattaccgccgtggtgtcgccaaagatccgttcgattggcaacattgctaatgacctgaccaccggtgtgctgaccacgattaccgcctttagtggctcctcctcgggcggcggaaatgcgaacgccggattgggcaatgtggtttccaagttcctcagcttctcgggacccatcctgcagggatcatctggcggagttaatggaatcgccggcgtgacgacaccagctcccgattccgatgaggcgggctactaggatgtgtaaatagcaacgattcaaggccaacaaatggaagctgtaatttatcgttgaatccctattcgtttcttcccacatccatcagaatctttgttgaatttccaaccccctcgctcgaatcgtttttatttttttttgtttacaccctagttaagtttcatgtttgtaaatattcggcataaacaaatatatatatatagagaaattcacgacactacaaaagcgaataaaaccgaaaacagaaaaccaatataacacgcacctagtttcgatttggggccttggccttgtcaagtttttggattttggattttcgaattggattttggatccctctgctcactcacatggctcatctatatatatttatctctttgtttctctatatatttgccagaccaagagactacgtcgggcggggggaaaagatctgagcgatgccgccgaaatcatgagcgatgcctccctggaacttccctctgaactattgaacaaatctctagtgacggtcaccaatatctcaaagtcgttgtctcgcctgattttggtaagtaatatatattgtagatagaatatggctttatagtaaatagaagaaactagtaacgtttgtttaataagcaatgaatttggagatattgttatattatttatgatattctttaaaatggttataatatgttgttgtttttatatttatactacagaactccgctcgtcgctactcccgcttcgtgctcttctttaagccagttttcggagatgccctggtggtcaagggatctgaagatcccactacaaccaccacagtacgcaccaccacaaccaccgaagagactgacaagctcaacgaagtctaaatagaatttaatttttaattaatcttttgtattacatttgtttttttttatctcttaacttgttgggcgtttgtttaatatgcgactggtgtagtcaataaagttacttatttataaagcggcgcgtggacgaaccatcatgcgaactattttcagggaacctttgggtccatttaagaaaccgcgccatagaatgcccttgaaaccatcaacatcccgttctagaaggcgttgatataggccaaatgggttgctataggaaaataaatgttatactattcgataataattattgaaatgaataagaacgcacgtgagattgcaagagccgccataccaaaaagctcccgactgctgagccgcgcagttttgctcattttcatcattaaccctatcgtgggtactgaatttctttcccgtgtggtcacgcaatgcatcggcagcatcgccgtgataatcccccaagacattcagacgatactgttccgattcactgccgatgctaaagtgatcatatagggcatatctcagctcctgctttcgattctgcagctgaaccaaaagctcatagttgtcactgctcgtaatctgatgcaatttatccaatccgatgaagaactcggtggttagtggcccgaaaccgatcttgtaatccgcccactttcgattgaaatcctcactgccatcataacgattaactaccattgtccaaccaccgtttctgaccttctgatcgcaaaaaacaaagaacggttccacgttcgagcggggtctgattcgcaccacaccgtgctgctgtttcaggcagtttgccggagtgattggaacggccgctgcaccaccgttggccaggagttgcggctcaatgtctaggctgttgtgggagaagggactgtgaattatcacacatgaataacaacgactgccggcaaatacctacaatcgagatgccagtgcattgggcgaagcgagtcccaccaccggtgcacttcccgctctt

SEQ ID NO: 37808 - DNA, 249 bp, DROSOPHILA
atgagcgatgcctccctggaacttccctctgaactattgaacaaatctctagtgacggtcaccaatatctcaaagtcgttgtctcgcctgattttgaactccgctcgtcgctactcccgcttcgtgctcttctttaagccagttttcggagatgccctggtggtcaagggatctgaagatcccactacaaccaccacagtacgcaccaccacaaccaccgaagagactgacaagctcaacgaagtctaa

SEQ ID NO: 37809 - protein, 82 aa, DROSOPHILA
MSDASLELPSELLNKSLVTVTNISKSLSRLILNSARRYSRFVLFFKPVFGDALVVKGSEDPTTTTTVRTTTTTEETDKLNEV

SEQ ID NO: 37810 - DNA, 2611 bp, DROSOPHILA
ctgcttcaagcgattttctgtcgggcagtcttaaaaaacctttcaagagggagaatggcagaacaatgaaccgaaatcgccaagtgaattgcataattttcaagatattacttgtgatcaaaatctgtgggctgaaggcgaattattgttaaacgttttcaagctgattaacttttcgctttgaaactatatttttcgagactgttaatatccacgaacaggcccgtgaattttatagaattcacataagcactttattgcattttaaaaaattcaaatcacagtcaacgtatttcataacttttttaagaggcccagaagacgtcatcaagtcaaataaaaaggtcgtataattgcaagtagtagtgcaatgtactaagatcccacatcgcttgaattcggttcgaaattcaattccaatggtttggattatgcgttttggttggaaatgagttgatttcggcttcgatattgagctgcacatatattgtacatatatgaccgaatgacgaggtgaattttaagtgccttggaccagcttggatcgatcgagaagcagtcggaaagtatcagatatagcgataggcatcggcttagaatgaccgaaggtccccaagtccacaagtgatataattacttatgtatgtgtagtatatgagtgattttttttcttcttcgaccagccccaaaaaattgggtcaagtctaactggccccccagtgccgagtgcttttttacccgctctttggcagcaattaaacttgaagtcaacactggcggcactcaagaggtgtaattaggcaaagaatccaatcgattaaagccagacaagtccgaaaatgccagatcggcaattaggcgcgatatgaaatgactgggaaaaattaatatatatgcttagagatcgtaaaagaaatcaatttgtttgtctcaacattaaagctcaaaatcttgtaattacatatataaagcttcatgttgactagaagcaatttggccaatgtcctttgccagtgctcctctgattcttcccgtttgggtgatcctgtattttccacttcgatttccatttccaggaggtgttaagtgtccaggagcgcaacaaaagaaaactgcccgatgccacattcgaggctaagaacgcagtgctcggttttgtgtttggcgtgagtatttcatatgcttaaaataataagaaaaataaatatacaaactataaataaatatatgtagaaaatcgacaacttcctggatacaaagacgcgggtgatcgagcagctggaccgatcgaatatcgaaaagaacaagcagtgggacatcaagtcgccggtgcccatcaaggacttccagactctgattaccgccgtggtgtcgccaaagatccgttcgattggcaacattgctaatgacctgaccaccggtgtgctgaccacgattaccgcctttagtggctcctcctcgggcggcggaaatgcgaacgccggattgggcaatgtggtttccaagttcctcagcttctcgggacccatcctgcagggatcatctggcggagttaatggaatcgccggcgtgacgacaccagctcccgattccgatgaggcgggctactaggatgtgtaaatagcaacgattcaaggccaacaaatggaagctgtaatttatcgttgaatccctattcgtttcttcccacatccatcagaatctttgttgaatttccaaccccctcgctcgaatcgtttttatttttttttgtttacaccctagttaagtttcatgtttgtaaatattcggcataaacaaatatatatatatagagaaattcacgacactacaaaagcgaataaaaccgaaaacagaaaaccaatataacacgcacctagtttcgatttggggccttggccttgtcaagtttttggattttggattttcgaattggattttggatccctctgctcactcacatggctcatctatatatatttatctctttgtttctctatatatttgccagaccaagagactacgtcgggcggggggaaaagatctgagcgatgccgccgaaatcatgagcgatgcctccctggaacttccctctgaactattgaacaaatctctagtgacggtcaccaatatctcaaagtcgttgtctcgcctgattttggtaagtaatatatattgtagatagaatatggctttatagtaaatagaagaaactagtaacgtttgtttaataagcaatgaatttggagatattgttatattatttatgatattctttaaaatggttataatatgttgttgtttttatatttatactacagaactccgctcgtcgctactcccgcttcgtgctcttctttaagccagttttcggagatgccctggtggtcaagggatctgaagatcccactacaaccaccacagtacgcaccaccacaaccaccgaagagactgacaagctcaacgaagtctaaatagaatttaatttttaattaatcttttgtattacatttgtttttttttatctcttaacttgttgggcgtttgtttaatatgcgactggtgtagtcaataaagttacttatttataaagcggcgcgtggacgaacca

SEQ ID NO: 37811 - DNA, 417 bp, DROSOPHILA
atgtcctttgccagtgctcctctgattcttcccgtttggaaaatcgacaacttcctggatacaaagacgcgggtgatcgagcagctggaccgatcgaatatcgaaaagaacaagcagtgggacatcaagtcgccggtgcccatcaaggacttccagactctgattaccgccgtggtgtcgccaaagatccgttcgattggcaacattgctaatgacctgaccaccggtgtgctgaccacgattaccgcctttagtggctcctcctcgggcggcggaaatgcgaacgccggattgggcaatgtggtttccaagttcctcagcttctcgggacccatcctgcagggatcatctggcggagttaatggaatcgccggcgtgacgacaccagctcccgattccgatgaggcgggctactag

SEQ ID NO: 37812 - protein, 138 aa, DROSOPHILA
MSFASAPLILPVWKIDNFLDTKTRVIEQLDRSNIEKNKQWDIKSPVPIKDFQTLITAVVSPKIRSIGNIANDLTTGVLTTITAFSGSSSGGGNANAGLGNVVSKFLSFSGPILQGSSGGVNGIAGVTTPAPDSDEAGY

SEQ ID NO: 37813 - DNA, 4423 bp, DROSOPHILA
cgatctctgcgcacttgaaaggttaaacgagcgtgacgagccgccgccgccgccgctgatgttttgccgcttggacttggactacctggctttagctttggctttggctttaactttaacccatgtttgccattacgttcacggggcagccccttcacgtaatctcccgccgcccagtcagtgcccccggacgatcatcgccgagatgctggcccaatctcacccatttaactaatggccaatgctaattaacagtcacgcataactgagacacctgcatttcggttttccaccttttacataaggcctttatttcaatcaccttttggggcgctgaaagccgaaaaataaggggaagtaggcacattatggcattagctaatggctccgattcgtgtcgtctattaaatgtgcctaatggccgggtaattgtggcttctggttctggccaggtgagaagtctggtcatttgtaagccccgatgttctggtcatattttaaagtggtgtcttgggaaagcacccaatacatataattatggctcatcataattctggcaaagaggaaatgcgattcatctagatatatttcttagcatcaaagtacttagacataatctcttctcttgttattaaagctactttaacttaatgacaattcctaaaagttattgccataacattcctcttctaataggtcttaggaaatatactatagaaacatgacaatagcaataatatctgtaagtccatttaattgagtaatagaaactagttccagctggaaaaactaaattagtttaaagatgaagcccccttagatgaaacgcccccttgttaagatgtcgctatatttgcgtacgacaatccgtggcataagatatgccacactgatcagctccacagacgattgacccattgcacaatcgtcaaaacgaaggcgggtccagtgggaggatccaccaaccacgcccaccgcccaactaaccgtgaacgtttcgatggatccatgcgaaccaaacgatccgcagatgttatatgagctagtggacaaagcttcctggacgcagttttctttcgatcggccgccaatggagaacctgcaagtgctgcgattgctcctcggattaatcggtttagtcctgatctcgagatcggtggatagtaggccgggtggaatggaatttcagtcgcactatttgcaggccattaccgcctaccgaaggctagagaggatccttcccaaggatgagctgcgcgctttaacgggcattggattattgaatggagcccgccaggcggaagagcaaatggaacagcatttggtggaagccgtcagggagctgctgttccaaatgaatcttacggagagcgggcgtgtaatgtccaaaatcgatgccatcgaacagcagttgtccagggatcagagggcgctggaaatactcaatcgggtgatggatgtggtgtcccaggccaaggatgatcatgagttccgagtggagttaagggaaatggctcaggagcaaaaggaggaagagctgtacaatcaggaactctccgccgatctcacggatcagccaaaattgggcgagagattgggaaaactgagacggaatatcatcaagcaggtgccacaaatgaaaaacgaactggaggccaagattgacaaggctctgcagcatttattggaacaggctggagaggatggagtgttggccaaggccaagcaaaaggtgatccacaaaaggcaaatcaagaatggaacaaagcagaggaaacaggagaatcggaacaaccaggaggaggcggagcaacgacaaattccggaggaaatgaggattataaagtccatactttctgaggtagtactagagaaattattcacaattccttaaaaatcacatacattaattcaaaagtggtttttgaatataaaaatgattaaccttttaagtttaagctaaaaatgcatgtctttagtatggaacgcttgattttttttaacgccaggctcatgacttgcgcttccaggaagatttcctggaaaatatgttggatcagccgccgccgaggcgaattaaaatagaacccaactcttcggaactcgatgatctggatataaacgtaaaggtgagcaaaggacccatgtttaaccctttgtgactaacccaatgaccgctaattgatgatgacctaacccaacattgacttggttcacctaaccctttgtcccacggccttttgaagtcgccaaatgttacagccaaaggtaaaccgaaaatgaaagcaaagccggagaaacaggtggaggcggagggcacaggctcctcgtcggaattggccacggatgacaacgatgacctgggcgatggggatgagcccggtgatggcggagacggagcaggtggtggaggaggcggtggcggtctggttggcatcattagcagcctgagcggtgtaagtggaaggctaagaaacccataaatatttatttaaaatggatttatttagggtgaaggtggttccgatgtgggtgccttaattggtgcccttaccggtgtgatatccactttatttggagtaagtattgaagttttccaatcaatcaagggtatttaaatagaaaaactatcttttagcctggaggcctagatgtgcaaggtctgattcaaacgggaacctcgctgatctctggtcttctgggcgggaataagaactttggcctcgtgttgggacaatatgtgggcactgctttggatggtctctctggaggtggtggagcggtgggttcctcaaacctattttcatgaatttccagtcattttacttgcatatattattttttccagattaacaatggccagtttataggcaacttcttgggcactgtgctggccgcattgagcgctgtatttatatattttgcttatatatatatttaccttctagatcccaacctcataactgtgttactaacccctgaacgtcatttatttagcgagtgcaataaacaacattctacaatctttaacaggatcccgaggaggagggcccaccgcaaccattgaccttcaccaagaacctgatcaccagcttcctggaggcaaagtttcgaccaatttcagaggacggctcagaggagcgacacggaagtgcggagttgccacgcccgcgaaagaagaaggagggcggtggatgggcagctgcggcggcaaataactttgattctggaggatttgtgaagcaagtggcctcccatctggtgagcaatgcccttggattgattttgaatgccggtctgggagccgctggaggagcttcgagtgcagccaagaatattttcgccagcagcagcatgggtcatcatgccaagccggcagatcaccatagatcttggaacccctaccataatgagccattctagccagcttagtcatcacataatcatagttacgttaatcgtttgtgttaaacccattttttttttgctagttcgtaaccgaaataaataaagaagtgaggagaaagacttgttggtcacttgggcagctaagaaagcgtaaaagaggggctctaaatcaagtggcgtaacagcttggacagcggctgatgcaagagatccgatggaattcagtgggagccactgcaatgaaccactcccccaaggatgcggtggggcaaatcactggatggaaacgcaaaaagcgaaagctcgcaatgagcggaagtaaaaactaagtaaaggttgaggggtgaaatagcttgtttgggttcatttcctcaaactaaagttcagtggaaggtagaacaggggaatgaactacggatttcggctcaggagtttcgcttcaaaaattagttttaaatacatttggcaataccttaattaactaatatttaaattaaaaagatagaattaatatatattttgtaacccaatagcctaatagcgaatatttttggatcttcttgacccaagagttttccctgaacctttctccgtgggccaactacttggtagcttgcccaatggagcgggcattgtgtcactttctactgattacaggtttcattaaaatgcttttacttgtttacttctggtgctttctctgactctctcgctctctctcttccgcctgctctctctctctctctctcattctgtctttctcttttttttttttgaagtgggctgaatatttttttagcggcgagtttcagttttcagttatgcgtgaatctttcacaagacaaagtgacattttgcgggccgtttagttgtcgcgtttttaatttgaaaaacttcaggttgtgtttattgttttgtgtttttcttgtgcgctcagtgtttgtgctggtttatttgcattttgaaattgtttatgaactcaattatatatttgggtgcttcggagagttcgcat

SEQ ID NO: 37814 - DNA, 1725 bp, DROSOPHILA
atggatccatgcgaaccaaacgatccgcagatgttatatgagctagtggacaaagcttcctggacgcagttttctttcgatcggccgccaatggagaacctgcaagtgctgcgattgctcctcggattaatcggtttagtcctgatctcgagatcggtggatagtaggccgggtggaatggaatttcagtcgcactatttgcaggccattaccgcctaccgaaggctagagaggatccttcccaaggatgagctgcgcgctttaacgggcattggattattgaatggagcccgccaggcggaagagcaaatggaacagcatttggtggaagccgtcagggagctgctgttccaaatgaatcttacggagagcgggcgtgtaatgtccaaaatcgatgccatcgaacagcagttgtccagggatcagagggcgctggaaatactcaatcgggtgatggatgtggtgtcccaggccaaggatgatcatgagttccgagtggagttaagggaaatggctcaggagcaaaaggaggaagagctgtacaatcaggaactctccgccgatctcacggatcagccaaaattgggcgagagattgggaaaactgagacggaatatcatcaagcaggtgccacaaatgaaaaacgaactggaggccaagattgacaaggctctgcagcatttattggaacaggctggagaggatggagtgttggccaaggccaagcaaaaggtgatccacaaaaggcaaatcaagaatggaacaaagcagaggaaacaggagaatcggaacaaccaggaggaggcggagcaacgacaaattccggaggaaatgaggattataaagtccatactttctgaggctcatgacttgcgcttccaggaagatttcctggaaaatatgttggatcagccgccgccgaggcgaattaaaatagaacccaactcttcggaactcgatgatctggatataaacgtaaagtcgccaaatgttacagccaaaggtaaaccgaaaatgaaagcaaagccggagaaacaggtggaggcggagggcacaggctcctcgtcggaattggccacggatgacaacgatgacctgggcgatggggatgagcccggtgatggcggagacggagcaggtggtggaggaggcggtggcggtctggttggcatcattagcagcctgagcggtcctggaggcctagatgtgcaaggtctgattcaaacgggaacctcgctgatctctggtcttctgggcgggaataagaactttggcctcgtgttgggacaatatgtgggcactgctttggatggtctctctggaggtggtggagcggatcccgaggaggagggcccaccgcaaccattgaccttcaccaagaacctgatcaccagcttcctggaggcaaagtttcgaccaatttcagaggacggctcagaggagcgacacggaagtgcggagttgccacgcccgcgaaagaagaaggagggcggtggatgggcagctgcggcggcaaataactttgattctggaggatttgtgaagcaagtggcctcccatctggtgagcaatgcccttggattgattttgaatgccggtctgggagccgctggaggagcttcgagtgcagccaagaatattttcgccagcagcagcatgggtcatcatgccaagccggcagatcaccatagatcttggaacccctaccataatgagccattctag

SEQ ID NO: 37815 - protein, 574 aa, DROSOPHILA
MDPCEPNDPQMLYELVDKASWTQFSFDRPPMENLQVLRLLLGLIGLVLISRSVDSRPGGMEFQSHYLQAITAYRRLERILPKDELRALTGIGLLNGARQAEEQMEQHLVEAVRELLFQMNLTESGRVMSKIDAIEQQLSRDQRALEILNRVMDVVSQAKDDHEFRVELREMAQEQKEEELYNQELSADLTDQPKLGERLGKLRRNIIKQVPQMKNELEAKIDKALQHLLEQAGEDGVLAKAKQKVIHKRQIKNGTKQRKQENRNNQEEAEQRQIPEEMRIIKSILSEAHDLRFQEDFLENMLDQPPPRRIKIEPNSSELDDLDINVKSPNVTAKGKPKMKAKPEKQVEAEGTGSSSELATDDNDDLGDGDEPGDGGDGAGGGGGGGGLVGIISSLSGPGGLDVQGLIQTGTSLISGLLGGNKNFGLVLGQYVGTALDGLSGGGGADPEEEGPPQPLTFTKNLITSFLEAKFRPISEDGSEERHGSAELPRPRKKKEGGGWAAAAANNFDSGGFVKQVASHLVSNALGLILNAGLGAAGGASSAAKNIFASSSMGHHAKPADHHRSWNPYHNEPF

SEQ ID NO: 37816 - DNA, 3172 bp, DROSOPHILA
gtggtggtggtggtggttgttgcaggtaagactgttgttcttgttgctgctgttattgctgtcgggggatcagcggttgttgctggctcaaaggagcgcggaaacaactggagcagctcctccactggcgtgctagtagtactggagatactactggtgctagtggtgctacttgtgatggttgttgttgttggattactgggactggtggttgttgttggggatgaagatgcttgattgttgattgggctttcatcacctttcgtttcatctgctcctgctccagattgtggtgcaaacgtgggcaaatcgattttcactcgccggctttcttccacctcgttggtgctgctcgatggtgcactacctgcactccgtgtggccggactacttgatggcgccacatcgtcatcctcgtcaaagtccgcatcgaaatcggcatcgaaatcgctagccggcgttgtacctccaccggctgcaccacccgcaccacctcgatttccggccaatatggtattcagaagaccaggaccggccacccgaatcacctgggctataattcgatttactatggagtcgatttcctagcaagagatcagcgaaaggtcaacaaagaatatgcgatttgatttgattgctatatttgtttttttttttttactggtaaatgagattctttggtggttctgctgtttattttttggtggtggtggtgctttccacatgagatgctgatgcagtagctgatttcttgtcgattgttgactgttcttgatgatcttgggccaattgttcggatgattgtatctattttgcaggctgaaaactcaattgtgggtgtgtatcattttgtttggtattgtagattatgtgtctatgttcgtgtctatgtgtgcgcgtatgtaattattgggtgggtggtggtggttcaatctctgctactgggtggtgctggcatgctgagtacaggatgtggctttgggtggttgagtgctcgttatgctaaaggcctaaagaaaaacatgcaacatttgataggtatacacatttccaggagaggacggggaccaagccaataatttgtttgtgggttaaagccttaggctagatattcattttcattttgtaaattggttttgctcatttctgctcctttgcaaactcgccatcgggctggaattcggttaggtcgtcgggcagttgatcatcatagtccttggacccttgcttcatatcatccccatcactatcattgccatcatcgtcctctttggctggctgtcggggatgaaggcccagatcgaaggccggattgagaacggtgcccagaaccacgggaccaacgcgttgcaacacattattcactagacgattgatctgcacattgatctcctatgtgattcaaattcaatacactttcatataaacagggatatatgttttaactttattcattttctaggggcctaaaaccctgggctaaaagtgtctgagtggattgttatatatatatatagcattacgtatatggatttggctgacatttcgaagacagaggggtcaaaggggggacggctaatggttcatgtatttatatagatattatataaataatatatccaatcagattcttaccttggtgatgtcggggaaaagttcgcgcagcagtccaatcgttcgtttgttgcgatcggctatcaatgattcttggtctttggcgcccaatgtcaagacatcgatttcctaaaaaaaaaaaaacataaaatgattagaaatattgttttaattaatacatattattaatacaccccaattgatccaataaaatcgtacttaaaacaaagcatttccgcgtgaccttagccatttgaaacgcagttgactttcaatttgggaatgactggtttaaggtgcgaattactttttctgcggtcgtggcaaacaatactacctatataatttcgtacatctgttgcataatatctggcagtgaaacaccggagaagatgaggcagcagcagcatcagcagcagatgtcaaacgaaagaaaacaaaaggccccaaagtgcccgcaaattgacaaaactttcactttagacaatgagttgctggtggtaccagtaccttgcagcccgcccccttttcccagcttttgggggcgccccatgtcatttgtgtaatcaagtttcaagtgtaaattgtaattttcttggtgttactcggtggttacgagggatcttctatcactacaccaccagcgcattaagtggccccttgtttaagttgagtttagttcagttgagtgggtggtgcaggggcttagttcagtgggtggtggtgcagctgctctttggcccgaaaaacaagagtaaagccaagagtcagggagctcaatctcaaaaggcccaggcccagaaagtcaaatgacttggcaaaaagttgttaacgttaatgggcaattgccaactgtgcagcagcagcagcagcagcagcagcagcagcaacaacagcaataagctgtctaagctaagaaaatattgcacaataaattttcaaattgcattaaaattgcattttgtgggcggtggatgaatggctgaatgagcgaccaagaaggcgactaccaacttttggacaatcaacagcacgagtcactaagcagcaaaaaaaaaaaaaaaaacaagcaaaggcaacttcttagttgcaacaattgtcaaggtgccaccaggtgcaaaggattccaagccgctcaaaagcagcacaatctaataatatagcatcaacactttaacaattggaaaagtttcttccgctacttgacaacgacttaaaaaataggaaataagattgtgctgggcaaccatttcaatatcgcacaatgtagtgaaagttttcatactcttagtggaatgctcattgcgaaaatgcattatttaaaatttaagcgtaataattacttttcaattttgactttattttaaaagattactatattctctattctcttattgtctatgaatattttgcattatttatactactctttatacataatattgatagatagatattgataccttgacaactcctttccatatataatcgacgacaatagttaaagttaatgagacaattgtctatattctaccattgtttttatcacttgcccatt

SEQ ID NO: 37817 - DNA, 633 bp, DROSOPHILA
atgacatggggcgcccccaaaagctgggaaaagggggcgggctgcaaggaaatcgatgtcttgacattgggcgccaaagaccaagaatcattgatagccgatcgcaacaaacgaacgattggactgctgcgcgaacttttccccgacatcaccaaggaaatcgactccatagtaaatcgaattatagcccaggtgattcgggtggccggtcctggtcttctgaataccatattggccggaaatcgaggtggtgcgggtggtgcagccggtggaggtacaacgccggctagcgatttcgatgccgatttcgatgcggactttgacgaggatgacgatgtggcgccatcaagtagtccggccacacggagtgcaggtagtgcaccatcgagcagcaccaacgaggtggaagaaagccggcgagtgaaaatcgatttgcccacgtttgcaccacaatctggagcaggagcagatgaaacgaaagtcccagtaatccaacaacaacaaccatcacaagtagcaccactagcaccagtagtatctccagtactactagcacgccagtggaggagctgctccagttgtttccgcgctcctttgagccagcaacaaccgctgatcccccgacagcaataa

SEQ ID NO: 37818 - protein, 210 aa, DROSOPHILA
MTWGAPKSWEKGAGCKEIDVLTLGAKDQESLIADRNKRTIGLLRELFPDITKEIDSIVNRIIAQVIRVAGPGLLNTILAGNRGGAGGAAGGGTTPASDFDADFDADFDEDDDVAPSSSPATRSAGSAPSSSTNEVEESRRVKIDLPTFAPQSGAGADETKVPVIQQQQPSQVAPLAPVVSPVLLARQWRSCSSCFRAPLSQQQPLIPRQQ

SEQ ID NO: 37819 - DNA, 2815 bp, DROSOPHILA
ctgaatgaaaattgttatgaagttaggtaaggattattacagtccgattgccttaccaatatcgcgattgatgtaataatagacaatgcggtttggccatctgaaggtttcattgcgaagtccgttccttccctccggactgggcaccatgtcgccttcaatatagccagctgtcagttcaggatcggtttctatcctgttctgtgtggtgggagctgccgagcaggagctggccaagaatatgaccactaaagttaaggcccaggtcttcatgttgatggctctgcgatcagcaagttactgtttgaggcgcctagcttatggtgacaaagaggtatagttagctattggataatttatgacatttgctacagttaagtttttacgatcagacaaattgcccaatggtcagcgttatgatgttatcttatcggcgaatgatgcctgcgaaagtataatctcgtatacgtaactttaattcacggtttcttcttaagaatgtttggaattcccagggccaatgagataagatctagatctattcttatatagatatttaggcaattatattgccatgaatcgttgaattgtatagtaaatggatattctagacttgcacattcctaactgtaatttatcatcatttatttgagaaaatttgtaaactctgagctcaacacagcacacgtaagtaatatttcttcgattcccatataacaaaagctaacaaaccatgtcctctccctttgcgcaatttcatcttgcaacaccccaagactcaatcaaaattacaacgccttcccaccccgaaataaagaaaatcagtgtcaaaattaatccggaagcaaatgacaacgacgagcattctcctaattgcatttgtcaacacaaaaaagagattatatttatatatcgcgagtaaaggtgacaataatagaatgaaatttatcatcattacgatgctgtagaaatttccaaacagaaatatgataaaaaaaactcattctttgacggtggggcatttgtagatggcatttagctttctgatatcggtttcactcagctccagcctttggccaattacatcctcctttccctcctccaaagccaatattgtcctctcgccattcttggaaaatgcatagggaccatagtgcattacgctgccatagtcgtatttctcaccaaaatcattgacggtttcctcggtatatttatcaaagttaaactccatgccttcggtgatattctcctccacaatttggacataatcatcccgatcggcggcactttgctgatggaaaaatccaagggcatgcaggaactcatgcactatcgtatacaaacggaaacaaccgacgcctatttcattattctggagattcagttgttgaacgcgattcagataaccgatgtaggagaaacaaccgccctcctcggaggtcacatttacataatacttctgatcagtggtggcctctttgaaggtcaggcatgaaatggattcgattttctgaatagcgctcacgatgtggttacgatgttcttcatctattgcgataaaatattatagttttaaaatatatttgatattcaatacataccaatatagctattaatatggtaataaataatgcgattgggccatctataggtttcgttgcgccaaatatttctcgaggatccactgggcaccatatcaccctcaatatatccagctgtcagctccggatcggtttctatccgtatggatggagctgcccaagcgacgttgactacaaccagaagtagaagtaatatactgtaatagcacatattggctgctagacttcccattcaatactgtttgggcagttcaatgcacgagcgttgttcaattccgcagccgtagttaatctttagtatttatgatttttcaaattagtagtgccgtttttaaatgatatctaatcatttgtaggacggtaggaaaggtaagcagcaattacgtttataatctcgggcaattgaaaggaaaatattaaattgtactagtttggcaaaacttacaaattttaatttatagagtccaattgtactttcttggagaacatataatatgttttaacataaatattattgatactatattctatgtactctgaatgcttttattgcttaaccaaggtacagtatgcaaataaatatggtttcataaaaatcaaataattataagcttaaacaaactaataaatataaaaccttcaaaacaataatctctgatatgttgcatgctttttacttaatctggagaactttacttcactgaaacaaaaatagcacatctctataaaaaatcacaattgatttaaaagatttgtttatagccgcaattgctctttaaagtaattcattctttgtgttctgtaagaataaatgcattttttctgttctgaaaatgtataaaagccgcttgctcctagcaatgttatatcagttctgaaatgcattaccttgcactcgctgtgatttttggacttgggtcttcggctaacggtcgtccttccatcaaacttcaagaagacgacatcatactaatttcagaacaactccaatattttgaaggaaatctagaaggtcgtgttgtaaaatcatggtcagaatattactggaagggaagaacgttggtctacagttatgccggaggattttgtaagtaaactgtttaagaaattctgagcagttcttaaaagttctatcttatattttattttgatcatagcttccttggatattgcaagtattgaaagtgcaatggcagaaatatcatcgaaaa

SEQ ID NO: 37820 - DNA, 762 bp, DROSOPHILA
atgtgctattacagtatattacttctacttctggttgtagtcaacgtcgcttgggcagctccatccatacggatagaaaccgatccggagctgacagctggatatattgagggtgatatggtgcccagtggatcctcgagaaatatttggcgcaacgaaacctatagatggcccaatcgcattatttattaccatattaatagctatattgatgaagaacatcgtaaccacatcgtgagcgctattcagaaaatcgaatccatttcatgcctgaccttcaaagaggccaccactgatcagaagtattatgtaaatgtgacctccgaggagggcggttgtttctcctacatcggttatctgaatcgcgttcaacaactgaatctccagaataatgaaataggcgtcggttgtttccgtttgtatacgatagtgcatgagttcctgcatgcccttggatttttccatcagcaaagtgccgccgatcgggatgattatgtccaaattgtggaggagaatatcaccgaaggcatggagtttaactttgataaatataccgaggaaaccgtcaatgattttggtgagaaatacgactatggcagcgtaatgcactatggtccctatgcattttccaagaatggcgagaggacaatattggctttggaggagggaaaggaggatgtaattggccaaaggctggagctgagtgaaaccgatatcagaaagctaaatgccatctacaaatgccccaccgtcaaagaatga

SEQ ID NO: 37821 - protein, 253 aa, DROSOPHILA
MCYYSILLLLLVVVNVAWAAPSIRIETDPELTAGYIEGDMVPSGSSRNIWRNETYRWPNRIIYYHINSYIDEEHRNHIVSAIQKIESISCLTFKEATTDQKYYVNVTSEEGGCFSYIGYLNRVQQLNLQNNEIGVGCFRLYTIVHEFLHALGFFHQQSAADRDDYVQIVEENITEGMEFNFDKYTEETVNDFGEKYDYGSVMHYGPYAFSKNGERTILALEEGKEDVIGQRLELSETDIRKLNAIYKCPTVKE

SEQ ID NO: 37822 - DNA, 2864 bp, DROSOPHILA
agtgaacggtattgcagcccaaaccttttgacgtaatgacgagcgccatgggaaaatccatttcagtagctggcttgaaaataacgcatgagttttcctctatgatggaaatggctctaagaatttcccgataatgactgtcggcttcaagatttatgtcaggataggtcagatcttatgtgatatacagaacataccaaatgcatcatcttcaatcatatatggtacagtgcgattgggccagtgataaatctgattgacaattccgtttcgagtacgaattggatgagcttttatgtccccctgataaaatccggcaagcagctccggatccttaaagagttcactaaaaacagtaggagtgaacaaaaaaatcacaccccatatctgcggaaacatggtggagacaggaaacaaactgaacgcttcattaacccatgccagttttactgtataccatgactggtctagtgggtatatttaattcgacatgcctatagagaaagagaacgggagcaattatattatccaacttttaactagatatttatattagataacgtacattagataccacgctaggtttcttatataaatgtatatatacaacttttattaataataggaattatgggaaatattcttttaggaatgtatagcatatcctaactgtgcgcattctcgggaatccacgattttctatctggtagagtatatatattgtcgctggatcactgtttattcttttcgtgaaataaaaagtgatttttcagttactttatatttatatttaatgcctgaaagaagaattgcacaaatgttcaaatattatttgcatactttcaggtgtagaagcttaaattgaatctcttcaatttattctggaagctttgaaaactcctggttacccacttaaaagaattcagtaacatgtaagcaaaccgactcgttaatgttttaaaacgactcaagtatttaataaataaacatgaataaaattcggttaaagcatctatatttgcgttatgatctctttctatttattacacctgcctggggcacttgtacatgacgttaagtttgttaatatccgactgggtcatttgcaatcgctgccccataagttcttcggcaccttcctgtagcggcacaatggtcatctctccgtttttagagaacgcataagcggtgtagtgtagtacactggagtaatcatagggttctccgtagtcctcgacggtttcattgtcgtacttgttgaagttgccctcagtgccctcagttatgttttcctcagcaattcggacatagtcatcgcgattccaggtgctttgctggtgatagaagccaagggcatgcaggaactcgtggacaattgttcccagacggaagcagccggtgtccagagcgtaggtctgcagattcagctgctgaacccggttgcgatagccaacatacgagtaacatcctccagcctccgaggtaacattcacataatattcctgatcagtggtggcctccttgaagaccaagcaagaactttgttctattatgcgaatacctcttagaatatggttgcgatgctcggtgtctgaatgaaaattgttatgaagttaggtaaggattattacagtccgattgccttaccaatatcgcgattgatgtaataatagacaatgcggtttggccatctgaaggtttcattgcgaagtccgttccttccctccggactgggcaccatgtcgccttcaatatagccagctgtcagttcaggatcggtttctatcctgttctgtgtggtgggagctgccgagcaggagctggccaagaatatgaccactaaagttaaggcccaggtcttcatgttgatggctctgcgatcagcaagttactgtttgaggcgcctagcttatggtgacaaagaggtatagttagctattggataatttatgacatttgctacagttaagtttttacgatcagacaaattgcccaatggtcagcgttatgatgttatcttatcggcgaatgatgcctgcgaaagtataatctcgtatacgtaactttaattcacggtttcttcttaagaatgtttggaattcccagggccaatgagataagatctagatctattcttatatagatatttaggcaattatattgccatgaatcgttgaattgtatagtaaatggatattctagacttgcacattcctaactgtaatttatcatcatttatttgagaaaatttgtaaactctgagctcaacacagcacacgtaagtaatatttcttcgattcccatataacaaaagctaacaaaccatgtcctctccctttgcgcaatttcatcttgcaacaccccaagactcaatcaaaattacaacgccttcccaccccgaaataaagaaaatcagtgtcaaaattaatccggaagcaaatgacaacgacgagcattctcctaattgcatttgtcaacacaaaaaagagattatatttatatatcgcgagtaaaggtgacaataatagaatgaaatttatcatcattacgatgctgtagaaatttccaaacagaaatatgataaaaaaaactcattctttgacggtggggcatttgtagatggcatttagctttctgatatcggtttcactcagctccagcctttggccaattacatcctcctttccctcctccaaagccaatattgtcctctcgccattcttggaaaatgcatagggaccatagtgcattacgctgccatagtcgtatttctcaccaaaatcattgacggtttcctcggtatatttatcaaagttaaactccatgccttcggtgatattctcctccacaatttggacataatc

SEQ ID NO: 37823 - DNA, 808 bp, DROSOPHILA
atgaagacctgggccttaactttagtggtcatattcttggccagctcctgctcggcagctcccaccacacagaacaggatagaaaccgatcctgaactgacagctggctatattgaaggcgacatggtgcccagtccggagggaaggaacggacttcgcaatgaaaccttcagatggccaaaccgcattgtctattattacatcaatcgcgatattgacaccgagcatcgcaaccatattctaagaggtattcgcataatagaacaaagttcttgcttggtcttcaaggaggccaccactgatcaggaatattatgtgaatgttacctcggaggctggaggatgttactcgtatgttggctatcgcaaccgggttcagcagctgaatctgcagacctacgctctggacaccggctgcttccgtctgggaacaattgtccacgagttcctgcatgcccttggcttctatcaccagcaaagcacctggaatcgcgatgactatgtccgaattgctgaggaaaacataactgagggcactgagggcaacttcaacaagtacgacaatgaaaccgtcgaggactacggagaaccctatgattactccagtgtactacactacaccgcttatgcgttctctaaaaacggagagatgaccattgtgccgctacaggaaggtgccgaagaacttatggggcagcgattgcaaatgacccagtcggatattaacaaacttaacgtcatgtacaagtgccccaggcaggtgtaataaatagaaagagatcataacgcaaatatagatgctttaaccg

SEQ ID NO: 37824 - protein, 254 aa, DROSOPHILA
MKTWALTLVVIFLASSCSAAPTTQNRIETDPELTAGYIEGDMVPSPEGRNGLRNETFRWPNRIVYYYINRDIDTEHRNHILRGIRIIEQSSCLVFKEATTDQEYYVNVTSEAGGCYSYVGYRNRVQQLNLQTYALDTGCFRLGTIVHEFLHALGFYHQQSTWNRDDYVRIAEENITEGTEGNFNKYDNETVEDYGEPYDYSSVLHYTAYAFSKNGEMTIVPLQEGAEELMGQRLQMTQSDINKLNVMYKCPRQV

SEQ ID NO: 37825 - DNA, 3192 bp, DROSOPHILA
tttcaaagaaaatcgacgtactcaaagtaatctcaacgatttttaatcgccagttaaaattaattacattcgcatttttgataatggaaattaagtcatcactaatttgggaactgttaaaactccgagtggattaacaagtagctcttgaaatttagttgatatgtgttgtttgaaaatagaaaataattgtagaactaaaaattgttcaataaaaatgggttctttgaaatttggcaattttgtaaaattgttaaaagttaagatttttaagctatcaaagttttcgtcttaaaaacattgtgtctaaaactgcatcgatcaccatcttgtgaattctaattttgcgatgcataagcctttgaaaatttgccgctgctcttggtatatggtaattttgcccaaacatgctcgcaaccggctcctgaggtcttttcttaatttcggatgaaacaatgcgcataggaagatattgctggatgttcgggatgggaggtgcatggaagagggcaaaccgtgtcgttgaaacgaacgagaatcgaatttatggtctaacaagcgctgtcaaaatgtgagaattgagtgcctgcgccgaggtcctggagctgccaggacgtgtcctccattccctgggcgcagatgcttgctagacatttgcatctcgcatataaatcgcattagcagcacgcaattactagacctcgacacatgggcacacgaaatgcggtttgggcctgtatttccgtgcagtaaaacctgaaacactgatagtttcttcccccgcctgaattttgtactttgccgataagaaattatctgagacaatgtcattaaggggtatggctttaatttacgcttctttataaatagttcagaccgcggtgacaatggcagcgtagatcaataaaaccgatctaatcgcgtcagtcggtggctgatatatgaataaatatatatacatatcacaattgaccaagtacatagtctacctgattttggatcacagcaaaatggggcacttgtacataatgttgatcttatcgatgtccttggagctaagacccactcgctgtccaattaccgcactggaatctaggggaactatagtatcctcgccgttgatagagaaggctcctggtcgataatgaagacagctatcgtagtcgtaaccaacttcgaaatcggtcacgactgtgtcggcatacttttggaaattgaattccttgcccggcactatgttttcgtagatcacgtttataaaatcatctcgaatggacgagctctgttggtgatagaatcccaaggcgtgcataaactcatgcaggatcgttccgggccggaaacagccttcgccgagcgggtatatttccagattcatttcctgcggggcaccttggtagccgacggcagtgtagcatcctccagacttggccgtaaccgtcaaataggccttatcctcatcggtggcttccctaaacctcaaacaagtgtgcagctccaaggtatcgatgccagtttggatggccttcttgtgcgccgtgtcaaagtcatctgatatcctgtagaccaccacatttccaggccatctcttttccgtgttgataaggccattgcgagccttgggagcaccctgctccagatttctttgttgctcctccgttagcatcatatcaccctcgacaaatccacctgcctcctccggatcgtagacacctgctggcaggggtttgccagagttaagcaccacttgcagcagaagaacatatattattccagacctcgacatcttgccagttgagttcctcgaactagactaataaagtggccacggagaacggctacctaaatataaaacacgcaggaaggctgcccatacaacttagattagatacaaaaaggcaaaaactttttcgcaaattgataaagacaatcgaaacgtccaattagatcaaggtttatggtatatcaccattttgtgaggcgcccatgtgaaaaccttccattagtcatgtaagttttcgataaatatctctaaaatacgtcacgggttgtctcttggattgccgcaattcacaatgatagatagggaattatatgtagaaatcagaaattcaagtggagtagtgattggattcttaagtgccgaacaaaataccaaaaacaattataaataatttaaaccactgctacccaagtatgagtaattcccccaaaatcgtcatttgattactgattattacccaacaacgacgacacgcgtaatcgttctgctgaacacaagagtttgcttggctgcccaaaaggtgttcaaattcaaagccttatcgcaatacaacgttctcttcgcttctccacactgggaactacatgataagccttgaaggcagaaaacatgacaatcaatgggttctcaattgcatgctcaataggaaagagactgacgtgccatcgcactcgaaaaattaaaaaaaaaattgaccgcagccgtaagtaatatatttagtcaaacaattagaaaaagactttgctcgactattaccagaatacctataaattttgcttaattcaatttcaaagcaaaaatgacaaattttatgactaattcaaatatattttgcctaaacatgatcagggcatctatacattttgttcaacttgcgaatatccttttcgctcatataaaatcgttgccccatattttcggctccttcgcggaggggcacaattgtgggttggccattcctggaaaaggcccttggcacatagtgcataacactttcataatcgtagccttcgtcaaagtcgtgccacgctgtagaattatcgttgttcacgaaattgatattgtactgcggatttatatttttccactggatgctgacgtattggtcccgattttgggacacatgctgatgttcgaagcccaaaacgtgaaggagctcgtggataatggaaccgatgcgaaagcagccttcgccaagtgggtaaatctccagatttaccacctgtgtcttattcctatagcccaagtgaacggtattgcagcccaaaccttttgacgtaatgacgagcgccatgggaaaatccatttcagtagctggcttgaaaataacgcatgagttttcctctatgatggaaatggctctaagaatttcccgataatgactgtcggcttcaagatttatgtcagga

SEQ ID NO: 37826 - DNA, 1192 bp, DROSOPHILA
gggtagcagtggtttaaattatttataattgtttttggtattttgttcggcacttaagaatccaatcactactccacttgaatttctgatttctacatataattccctatctatcattgtgaattgcggcaatccaagagacaacccgtgacgtattttagagatatttatcgaaaacttacatgactaatggaaggttttcacatgggcgcctcacaaaatggtgatataccataaaccttgatctaattggacgtttcgattgtctttatcaatttgcgaaaaagtttttgcctttttgtatctaatctaagttgtatgggcagccttcctgcgtgttttatatttaggtagccgttctccgtggccactttattagtctagttcgaggaactcaactggcaagatgtcgaggtctggaataatatatgttcttctgctgcaagtggtgcttaactctggcaaacccctgccagcaggtgtctacgatccggaggaggcaggtggatttgtcgagggtgatatgatgctaacggaggagcaacaaagaaatctggagcagggtgctcccaaggctcgcaatggccttatcaacacggaaaagagatggcctggaaatgtggtggtctacaggatatcagatgactttgacacggcgcacaagaaggccatccaaactggcatcgataccttggagctgcacacttgtttgaggtttagggaagccaccgatgaggataaggcctatttgacggttacggccaagtctggaggatgctacactgccgtcggctaccaaggtgccccgcaggaaatgaatctggaaatatacccgctcggcgaaggctgtttccggcccggaacgatcctgcatgagtttatgcacgccttgggattctatcaccaacagagctcgtccattcgagatgattttataaacgtgatctacgaaaacatagtgccgggcaaggaattcaatttccaaaagtatgccgacacagtcgtgaccgatttcgaagttggttacgactacgatagctgtcttcattatcgaccaggagccttctctatcaacggcgaggatactatagttcccctagattccagtgcggtaattggacagcgagtgggtcttagctccaaggacatcgataagatcaacattatgtacaagtgccccattttgctgtga

SEQ ID NO: 37827 - protein, 261 aa, DROSOPHILA
MSRSGIIYVLLLQVVLNSGKPLPAGVYDPEEAGGFVEGDMMLTEEQQRNLEQGAPKARNGLINTEKRWPGNVVVYRISDDFDTAHKKAIQTGIDTLELHTCLRFREATDEDKAYLTVTAKSGGCYTAVGYQGAPQEMNLEIYPLGEGCFRPGTILHEFMHALGFYHQQSSSIRDDFINVIYENIVPGKEFNFQKYADTVVTDFEVGYDYDSCLHYRPGAFSINGEDTIVPLDSSAVIGQRVGLSSKDIDKINIMYKCPILL

SEQ ID NO: 37828 - DNA, 14779 bp, DROSOPHILA
caaaatgctaccccataatttatgagccacatgaagaccaccgccatccccgatcgtcgtgcgttcattttctgcatcacttccgtttccgccaattcccctcgacggccatcgcattatgttgttgaacattcggcttggtgtcatcgacgacccgatgtcgactgttgatacaaggcgtctgatatgggtaatcacgggaataaatacactcccggccaagtctttatgtctcgcttgtgactggggataatacagtttttaatacagtcacattcataactacttaaatcgtcagattgctcacggattacactttttagtaggatgatttttcatattaattaaaaaattcaaaattttttagtttcttgaagaaagcttttgaaataatttctcatagtgaaattgctttgtaatgctactggcgccgatgtatctacacaccacctaatcgcaacaacagctcgcacacattcatgcatggacactcgtagtcggatgaacacaatatttgtttaattagctcgtattaatgccgttgcaagtgcaaatagaggtggcagatcattatgggagacgccaaagagccaatcagccattgttattggccattgtagtcgggttggccactaaacacaccggaactcaccgcccacaccgcccatagcgccccctcttatttcgactcctgtgcatttccaccgatgacccactattcgattttcattttcatcggctattgattcagaaatcatttgcctccgcccgcaacaaatccgcttgtgaattcaattgtggcgcttataatattgtgcaacgactgccagcaccacgctggcagtttaatgatgtgatttctgtttttgtgcactggggattatggcgagctgggctcaaaggttgaaaggaattcactctgagaaacatttcagatcgctcagcaaacttcgttcacattgttactcacttttccgacacgcacacaatcacagtcaaaatggcctgcaaaaagaaaaccaaactgtgggaaccaatgaccaaggatgaattgaagtccaccacacaggcgatgctcgaggagggcgccaggggtttaaggacgatttctacgcagcagaaaaagctggtcaactttcagtcgttcaacatggatgagtgagtggaaaattatgctgtttagggatataaagggtatattgggaaaatgcgagcagcttgaggtcttttgtttcgatacccaatcacacctatatattgggattgtggattactgtgtgatctttcaccttactttacttttccgcagtccccgttacggcatttccctaatcgaggacaacatggaaccgcccatgttgtcgagctacacaaggcaatactcccagccgtatccaaatcgttgtaagccctttgttcaaaagacggaaacaccagatcccatattcaatcgaaggccgaaaaacgattttgagtttaccacaggactggattttaagtttcttgatgatcacatgcacaatctttccgaatcacgcaagaaagtcaacttcttccggcaactgaggtaagaaaaataatcttaattttaatttataatattaaaaatttctcgtgatacacaggaatcaatcatttcttctgtattgacatggttaacaatttttcgagctaaaattacaaaacaaaaactattaatttgtaacaatttgactccatcatcggcaaagttacgcaacgtggctcctattttaagagctttcagttgtgccatgattataaattacccctcattatgttccgggaaaaatgtgtcaattgcattttccattaccccttcgttttcgatagaaatcaattaattttgcataaataaactcgattggcagcgtggtcaggggagagccatgtgcttgactattattaggttatagccggtacacttttcttggaaaaatagcaagcaaattgcaattaataatgcaaaaggcagcaagccaagtccgatactcggccattgctgcgatattcgccgcgggcactggcattgctgccaatttgcataaatgctagaagagctctcccgttggccagtgggacgtcgggcaggagggtggtgtcaaactaatggcagtctatgacagggatctgatttattatgcacggtaattagtttggcctccttagtgtccgaatggaagccaataaaccaggctgacatgccgctgcattgattttgccccgaggaaagcgcgcataagcgatggatttccttctaccgtccagcaccgcaagcatcgccccaatggagtggccaaaacataacaatctccggcagacaggagtatgaaagtcggtatgaatgttccgaggtgtcagcctgcggggaaaggagctgagcggactgttgcctgggcattgtgactccacaaggcatgcagaggacacgttgtccttgcgctgaagctgttcatcagaatccttgtagtgaacttttgtgttttttttttgtgatttggaaaataaaacagagggcatgcaattttttatgtttcccgaaaactaaatcttatagtgaaatcatttttaaatcatttaagaataatataagaatgcatgttgtacctattaaatttaaattctcaattcattcttaaatagcttgaaccatttcaagcaatagaggatatatggtaaatcaaactacgataatattcccatgaaagaaggtccatctatgcttagctcaataatctgaaaatctgcaggtaactggtttgacagtagagtgactgggttgagtgaaaatcaacccgtgttcttataaaaatcagttttctacgacagtaagtgaattggtcttatcatcggttttggcgcaaacaaaaaccagcttgcttgcttgacattttggcacattcctgccagacgcctgcccacattcgtcagcccgaaggacaagtcagctggcaaggatatatggagcggggcagcagtctggaggccgataaaacctgtcccccaccgaacaccactgataagagccaacattcaccatagcacatgggtcctttcaccaacgagtaatgcagaaagccaccacactccaatcaccaacaaaagccggctctctcatgtgcgactgcgttgctctctctcgggttatccttcggctctgataagaccctgcttcgggcgatggccgaggcccagttcgggtcacctgctggcgtagctcgttgcccaaagtcagtttactcgggagcgcggcggagttcgtttagcagcgggccaacggtgcggatacttgacttgggccagagctgccaactgaatgtgtgaggtgccagtgaccacgaggacgagtgctaatctcgacaatcgggctgtgttatttagcaggcaagcggctgttctaccgcagatcaaaagtttcaaaacacccaaatgtgtcaagcaaagacggctcaaacagaaataaaaaaaaaataaataaataaataaaaatacatatatgaaacccagtcagagcagagctgatgtgtgcgagtgcatgtgtaattaatttttggcatttaaattggccgacaccggggctttaaatcaatttgacaaatttgcatttttctgggcgcaaaaaagggaagcccgagcaagggcaatttcatttacaaattacaaattgatgtggcgcccgtggaagggcccgaaaaacagcagcaatcaagggtcgtcaaagggggattgaggatgaaggacaacgagggaggcctgccaaatgtccttacggcgtttccttgattccgttttcgaaatcgtttgtctgataggcagcaacgtgtttggctcggaggattaagtggattacgggggtcgtcttaaggattagttcttggaaatgttcgggctatcaatcgacgggtatccttgtggagtcaacttttaaaccagcaccaagccccgacttttaatactaaataagtggatccaataagacgtcgatatatttgttttcctcatatcgtatagcaatacaagaagagacaattatgtttaaatgggtttgaataagtttttaaatgtgtataattatgtttttattaatatgtcatttcatttgtttatttttttttttttgttttcacgacaccttcttaatggccttattataaagactgaaatcattatttcccttttcattctttaaatatcttaaaattcatgtaacctctgtaacttcttcattgccttggaggaattaatgttatacgacaacttgccgacattaaaaatttcataactgattaaaatactttaactttcatattcaaacccatttctttttttacttgctttatgtggtgcgaagaaatctcgcatttacactacaacgaagaaagctgagaagaggaaaatggaaaatcggggaaagctgagtggcagcaaggagtaataataataataggaacaaaataaaaggaatgagccaaagaaaaatgtctgaaacgtgcctcgtatgcaaatatttgcaaaacgcagactaataagtggaagaaaagacaggcgacaaaagcggccggggacaatgggccatgccaggaatgagactctcgacgaatgtctaggtgtcaatgtgccgggggcaagttttgtaccccccttcttaaaaaaaaaaatcccccaggttgtttggtgcatatgaaaaatacgccacttttttcataaattaaagaatcatttctcccccatttataacaataacagaagtctgtcgacaacctcgacactcctaaaaaattctcatgtgctctcgccctcaaatgggaaaaatgaaataaatttcattgcataattcatggggcatcggggagcaggggcaagacagccgcttgccattttgtatggtcataaatcttttggcatatgggctgccatttcgcatcatcatcagcagcgagaaagaaatgtgaaatccgtaaaaagcacacatggaaaatatttaaaaaattaaatttttattgttcttcctcatcgttagccaaatacccataaacaattcatcaaaaagggagcaagcaaacgaaaataaacaacagatattgtttacaattgcctaaaatggcaagagacaaccaaataaaatagtttgcaaattcattccatgacaagtgtctaaaacaataagcacaaaacgttttataactccctctctctctatctcaaaatacaaacaatgaacggcaacggcaccaacaccaagtgcagcagcagcagcaacaacacggcggcaacatcaacatcgtcagcagcagcaggttcagtcagtcggtcatcaacgaaaacaacaatgctggctacaactatgttctatggctaatacaaaagctacaaacaacaaatcgccaacaacaactaagccaaaagttcgccaaagcatttgatgctaaaaaaacaacaagaaaacctacacaaacagcagcgcagcagccacatcaacattggcaacacttttacgagttgcaaactaccttgtacaacgaatttttattattgcacaaggtaagccctggccttttgctacattttatttagagttcactgtagggggcggcaaattgatgtccttggtcaccttttgctggcaaatcgagcagcaaaatttaatagtagatgctccatttttcaggggttgacagaacctgacctatcgcaatttcagatgagttgaccgtgcacagaactttgttcttttctgcaaacagtttgtcaggaggagaggggcggaatacctacaaccaaaattacaataaagtaaaatgaatcatttaaaaaaatagatttttatttgcgagagcagtttttgggtgagaaatatataaaattattcaaatattagggatagttttcttattggttgctttcaagacctgaataaataatgcccacaattaactatgacatatggtcttcgtttgctaagctgtgggaaaaagttccttactgtctaccatttccaagagaaaactgatagttaataattaaagtatgtgccctcaaaaaccataatccaaaggccaaccctgacttgccaacctccttataatgtgacccaaaacttgtggccaaggaaagtgctttcaccgcactttatatattggccgaggcaattcactcgctcgcagctcaattagcccccttatcaggcagtctgtagttgggatccgggcaaatccccgtaattaaatgcaagccacatgcttggctgactaacccacatcctgcagcagcagccaccaccgccaacacattccacattcccctcgaaccgaagcacttgtccgacatacatcatctcgcaggcggcggaaaatcgaaagaaaaacgctgacaggcgagcgagtggaaaaagttgttcaagctaccagagaaaatgccgttcagctgccgcatggcaatccccgtttaatttttcatggctgcctcgctcaaagtcaaagcaaacacgagaccgaactaaaagtcggagggctatgaaatgcatatgcatacagtaagtcatacttaacccatcgcaaacacatttcccggcactcaacttggattttgactttgctcatctttcatctcgtgtccaaaattcaaaattcccatacgttgagcgtgaaaaatggctcgacatgggcaagagcatccatgctcccccatctccgctgacctgccagccgatcaaatatttgcatagtaaatggtttttattattaactgtgtaaacctccatctaagaagctccatcttcgcagctgctttctgtttttcgctggtgtccaattttcataaaaaaaaaacagcgtaacaaagttgttaaaatatttgccaaactccgtttaagtgggctgcttagcctgtgttcgctggtcagcagttgcccatccaacgtatacgttatacacaggaatcaattaaatcatctgcatgcttttaattaaaattctcgttgagttacataattgagtcagcccaattgttccatatctttctttgggtatgttcgttttatgaagaagacaaatgaattcaaacataggtgctgggaaactgcttaatgaatttttacaaaaacaaaaacttaaaaatgttcaagatgaatgaccttatatatattttttgttttgtatatttaaattcgtgttagtcaacttaaaactcttgaatttataaactttgtttcccttttaaatatctttaatataaaaaagcatttaacaacagtgatgagtataattttgcgtatcagaaattaaaatagcaacataaattattggatgctaggtagctcagagtcgttaagatctttttgaacccatcaaagttaacacgcttctgcccacttttatgccatgccccttgtggccagccgttttaatttttttccccatttctgatccccaccaacactcacgtaaataaagcgcgaaatttaaagcttgaatctcattaaaatggttttattaccaaggcaaatggcggtgggaaaagggtcgcaatggttggggagggatgcgaaatgcttccaattcgttacacatttatttttcacccatccatagtttcattccaatggagtcgacgctgcgggtgtcaatttcattgcacgctgctcactttgaagttggccaaaaggggaagagattgtggttgggtggagtggggtggtgtgggtggtgtgtgcaggggcttgaagtcgagggagatacagttgccttagcacaattgaaatcgatagcagaagagtgaaaaactacggggcgtgttgggaaaaccgctcaaactcaatttggaaccttccatatatttgcgctcgtccttttttggttacccattttccggaggaggggcgaaccaataattttcattccaacttggcattttttggcggctgccagacgcagcacaagcagatgacttcttgcctgcttcgggaggggattttccaaaggcattccagctgccttcgagagaaaaaaccgtttaagtggaaaattactctaaaatagacacaaaatgctatttgtggatgactggccaactggcagcagggggcatttatttctcatggtgaatcgaacggaaaagtgcggtaaatgggtgagaattttccgacctgttcctgacgtcatgaactggtcgttgtgccagccaatgcacttgggttgaatgggtttggctaagtggagtggaatcgatggaacacatgcggcagtcaataaagacgtttggggataattcaaagcttgcctttcttaaacgagagtaagtgtgcttaccgaaaaatgttattattatatttcgggaaataagcgtattacacaggatcaaattaaaaactaaatatttcttgctctgtatgcagctcaatgatatgcttctctagtgaaaatgtgttttccaaatgttgatgtaaatgttacgtagtcttatcccacatccatctccaaaccaattggatacatttaatcggcgttcttttggcagcttttcgacaaatatttttgtacgtttttccatttctcacatatatactcgaaacaacaagagcccattaaagcatcattcagccagtgacagcttcgtttcgttccttcgatttttccacttgacagttcattttgcagtgagtgacatcagcgtaaaacaaatggcagaaataaagaaatgcccagatgcagattttaaagggccataaaaaatgcagcagatccaaaatagttcaggcagaagtggtatgcgatgagccatttaattgttttgggagtagcagtggagaatacaagttagagtaaagtgcaatttttgtgttgacacttgtctgtagtgaaaagggagggcagagtgcagctgcaacaatcaaaagtaaatacaaataacaagttttgtgaggcagccacttatgcatgccccatgtcccatgtcccgcgtcccagacaagatgcgacactgaaagagacggcagctgtgaaggagactgagacggcagactgggctcaaaacaacaaggcagacagaccgtgactgcacatatgtaagttgaggggcaaaggagccggtgcagaagcatgagcaggctcatcatcatcctcattatctgcagccgagcaaaacaaatccttatgccactacatatccttgtgcgcttgtctatgtcctggcttatgacccctcattcgtccttcgttcattctatcttcctggcaaagggacaatgcgattcttctgcactttttcctctgctcgctcgtttgtaagtaaaatccttttggctcagcatttgtatgcccatcataaaaaggacaacagaggaaattgtccctcccgcccacctcttggtctgcccacagttccaccattctgagtagttatttaggtaaatatgaatacgtgcatgtctctgcgaaatgcaaaataaacccgaaatgcacttccgccttaatgcgttttgttttggacaagggacaagccgaaatggatattagtttggttgatcccgggaagccctggtaatgccaatccccccataattgcgtgctatgaccccataaacccgggtccggatcccggatcggggggtaaaatgtgagaaattgctgcaagttggcagcttttacggcacgtacccgactgctgctcccaatttccgccagaaatatagcaccagcagaagttcgcctggaaatgcaaagtctcgggcattgcaatatgaatggcactcaccatacggaaatgattttgcaaagctgtgggaattggaccccaaatggatgctcgtgggatcccaatggcaggcgtatctgtttaattagcaattttagctattattggattgatatttgttgctttgccttagctatattttggggccttatatttttaagtgggaaatccatttcatatggttatataaatcatattagatattcaaagactgcataattcaaaactaactcggccataacagcactcactttattcgacatttatgtcagctggtgtttacgttaagtgccccttaattttgaagctttcccacctcgtcaattctattaaatctcccgcaagttgatcaacgacatgtcccggctgcataatcaagttaacttctgccaggccagttttcattgcgagcacctgcaaaatggtatccagatgggcgaaggatggggcaaggatgtcctcatgactaactacgtttcggagtcacattcgcacaccaactcacttcttgctcgactaattcaggttggtcgtgcgtgttttagtttctgtgtcaacgtttcgtcgtaattttccctatctaaccgcatcaagtgtgtgtgtgtgcgttttataggggtatcctgcgtcctacatcctggcattttgctcatcgctctcattccgctgcttcattccgggcttagagactgctcggttctaccaattaagtaaaaaatataaaacgctgtcaaggacaaacaaatgtgcattttaattaaatttttagcttgagcgcgtgccatttcttgccactcatttttgctggctcctttgcatctcttccttcttctcgggccatttaaaaatttgcgaaaatgcgttttgcatgcaatggcaaagggaatatcaagtatacgccgtgcagcctgtcataaatcactttgcccgaaatgctaccaaaattgtgcgtctgctagatggccgctgggcgtggcctaatgtaacactaactgtaactgtgccaaatgcccaagcactaaataaaatggctacgtgcaaagtttttgtccaaaagcagcagatgtagcagcaagtagcaaatacaaaaagaaacgaaataacaagcaaccagcagaacaaacggtagggaaaacatacaaatggaaacaaaaatataagcaacttgccatggagtgaaattccatttcccagccaaggagtggagtggcgtgaagtgataaagcgtgccgagtaagagatacatattaattgctcttctgccacaggagcaccaacaactctgtctgtttttgtgttgaaatgctaaacagcaaaactcgtgtttgttgccgtcgctgggaaatctgaaagcaagcagagcaggaaaagcggtggaaactcgagcagaagctcgaaagaggagacaagaccagatggctgtcaaggatcgtagttccaatgcaaccgacgtgagcttcttctgaacatacaaccgattaaaagtagcataattcataaaatatttaaaagtcaaacattttgaaaagttttactttaatggaaaatgttaaaaaaactatctcttgctcattttgatcatgtagtgatagaatgtgttctacatatttccataagaacatatatattatataagaaatcatagtttcgtattttgatcataatgtgttataattcgcagtaaaccaatgttatttataatatagctcaatggcgtgctctgaagattatatgaagattatgcttaaggcaaacttctggctgctaatttacgcagccccaaagttgacccaagatgcctgatttaaccagtaatcccctgccgtgattccgcgctcctcatttggccatattcaagcctggctctttgtcgcatcaaattcaattcgcctcaatcaaaacttatccctttcatggctgccacaaagcatttgcttttgccctaactcgctccattggccatgtcatttgcaattgcatcattgcggaaggagtcattctagtcctgtcgtgcttggggttttcccttggcgtctctatcgctgcaacgttgtcttgttgaattatagcacgctacgcacttaatcatttgcgttttcccagccacatccgaaaagtttttgcatgtcttgggtttagtcctatgctaagttgttgctggcaggattgctcggcaaccggagtaaccgcaagggagcaggacgcgaatgttgtcctagtcagagtcttagttttagttttggttatttgtgtgcgtgttgcgagtccttgtcaaaagtaagcaagtgtcgcggcggttatctgccatcttcttcccaccatttcggagaccgggactccccctagttttccgtttggtgggtcaacatttcacagcgccagcaaccacaatgagccacttgaggaaagtttgcgaaaaacgaaaacgaatttaactaagaacttttgacgtttggcgactgcaaccgcagaaaacattttcactcgggggagagtcaatagaacgggtttagacaaaacccaaccgagctgcgtgggaaatttacactaagcgcttcatgtgttggccatgggtaatcttgtggaagtatgtatctgctttggccaaaacttttatgaatatacacttttaaatggcaatgtacagttttttccattattatggaaagtatttgggtatataattcaaaattatttgattggtaaattagttttttgtccgaaatatatattcagttcttaagtttattgtattttagttaagttaaattttagttccagtttagactggactgttttaggtgggcatagttccagtgtagagtggactatttaagttgggcttacgtgtcgtatgattaatattaaagttttcacccgagtgcgaattaagctcggccagtgaaagtcggaaaacataagtttttgtgtggtagtgagcggaggaaaagccgacggcagtcaaagacacgcaaaaggttgccccagtatggacagagggagaacaacaaatggcggtagaggcggggaaatgttgccgactgttggcagcgtttaaatcagataaacactctttgcttttccttcgtgttgttgctgatgtttttcttggtattgcgttgttttttttttatgcgggtatgtgttgtttgggggcgttttttgggctgagggtgtgccaatctctggctggtgttacaaagctgcaggcggcaacttaatttctcctcatttttgctgctggcaaaaaaattcagaataaataagacatttgccgtatttattgttattgttgttttcttgctgttgctgctgcagattttttttatcccagccctccaaaaatctcaagtttggcagaagccctttactccccaaagagctttcttttttatagacgtggaggttcttttttgctggtgtaagcttattaattcataagcttagttctttgtttaacaatttttcatacatcatgagttttcacgttgacggaatgctcaggcaattgcgaagagaattcaagacgggaaaaacactgatgataatgcgattgcgaattgattacagctgagttcattcgacgtatggaaagggaatatccttttgaacagaaaacaaatacatttaaaagacgttgactttgattattcattcataggaactttttacattttccagatttttgattagctcaacatttatacaaacaaaattggatagaatgggggatgagcttttcaaaaatatttatttggctgaatagaaattgtttattatcgtcaagaatatgtaaagggtgtcgccgtacgttcaaaataacagcagttacgcttttatcagacgttacattccatcatcaaacaatcattgaatgtcaaggtattgaagaacatctatcaaacgaaatttaacaacatccgtcacgatacgttgctcagatacaaagatactattgctgtcagggtcgccaatccactttttcggctttcccacaatcgcatttcctgatttcagactttcaactcactgcgctcactcaattgcaaaccatatttcaattttattttattatcgcagaacagagcggatacagcgatatcctttacttttattgtattataatgcagaccgatgggcgttcacaaggcttcgtccttaaaaccgttgccgtttgccatcgttccccttgcctacgcatatactgtggtccaaagatctgaatatggctttttgggccaagttattgatagttatgacacgcccacacacacacagatgtcggccctctttttgatttgaccacaattcacattttttcgtcgctcgttctctttcttttgccaatattcctctcgatctcgctcggcaatacaaaaattttgcataatttattaggaatatttaataaaaaatgccacaaggcaaacactgatggccagggagaggggaaattcgggcggtagtcagttggcaaactttacgcttcgttagcctctgtttcatagccccatctctcttgccccttttgtgtgccacatttatgctttgttttttttttttacaacaccgatacatacacccacacacacacacttacatttgcctgcatttgcaatgtagattcacttttgtgaatttatggtggaaaaactcacacgacaatgcaaactggagaaggaaagaagctctgaaagctcgcctttcaagtacactcctaaaaaatgtgtaatagtaataaattagcgctagaagtgttgtattgcattgtttgtttttttaattgaaatgcttagttagatacttacaaaaagtctatattttatgggtatttctgatagtttattaatttcctttaacaaaataacaaactctagttatttaatgcaatttttaaacttttttaattcctttaatatgagcatgaaaaacaaatagatgcaaaagagagtatcttctgtcataaaaatgtcaattgaaacccatacagttagtcagccttagttcaatt

SEQ ID NO: 37829 - DNA, 1158 bp, DROSOPHILA
atggcctgcaaaaagaaaaccaaactgtgggaaccaatgaccaaggatgaattgaagtccaccacacaggcgatgctcgaggagggcgccaggggtttaaggacgatttctacgcagcagaaaaagctggtcaactttcagtcgttcaacatggatgatccccgttacggcatttccctaatcgaggacaacatggaaccgcccatgttgtcgagctacacaaggcaatactcccagccgtatccaaatcgttgtaagccctttgttcaaaagacggaaacaccagatcccatattcaatcgaaggccgaaaaacgattttgagtttaccacaggactggattttaagtttcttgatgatcacatgcacaatctttccgaatcacgcaagaaagtcaacttcttccggcaactgagtcagtcggtcatcaacgaaaacaacaatgctggctacaactatgttctatggctaatacaaaagctacaaacaacaaatcgccaacaacaactaagccaaaagttcgccaaagcatttgatgctaaaaaaacaacaagaaaacctacacaaacagcagcgcagcagccacatcaacattggcaacacttttacgagttgcaaactaccttgtacaacgaatttttattattgcacaagttgatcaacgacatgtcccggctgcataatcaagttaacttctgccaggccagttttcattgcgagcacctgcaaaatggtatccagatgggcgaaggatggggcaaggatgtcctcatgactaactacgtttcggagtcacattcgcacaccaactcacttcttgctcgactaattcagcaaaactcgtgtttgttgccgtcgctgggaaatctgaaagcaagcagagcaggaaaagcggtggaaactcgagcagaagctcgaaagaggagacaagaccagatggctgtcaaggatcgtagttccaatgcaaccgaccagttacgcttttatcagacgttacattccatcatcaaacaatcattgaatgtcaaggtattgaagaacatctatcaaacgaaatttaacaacatccgtcacgatacgttgctcagatacaaagatactattgctgtcagggtcgccaatccactttttcggctttcccacaatcgcatttcctga

SEQ ID NO: 37830 - protein, 385 aa, DROSOPHILA
MACKKKTKLWEPMTKDELKSTTQAMLEEGARGLRTISTQQKKLVNFQSFNMDDPRYGISLIEDNMEPPMLSSYTRQYSQPYPNRCKPFVQKTETPDPIFNRRPKNDFEFTTGLDFKFLDDHMHNLSESRKKVNFFRQLSQSVINENNNAGYNYVLWLIQKLQTTNRQQQLSQKFAKAFDAKKTTRKPTQTAAQQPHQHWQHFYELQTTLYNEFLLLHKLINDMSRLHNQVNFCQASFHCEHLQNGIQMGEGWGKDVLMTNYVSESHSHTNSLLARLIQQNSCLLPSLGNLKASRAGKAVETRAEARKRRQDQMAVKDRSSNATDQLRFYQTLHSIIKQSLNVKVLKNIYQTKFNNIRHDTLLRYKDTIAVRVANPLFRLSHNRIS

SEQ ID NO: 37831 - DNA, 11368 bp, DROSOPHILA
ctcgggagtgagagcaatcaatcgagtgcaacacgttctaacgatttacatgtcaagttgacgagatttgtcctgttgaacaatggactggcgcttcgtgtgtgtccaggtgtcccctcatacttaaatgcctgcccatcgatttcggtttcgatcggggtttcgctttcatttgtcactgctgtctgacaccttgttatgcggagatatccatcgagggcccgaatgcgaagacttccccctttttcgagctaagcaaacacagttgcggcagtttcaaaatttcgattatgctcgcgtgataattatgcatgcaatcgtaagcttccctcctgaagtagtttgacatacgcagtataaaatagtattgggtctggagttctggtttggttcggcttggctttatcggtcgacgacaatcggtctcattgtttccgtttcccaccgtctggctttgcctttgtacgaattgcgtctttcgaatggccccatccccatcccaatccgaatcccaatcccccgtcccctccccattctcgagccgaagttgtccagctgcggcagtaaattttatggttaactacggtccgacatttgtgctatttaacctttttgtgccattgagcttcggggcaaaagatccccgatccacgtgcgactctgtttgctctgactctggttcatatgctaatgggtgtctggtgggggcacaaacaaaaccaagtacttcttacttacaacctgtagtttgaaatttgagttcctggacatgttctccatgattttaaatctactaggtatgtagcaagcttagtcgcacaattcacaacaaactctggaattgacagacacaaaactcataatttccttatacatatcgagcgacgccaagtcacatataactcatttgtagaaaataagcagaaggcttgaaatttagcaaattcagtttttaatttcggccagtgataggaaatcctgccagtggaaaagtgcaaagatggaggagtattcgcgggaaccgtgtccccatcgcatcgtcgacgactgcggaggagcctttatcatgggctgcgttggaggcgggctcttccagggactcaagggattccggaacgcaccacagggactaggacgcagggtcgccggcagtgtggctgccatcaagaccaaatctccggtgataggtggaagtttcgccgcctggggtgcagtgttcagcattgtggactgcagtctggtccactttcgccaaaaggaggatccctggaactcgatagtgagcggagcagttactggtggaattctggcctcacgcaatggagcggcggccatggctggaagtgcaattatcggtggcgtactgctctcaatgatcgagggcttaggcatattttttacacgtttcgcggcggaacagttccgaaatcgtgaaccgcatatcatgcctgatgccaatgaaggatacggtgacttcaactcttccggatttggatttccgggtgctcagcaggccactgcaactagctaaattccgatttttcttgtctgggtatattaatacgtagtcctttttgattttcataagtgctagatttagcaatattccatttgaaaaattcgatgacaataaaatatggacaaaattgcagtatttccatttaagctgtttttgcaaaggaaccaatttattaaatttcaaacaatttaacacggatttataattattaaaatacaattagctgccgtttgcagctcgttttggaagaaggaacaaatgcaattggccctcttatcgttctccgtgttaattcattcgtattcataatcattattgcctcaacaggtagtaggttgtttcacacttgcccgaatccacgacaaagacacctgacacgtgtcataggtcagcgtgagatattggcaaatgtttacctgttccagatgactacctgcgatgctgcgccggcgcatagagtcaagtgtccggtcggcgggtgtggccactttacaacctgtccactcgagatgaccgcggtgttctggccattagactgagtgaggtactgagtggcactggctaccggccacatgtcctgctcctagctggaaagtctcgagcgcactcaaatcagaacttttcccccgcaaggcaaaaaaccaaaggcaacgccgatttcccagcaacacatggacggtgggaagatgggaagtcgagcccagttataaaatcgtgggaaaacgccgcctacaaggaaatcccttttcggccgacatggaaatttcttgaataaatggcccaaagaacatatgtaactttggctcgtgtgttttttttccgcgagcgccgactactcgtaatgtgtgcgagattcctcgccttgaggaattccgcaacaaaacatttggacacgcctggcgctacgggaaaagcacagcaacatcatcatgtggcccggccaggatgtgtgggaactggagaactggggaatccaaggagtcgcacctacgcgcatagtacgtgctccggtccggccagctcacacatgtgtaaccagtaccgccagtcctgtttgttttcccagctccgcagttggagttccgacatatgtgagcgggccaggagaactccctcatgggaaaacggagagcccagcgaagtcgaaggtaggaccaaggtgagagagactggcacatgggactttgaaggtacacagctatcacagttacaccgcaaaaaatgtcaactagtttggaaaacggaaaatatatgttgaacctcttctattttaaataattaagtatgtaaatggtatgaaagggtatatttaaatggttacgatgggttttaacgataatcgtattttacgaattttgaagtattttgtttaaaacaaacaccgttttgtttaacaccgttcaaaaatccattttatgtcaatatttttctaagtgtagataaggcaccaggccaaatagttcacaccttcgcctggacaggcttgagtttggtattgaaaatgggtccgaaacggggcatgtggcaagcacatgtttggcgttgaccaacaaaacacctcaatgcgagaaatcaacccaaatggaagatttttcgcatgctgcgcccgcatggcgctaaacgcgagccatttatcagggatgttgaggctaatagaaaattcaagaaatttcacagcgaaatatatttaaaggataaaatcttggtttgtgaaaacaaatttaataaagctgccaatcttaaaatccctaacgaacgaaattttaatattcgtttccagatatgaacaagaatatttttctgcgtggcatataccttcaattcatcttgagaccgaccgatgataacagatatgttgatctgatgctagccttggcacatgtcaatgtcaatcgttgaaccgcattcaaattgaggcgaggcgcattaaaggcatatttccgactttctggcacctttcaagctctatgcattagaatatttgcatttcactggagtgcccgttgaatttggtattcccaaaatcaggcgccaaaaatctcatgcatatatgacacacattttaattgggactgggacaagtctgcaggcagaccaatgcatttattacgcgacttgattttagaattcctaaaaagctactgctaggtgaataaattaggctccagcccccagaaaaccttgcctgagttcacaacaagttcaagggtgctacacagcaaaatgttggaatttaaaaatatataacaataaaataacatatcaataattcataacgataaaataaaaatatcaaaacgataaggattatgcataaaatatatttttttgtatcataataaataccacgtatttttcgtgctaatttggaattaagaatataatattttatctgtatcgactgtccattctacgttttcaacttgaagatcattgcaccggatcattgcaccaattagaaggtcgagttaggcactccaaaaatgtgtgcactgcaatagtttgcaagccaatgggcaatgactctttttcccatgtggcatgatctacggattgtccgagtccatttgcattatttcaaccgcatcgataatcgctttcaattttctactgccgcttagtatgcatgcggtccatttgcatgttttcggctgatgaaattgatgaaatcatcgtccagagcagctgtcgaaagttcttcgtcttcctagggcaaaactgcatccatcaatgatgacttcgtgatctgggacccgtcttttcttttactatcagctctgaccttatcccaaaaaaacggtaatcgcattcattaaagcagccatgtttacactcaccatcgaagggaatgcaaatcgaaattctttgaaatctgtctgaaagcttcaggtgataagacttaaatggagtaagagttctgcattgtcaaacaatttcttggaattttctggatgtggtaggttaggactgaaggccccaaaaaatcgatcatggagccatggagtattgacctagttgaaggtgacttaaaaaaagtgaattaagcgctctttgtgaaatgaaatcgcacattacatggtatgacccagtttgaccaactataacaatatttatataattctttcttaatttgttggtaaaaaatgatacttgttttattttatacaagttttttaagtaacactatgactctacttcctatatagcaatatgaccaaagagtaataatggaatttatcccaaaatcccctttatgttatgcaatttccttgataaatcagttatgttttcccattccctcattaggtggtttcttggccccaactactttttagctttgtttggcctgtgcagccgccaagggctcaactttgcgccttttcaagtcattaggctgaattaaacgcggcaaacggaacgcagaatcgaaggcaaatggcaaattattcactgtcaggcaggcgaacaacgcagaatgcaaatgcaaatgcaacggaaagcatggtggaaaagtgcaactgcgggcaaacaattgcagttactaagtacgaaaatattattgccaaatggtctcgccatcgattttgggcgcctgataagccaccgagtcagagtcaggcgagctgtatcggccagaaatccattgtggctgcggctctttttcaaggcgagtagcttcaggtcctaaccgccgtcaattgttgactttaatttgttttattggcgaacgacgagcgaaggagcgacgatgtcgataacgctaactaagcgggtcagggctgccggttggtttcatattgtctatgtctatcgaaaagtgggggtttctgggttctagtcaccatgggctatggttcacacatttagtcgccgctttatgggtgcacacgtcgtatacgcaacctgagcgggatttgcataacaaggcggtcagcgacaagtcttgatacctttaatgcctttaggaagtcactcgcagcgctcccgacccgaatacaacaaaaaaaaaaaaaagaaaagtaaacagcacatatctgtttacaataacaaagggggaaaaatatcgtggttggggctttcggtttagagtccgattccgcgtccaagtctccccaactactcgtatccgtacaatagacaggtcccataataattgtgcagtgtgttgcatggacccacttatcttttatgtaaattacctgccataacaatttcagactgtgactccgagtccaggtcgtcgtctactgttacaattcgggaagtcgaatcaaaggagaagtactttaatatatataaatgcgagcacaatgcaaattattgtcgaaatgtttaatgactaactgttgatgtcacgtcacgaactctggccaggttgccgactttcctcaacctctacagtacaagtccccagtcagtcggttcacgagtttgtaacggatttaatgtcataagcgggcatatcaggttcatcctggcatccgttaagcagatccccttggaaagtgccatgccgcagatgaatggcctctttctatctagattgggagctgcgtttattactactggggacagatgatcttctttcagtcgggaagttgaatgtaatagtggcttgccactttcaaagacaactataataagtgctcttagtcctgagagatgatatataataaattacttagactatgacatatacttacgatcgaattgaaacaaacttttaatataaatgtatgtattattatattattatattatattgtatattaaatttacaataatattatcgcatttttaatttcttttattgctttaaaaatattgatattacattacaattaaatcacgattagattagtcacgctacttgtttaatagtccacactctttaacttctatagcatagtcggcaatctcaagtggcactctacctaatcggcccctccttatcagctcaaagtttttttttcgttcttatcaactctccccttcacaccaacccactcataaccttggcagtttttcccacgcactcttatcagcgggcgtataaagaaaatttcatcgatcgatggcgctcagttcgcagggaacaggagcggagctatgttttgacctaccccaacatcgggatgccgaggattccaaggataccacggaataccaagcattccaacgatatatgaaccagcagctcagtgcgcacgcttatgttggcctggaacttttggcattcttatcatttcccaagaggcgtgtgaaaatcgatgccgttcggcgcaaaatgtgtaacgcagtggcgtaaagcgtaggaaccactggcttctgggtgcccgttagctaatagttgaggaacggagtcggagcctggcctggacccggacccggagattcactgcccctttttggagcgggaaaaatgttgacaatcccctctccctttgcagcaagtgtagcatatccacccacctagcagaaattatgacagctggaggttccaactcacaggtgtatataccctggaatcccccaatgcaaagggtgttttggtacaattgaaataaagctctgtggtaatactccaaaatggaagatttcgtgtttgggatagatatccttagtcattctaaaacttttacagagttatagaagaattgttttgcaacaataaacattctaatactcttcgcgcataaaaactttcaaaaaagtcaccatttatgctcaccgcaaactctttttttttggcaaaaataaattcagcattaatttaaagtcattctgtacaattggtatttcaacttgctaaactttcccgaacagaagctctagaaagaggtaccacttcgtcgactaccactcactccattaaattgccgaaaatcgggaatacgcgcattcgcctcctttgagatcctgcgcttctgtttcgctttctacaccatccgcaactcgaattcctgtttcgtgtcggtgtgtgttattggagtgccacgcccactcaacctgcgcatcccagtaactccctacttagccattagctgaatatttccgcgtgcgtatagagaaagtgtgtacccatttaattcggggactttcgttggtaggtgggattttgttttggggtggcactgggatgctgccacattccatcgctagtttagtatgcgtgatgctgttggccgttttggttgcctgttagcctaaaatgcgtgtcgctgtgataatgtgatgtgtgcagcgcctgtgtgcggcgatagagaaatgggggtggcagaaagtgggtgggaaagtttggcggaaaaatggtggtggacctattcaacgcagcgaccatttctgatcgcccgttacatttgagaagtaaaatctacgctatgtcgtgcacttgagccaatcttctctataaaaatatataaaatttaaatcccagctaacatttatttgaggcgaaggcaaaaaaaaagagaaaaatgtggcaaataggattatccaaaggagacagtttccggccggagtggagtgggttggccagggtgacggctgctgctcaagtgagcaactccaaatccgccactcaaccggcgtgtccttcaaactgcaaacccccaccacatttttatgctcagttttttaaaaatccctgcgaaacacgcacacaagtgaaaatgttgaattttggcgccttcgtcgaccaggcgagcagcaggaacagaatgcaggacatgcgttgccgggatgcgagagagccagagagaggaaggcatcaacccttgttgccataacaacagcagctgcgcgcgctttctatctctcactctctctcactctttcgctattcatctctctctttggcgatgaggtccttttcgcattatatgctgtctcaaggactctttagaatattttttaccctgacctcgttttcactctcgtttggcactctgaggccatctcgctcttcggaatgcgcaaccggaaatgtcgccttcgtcctgttgctgttcgccggttcaacaggatgctttttgcgtttgatttcagggacaaatataatgattgatggacccggttgctatggcaaaaatcccattgcgtgagggaatgtgccggcagtgtgtcagtgtgtggcagagcaacagctgatgcgggcggaaaacccccgcgctgtgggtgggaaactttccgggtgaggcaaggtcacagctgacagtcagggattcccctctgatataccaggaacgaaccttgccaaggaaaatacactttatttgctatgagcaattttttcgaataattgtatttgaattttattaaatgctatgccaaccaacaactgcagttttgcttcaaaaaaaagtaaatattaatatacaatatacacagtaatttcatttgaacttaacaagaaaaaaggttaagttttttgccatttggtacatttaattctaaacgacaagtggtcatacgattaggtaacccctgtcctggggcgctttattccccgccatcggaaaccgattagttgcccgccacatgacccaaaccgacccaaataattgtaatttatatgccaaatgccgaaaataaaatcgaaactataataaatgactgaccggcattaatgaaaacaaaaaatccgctgctggccggtggaaaccgagctgggactaatgtgaaatgcctcgaagagatttgtccagataaccagattccgtttttccagttgccaaatgttcgttttcttttttcattatttggtatattaccgcacacgccctcgcagtgaccacgcccacgtggcagcacctccgcctccattctctttattagagtggactgcgaagaattttggggagggagccgtcgaatggtagccctggtttatctatcacccacctggaaaggtcaaagttgggggcttcccctgcccccatcgattccccggccgacaatccttggtgatctgcacgtttcgctcatttggctaacgtgataataaagtgcaaataatatgcctcacacagttgaagtcgaaaacgaaaatttcagacaattgttggtccaggcaagccaactctcggtgatcttgcaactgcgatatctgccgctgctgctgttgctggttgcagcagcctgttgcaagttttccgcaatcgatgccacggcaacaacagaaacaacagcaaccacggcggctacaacagcaacatggcattatcgctgatggaaatgcacctgacgctggctatcacggctctttgctgcagcttgtggtatttgcacgacttcggctggggcgttggttgccactaaagcgaaaccgaactgaatcgcagttcaatccggctaacaaaagtcggtccattctaacgcactactcgccactcgtaaggttgtgggcagcagcagttgcaaatgtacgaacacttaaagaaataatgttataaatcaatgaatttatcatagaatcatagaattttatagaagatgaaaaataaaagaagttatatagtgccacttgcaacagttttaataacttgatagattggttgagtaggttactgtgcctttcgattttcaaaacttggcaagaatctaagcgaaattcttctcagtgcaagtgcaacaaccggagccagagcaaagtgcaacgccaacccgattctcggttttcgcccgcaggctcttctctcgacatttgcaaaaagctccagagctgccttcaactgccgctcgttatgcggcaattactcgacaaacaatttttacctttagccccaagttcaaatttcaaaatcaaaatcagcagcagcggcagcagcggtaaaaacctggacctatagccaggtaattgggctcctctcccccactcttgtaagatttcccatgggtaacctgttggagcggccgtccggcgagcaactgtaatcactcactcaagtcgggggatctgcaccggaaaacttgtactcctacatacgtttaaaataaatatgatttatatagatagatacttagggcgggcagtttacttttcaatttgatataaaaatcaatatataccttttttcataagcctttctgcatataagcgtaatttaatgatgaaaagcggagtagcccgactttttaccactaaacctagtactctatgcattttttttgctgtgttcgactgtagctgggggaaccacttgagcggtccaaggtgttagccagtcagtttgtcagactgccagagttcgcatagggacacgaacttcaaatcaaagccaggctaagtgccggtttgtggcccacaaagggacgccagatttgcatgtggcaggccgagctgggagctcttggaatgcggctggccatataaatagttatagattgttgcgctttttcggcagccttgccggcatctcacaggttgccttcggaagggcagacaacttaattgtgatccaccgcgaattgctgccggtgcatgtgcattggaggttttccatctgggaatttaggttgtcagcggaatgtgcacttcccatggccgcaagagctgaaatttcatttcaaaattgcaaaagctaagaactccatccacctcaggcgaaaattcaaatcattataatgtgtgttttgaggttgaagcggtagttctttggttatgttttcataactatgacattctcatttaccacctacttaagataataagtttaatatgacaactcacttacttatagttatataacttatagttttttctaatcatataataaaacataaaaacgcagcttggcttattcttcattcatggcaggaatgccttccttctattgaaaagtcatttgc

SEQ ID NO: 37832 - DNA, 1242 bp, DROSOPHILA
atggaggagtattcgcgggaaccgtgtccccatcgcatcgtcgacgactgcggaggagcctttatcatgggctgcgttggaggcgggctcttccagggactcaagggattccggaacgcaccacagggactaggacgcagggtcgccggcagtgtggctgccatcaagaccaaatctccggtgataggtggaagtttcgccgcctggggtgcagtgttcagcattgtggactgcagtctggtccactttcgccaaaaggaggatccctggaactcgatagtgagcggagcagttactggtggaattctggcctcacgcaatggagcggcggccatggctggaagtgcaattatcggtggcgtactgctctcaatgatcgagggcttaggcatattttttacacgtttcgcggcggaacagttccgaaatcgtgaaccgcatatcatgcctgatgccaatgaaggatacggtgacttcaactcttccggatttggatttccgggaattccgcaacaaaacatttggacacgcctggcgctacgggaaaagcacagcaacatcatcatgtggcccggccaggatgtgtgggaactggagaactggggaatccaaggagtcgcacctacgcgcatagtacgtgctccggtccggccagctcacacatgtgtaaccagtaccgccagtcctgtttgttttcccagctccgcagttggagttccgacatatgtgagcgggccaggagaactccctcatgggaaaacggagagcccagcgaagtcgaagatgccacggcaacaacagaaacaacagcaaccacggcggctacaacagcaacatggcattatcgctgatggaaatgcacctgacgctggctatcacggctctttgctgcagcttgtggtatttgcacgacttcggctggggcgttggttgccactaaagcgaaaccgaactgaatcgcagttcaatccggctaacaaaagtcggtccattctaacgcactactcgccactctgcaagtgcaacaaccggagccagagcaaagtgcaacgccaacccgattctcggttttcgcccgcaggctcttctctcgacatttgcaaaaagctccagagctgccttcaactgccgctcgttatgcggcaattactcgacaaacaatttttacctttagccccaagttcaaatttcaaaatcaaaatcagcagcagcggcagcagcggtaaaaacctggacctatag

SEQ ID NO: 37833 - protein, 413 aa, DROSOPHILA
MEEYSREPCPHRIVDDCGGAFIMGCVGGGLFQGLKGFRNAPQGLGRRVAGSVAAIKTKSPVIGGSFAAWGAVFSIVDCSLVHFRQKEDPWNSIVSGAVTGGILASRNGAAAMAGSAIIGGVLLSMIEGLGIFFTRFAAEQFRNREPHIMPDANEGYGDFNSSGFGFPGIPQQNIWTRLALREKHSNIIMWPGQDVWELENWGIQGVAPTRIVRAPVRPAHTCVTSTASPVCFPSSAVGVPTYVSGPGELPHGKTESPAKSKMPRQQQKQQQPRRLQQQHGIIADGNAPDAGYHGSLLQLVVFARLRLGRWLPLKRNRTESQFNPANKSRSILTHYSPLCKCNNRSQSKVQRQPDSRFSPAGSSLDICKKLQSCLQLPLVMRQLLDKQFLPLAPSSNFKIKISSSGSSGKNLDL

SEQ ID NO: 37834 - DNA, 2591 bp, DROSOPHILA
tttgtctctgctctgttgattttttggtagttgcacatgcggaacgagtgatttgtttaagacgttttgattgattattggtgcgcatgggccaaagtgacgacagaaatgccgagatctttgcacagcagattttttttaataatatttgccttacgatgtttaatgtgtaaatatattcagttattgatgcttgtaaaaaatttaatatatttttcagttaagcactttaatattttgttatgctctaattaatatttttaatttatttccaatgattttgaacttatgcacagacttacgggatcatgaatatgggatgagtaataactatcagaaattgatctgttttctttgtgtgttgccacagctttgttatggcccagtcatgcgccaaaaaagagccgcttttattaattattctgacccacaaatcgtacgaatccgaagtatcggaaatctaagaacagaaaccgaaaccagaaacgcgaacagcgtcgctgtgtttgagttttatttttgagctcggcgcgcgtttgttgtcagttttggtttgaaatatttaccacctgtgatgaataacgttacatttgcgctgattgttttttatccgtgatttatcgagaagttcgagtaccaccatcgatggccatgcccacatattgctgattactcaggtgtctggggtgcgtgttttctgatttttcgatttttcggatcagctccttctcgagacccgtgtaccgttaattaatttgcaagtctctgcctcggcggagtctttgttgttgcctgttttagtttcgttatgtgtataatttaaccggaatttgtagtgcaaagtgcacaccgggtggcattcgtcacgcgcttaaacctgtagaaatgagtttatgcgggacacaagaaatactaatatctttcatttaattgtaatgtagttcatttttattactaaaagggcatctaatgcttggcttccttgtctcaaacagtatgatcattttttgggcttgttggccaatcgatactttgatatattgggagttacaccgttggagatattcggggtgatcattgtggctcttgagggtggtggtgcgcttggaatgtgggatggggctggagatggcaagttcggttcaccttcggtttcgttcctttgtttcgacctattcggcttgggtgattggaacttctgcttcggtgacttccgtttgacacccggacttgtgcgatttgacatatttttgactccttggaccaaggacttcttcaccatggacgcagttgggactgctgacaatggtgatggtaaggtggttgaggtaatgccgtgggcactgatcgaacggcttagggcctccgcctcctggttggcctcctcttgtccatcccggatcaaagtggtaattcgctctcgctgcaagcgctcctgcgttatgcgattttgctggatcgaccggatgtgttcgaactcctgccaaaagttgaaactgatttccgccgagttgcgggttatttcactcctcaactcctgggccaatcccctgtctctgggaacttcttccctgttaatgctctgggacattgtgagagccttatattgtcagaatttggaatgaaaattggcttgtgcttcaaactgaatgaaatatactggctaaaatgactcataggtttagttttgaaaaatatgtaaattattatagaaatgctgatattggtaaaaaatctttcatttatgaggctttcttttgaagtcgagagaacagggattgatttattttgaaaatattacattctaatattacaatggcagagaaagatacatacatatgtcttaatagctcttatggagctcagcgtttatccgggctgcccagcaccacactcacttgtctgcaggttgaaatgccgctttggacaaacaaacaaaacacggcactcgaacatgacgttcgttgtcgggaggagattttgatcgatgtgcgttttctaattgctgccaactttcttcataattgtggcaagaaaaatgaggcccgtatcgaaatggcatgaaaagcacaacgaaaataccgcgaggtgggggagaaattgtcagcatgtatagaatacttgtggcttatggcttctcccgcagctcccccggcttcctcgatcaatcatgtggaagatagaagcccccgaaaacttggcccaattgttaaggcaaacaataaggcgatatgatcgccttggccaactccatttagcccacaatgaagcaaaattgcaggctttcgggaattgtatttttttcaatttcgttttttttctttcgatttttgggcgtaggatatcggtgatctttttggaaccctgctgtgcacttgttgaagccaagagttcaatgcgcggctaccagcgcacaatttattccttatggcttttgtttctgcagaagtgaaaacaaaagattgtcatcggcgggaaagggacgcagcggtctttagtactttgcatatttccaggccgtgctcatatcgcactctaattgggtgaaagtgccctcctcggcttagaaagtgtgacagtcggtgctatcc

SEQ ID NO: 37835 - DNA, 591 bp, DROSOPHILA
atgtcccagagcattaacagggaagaagttcccagagacaggggattggcccaggagttgaggagtgaaataacccgcaactcggcggaaatcagtttcaacttttggcaggagttcgaacacatccggtcgatccagcaaaatcgcataacgcaggagcgcttgcagcgagagcgaattaccactttgatccgggatggacaagaggaggccaaccaggaggcggaggccctaagccgttcgatcagtgcccacggcattacctcaaccaccttaccatcaccattgtcagcagtcccaactgcgtccatggtgaagaagtccttggtccaaggagtcaaaaatatgtcaaatcgcacaagtccgggtgtcaaacggaagtcaccgaagcagaagttccaatcacccaagccgaataggtcgaaacaaaggaacgaaaccgaaggtgaaccgaacttgccatctccagccccatcccacattccaagcgcaccaccaccctcaagagccacaatgatcaccccgaatatctccaacggtgtaactcccaatatatcaaagtatcgattggccaacaagcccaaaaaatga

SEQ ID NO: 37836 - protein, 196 aa, DROSOPHILA
MSQSINREEVPRDRGLAQELRSEITRNSAEISFNFWQEFEHIRSIQQNRITQERLQRERITTLIRDGQEEANQEAEALSRSISAHGITSTTLPSPLSAVPTASMVKKSLVQGVKNMSNRTSPGVKRKSPKQKFQSPKPNRSKQRNETEGEPNLPSPAPSHIPSAPPPSRATMITPNISNGVTPNISKYRLANKPKK

SEQ ID NO: 37837 - DNA, 2738 bp, DROSOPHILA
cttaaaatagtttatcattagcactttattggaatatgtctaaaaagagattatcttacttgagggggaatcccatttcaaatctctacggtggcaaccgagaacttgataatatagattctaaacttccgcttcaaaggttgacaccagctgaatacgctttctatgccaggtcttgttaacatattccaagcctcaatgcatttataatcgcactaacccctttcaaatgcccacaattacatggaaattaatgctccccaccttagaaggttcctagcacgatcctcggtcatgtcccaaaaacaaacaaaaaaaatcttacgtgagtaagcagacttggggaacggcttcaattgaagttcaatgaaatgtgtcgccgcgtgcgctttgattttattgccagcacttaacataatgagccgccccgataaaatcacgtttcctatcgcgcggcgcatgcgcaatgtgctcgatactcgattccagtgcgcatatgcttcctgtctcgccggatattcctttgagtgccccgctccattgtcatccgtctgtggcagtgcagcacaaaagttcaaagtgcacggagcaagggatccattgaatgccaagtgcagccgaacaaaggatacggataaacaccacctgtttccttgggctttcatttgggtttccatttggggatttacgcgagaaggaagttcatcgaactgcgattgctgcaattgaaatcgtaacgcgcatgcagggaggcaaacaaaattatacaggaattggttgcctaaaaacacatgcctttgaatatcatacgtatagtaaaaatgttaagaaaatattctagaaatgcatttgcacatgtgaattagatttatttcatagcattttttaaaagttttctgatacactaattttaaatagttattcatttgaatgcattctcattttaatgtgctgaataaaaacggatattctgtattggaaaatccttataattacataattatgacttgtattttaaatatgcttcgaagagcatgttggaccgggcgtatcgtctgtcctcctccataaactgcagtacatccctgatgttcatatgcttaaatcgcggagcacatgctcgctggatcggagcaccggtcaatttggcgactttcgaaccacttggagcagattctggggctagttgttctcccgggcgctttcgaccggagatggctagcaaggccgtatcattcaccgattccagacgagccacctttctctcctcgtcgatgttctctgcccggcgcttgcgataaaagccggtctcgtcatccgatgatccatagtcggcaatctcgagatcgttgaggaacatcatcgtgaccctcatatcgttcttcatcacacaacgttcgtcgttgtgcagatgatagcttgttcgatgctcgcacaattcgatagtcttcttgaccacatgtttcatgtaggtctccaaggcggccaaaaaagaatccaggagccattcttgctcggaaatgttgatatcatccgcctggttgccctgggacaagtgcttcattatctttttgtagatactgctgcggtcaaagaaggatgcacgttgatttttctttatggagacttttgccttgcttgcatcctgagagcctgagtccggcagaatcagatcattgatgatgagcagctgaccagcatacggctgaataggaacttcaagggaaataattgacatcacgaatataattcacaaactgcgcgaggcttcacttttttgctgtgaaaatttcgatatgtcaaactgaataagctttacagctgctgttgtcaaaaacggtaacattttagggttactgcctttcagctaagtacattataattgaaaaaaaaaaaaactgttagagactttgaaataagtagtagccctgttatattatatttataattatcaaacttttgagtaaggtgctatttagattctcgactgcaatatgcatcagctggacattcaaattcctatacagcccttaaccaacgccacccagccaggtgctagtggtggtgctgccacgagtcatcagcaacacctccatggaaacatatgccggtctaccccgcttgagtgcacccacccctcgtggactgttgaccgcaacattttcctgcactgaaataatttacattaactcgctttataaataaaaaaagaaattacatttcaatgttatagtataacagtgccaggtaactccatttttagggtttccatcgtaggctgttaattgcacatggatagctttacataaaccctgaggaaaacattataacctcctataaatgaatggaataatctgcattaggaatactccatctagtgactttcatattcgtaactcaattagtatttttctgagtgccctctatggcccactaactcgatcctagctaagcacttgttcctgttcaatgcccagcaacaggagcggaatgagttggaggaaaacgtggcatgggcaggcgcaggacacgatatgcaaagtgcacaggaatgcaagtgggccttctcgggcgactggcgacgttcgacgggcacgagcgcctaattattcaaatggaggcggtctgatggcctcggtgcctccgtcgtagacgcaaagcctcgagtccgtcgccaggttcggggtgagcggatattagttaagacagcggcgcgcgacagtcgcccgcttaccaac

SEQ ID NO: 37838 - DNA, 738 bp, DROSOPHILA
atgtcaattatttcccttgaagttcctattcagccgtatgctggtcagctgctcatcatcaatgatctgattctgccggactcaggctctcaggatgcaagcaaggcaaaagtctccataaagaaaaatcaacgtgcatccttctttgaccgcagcagtatctacaaaaagataatgaagcacttgtcccagggcaaccaggcggatgatatcaacatttccgagcaagaatggctcctggattcttttttggccgccttggagacctacatgaaacatgtggtcaagaagactatcgaattgtgcgagcatcgaacaagctatcatctgcacaacgacgaacgttgtgtgatgaagaacgatatgagggtcacgatgatgttcctcaacgatctcgagattgccgactatggatcatcggatgacgagaccggcttttatcgcaagcgccgggcagagaacatcgacgaggagagaaaggtggctcgtctggaatcggtgaatgatacggccttgctagccatctccggtcgaaagcgcccgggagaacaactagccccagaatctgctccaagtggttcgaaagtcgccaaattgaccggtgctccgatccagcgagcatgtgctccgcgatttaagcatatgaacatcagggatgtactgcagtttatggaggaggacagacgatacgcccggtccaacatgctcttcgaagcatatttaaaatacaagtcataa

SEQ ID NO: 37839 - protein, 245 aa, DROSOPHILA
MSIISLEVPIQPYAGQLLIINDLILPDSGSQDASKAKVSIKKNQRASFFDRSSIYKKIMKHLSQGNQADDINISEQEWLLDSFLAALETYMKHVVKKTIELCEHRTSYHLHNDERCVMKNDMRVTMMFLNDLEIADYGSSDDETGFYRKRRAENIDEERKVARLESVNDTALLAISGRKRPGEQLAPESAPSGSKVAKLTGAPIQRACAPRFKHMNIRDVLQFMEEDRRYARSNMLFEAYLKYKS

SEQ ID NO: 37840 - DNA, 3505 bp, DROSOPHILA
caaatgcagctggcgtactaaatttgggactacataggtaaaatattataaacttttgtaattaacttcaaaaaaaaaaatgctctatcagttcacaacaataagattttcttgcttatcacctcttatttctgattagctaagtcacccaaaaagtatccataagattcttttttttttaacgcattttgtttgtgatcgccctttaccaatatttttcgccctgtgtataatttatccaccaattgtctccccagtgggctcaattagagacgcattcgcaaattgcattgcacttttattgtcaccactcgcgagaagtgtcttggatttgagtttgagcttgagtgcggtggcattttgtcgcgacgcctgcgacggtgtctggatcccatcatcagtcactcctggacagtccgggtccaagtaattgcccccgacatgctccggcggcagtccgagccccaaccacttgtaggcattttgtttgacttggattatcgctaagtgcatgggtttaacattccgcggatgtccaactaaacgacggattaagcggcaccacttgtcggtttgttgttcaggtcgatcccgaccttgcattgcaggaaattattgaaaattaaagtttttctaaattaagctgaatatgtgtaagcaatttacaaggtttaccaatgtaacatgtagtttttaaacactattcattaatattatattcttggtcagccatggatgtctttttagctggaaaactaaactatggtaacacattgtaacctttctactccacttttaaaatgatgtactgatcattttggtctcctttcgcggcttattcaaaataattcagccacagcaacagtttaaggccaatctgttcagcacattcacactacgctcatgatccccgtaaacggagtacccgcatcccatgccaagtgcccattaaaccgcatatataaatcaccattaatttgacagtggatttttacataactcaggccaacaggtgaaagcgaaaagcgcacagctgccggcggacagtggagagatcatggtgtgtcatggaaaactcgccacttgcactcgtggaaattgactggtctccccgaagaccctgctcctgctcctgctccaccgcctcatccaccacctggaggaagaaggaggaggaggctggcatgcaaaatcgaattgtgtgctaatatttggccaaaatgcaaagagcccgcggttatcgctgcaccacgaacatgacgaagtgactccagatggggaagttttcaatgctgccgctgcagtaataaaaatcattactttccagcccaaattggcaaatgttggcagcgggagaatgcgaatgcaggattttcgcctgatcgacatgcaatgtcagggaaattgctgtcaaatgggtaaaagttgcagcaacactatggaaaaaatcagcgattttggtgaaaatgatgatggcaaattatgaaagggaaaaatactaaagatacgcatttaacaataacttattctaatatttattttcttgagcgaacttagtgaaatgggatcttaaaccttcgagggagatgccatagaagaaagctaacattggtatgaaaaaactgtgccgtagcaaaacatggcttttgttttagccctaaccgcagatagatgtcccagctaaaagcttttcccgaaaaattccgaacgccgatacccccataaccaccaacacatgacaggcacaatttctcaattttatttaggaggcaagcaaagaaatcttttactttcactgacgacgcacattcttgaagcgccgctcggcctccgtggagctgctctggaaattctgcatccaatcctcatccgaatattgatgccgccaatggcacaattgggagttcaattcctttcgctggttgagaaacagtgaggtgcgtgacttgggcacgactatcatattggtcagatgcatctgcatgtcgcggtacaactgccccttgcgattgcgtttgtccagcgactgctcccctcgcagatgcagatcgttggaggaattgatgagtctcaggtccgagctcgacttaaggatcaacgatagatcggattgagagcgctttaagccatatgacccgctcgtgcagggctcctcattctgattgattggtttaggtatcaacttgcgcagttcttgcacttccgccgccaagaaatccaggcgtgcctcaagtctggtcagtacctcactgggtgtcagttctgaaacgggagtggtcgccacaatgggtccatcggcaaatccatcagtgcgttgcctcgcatccgatggcaagaattggggggaactggttgccgcatatagtcctctgttatcacccacttgttctgcctctatataatgcccaggtggtgtgtgatactcattccggtgggtcattatgtcacttaataagtctgctgaaagtggcacaattcgcttcattccggaggattttactttacttttaatttggaaacaaactagttgaattatatctgaatacacatgatatggcaaaaaaacctttgatttttgattgaaagggaaatggacactgtgcagtgttatatatattagttcagagaattgtatgcatagttttttggtaattgtaaatttgcagaagtatataaaacacgactaggtttattgtaataccaagattccctccgaaggtcaaaatttttttaagttttgtagcttgttactttaaattgattgttctactgcctattagttggaataagcaccttttataatgttgtcaaatattttctcagataaacaaaatttgaatgcacacaagacactaaggaaagtccggcaatccgcataatttcaaaggagttccttcgaaaaattgtcaaatgttgtagggtcctcggatacctggcaacagaaatggagctcggaagagacttcatcaaaaggacgttagaattgtcacgtatgtgaaataaatagaaattatatccactcgctaagaaattccttctgaactcagaatgccaataatcaagaagttctgctattgttttagtctaagaattggcgcattttcaattgcgtacgcaggtcttacaatggatgtattagatacagtagcgactatatatactaagtcgcaatattgcgctgatatactactcctctggataatttccaccatttggaatatcatttccgcattggttcttttgactgcactttttcgggtaagatcaatctgccatgatacatttagcatcactaggtatctgagcatcctttgtttcaggaaaatccgcatttgctgccagttcatctggtgacttctctttgtggcctgatgctcgaaatgaccaatcacatggtgattgcctcccttggcagaaccgattacgttttgatatcctatgcgttcattatgattgcctgtaagtgatggccccctcttgatcacatctacttcaaaaaaaaaaa

SEQ ID NO: 37841 - DNA, 854 bp, DROSOPHILA
gtaaagtaaaatcctccggaatgaagcgaattgtgccactttcagcagacttattaagtgacataatgacccaccggaatgagtatcacacaccacctgggcattatatagaggcagaacaagtgggtgataacagaggactatatgcggcaaccagttccccccaattcttgccatcggatgcgaggcaacgcactgatggatttgccgatggacccattgtggcgaccactcccgtttcagaactgacacccagtgaggtactgaccagacttgaggcacgcctggatttcttggcggcggaagtgcaagaactgcgcaagttgatacctaaaccaatcaatcagaatgaggagccctgcacgagcgggtcatatggcttaaagcgctctcaatccgatctatcgttgatccttaagtcgagctcggacctgagactcatcaattcctccaacgatctgcatctgcgaggggagcagtcgctggacaaacgcaatcgcaaggggcagttgtaccgcgacatgcagatgcatctgaccaatatgatagtcgtgcccaagtcacgcacctcactgtttctcaaccagcgaaaggaattgaactcccaattgtgccattggcggcatcaatattcggatgaggattggatgcagaatttccagagcagctccacggaggccgagcggcgcttcaagaatgtggtggatgaggcggtggagcaggagcaggagcagggtcttcggggagaccagtcaatttccacgagtgcaagtggcgagttttccatgacacaccatgatctctccactgtccgccggcagctgtgcgcttttcgctttcacctgttggcctga

SEQ ID NO: 37842 - protein, 262 aa, DROSOPHILA
MTHRNEYHTPPGHYIEAEQVGDNRGLYAATSSPQFLPSDARQRTDGFADGPIVATTPVSELTPSEVLTRLEARLDFLAAEVQELRKLIPKPINQNEEPCTSGSYGLKRSQSDLSLILKSSSDLRLINSSNDLHLRGEQSLDKRNRKGQLYRDMQMHLTNMIVVPKSRTSLFLNQRKELNSQLCHWRHQYSDEDWMQNFQSSSTEAERRFKNVVDEAVEQEQEQGLRGDQSISTSASGEFSMTHHDLSTVRRQLCAFRFHLLA

SEQ ID NO: 37843 - DNA, 2803 bp, DROSOPHILA
gtttggctgatgcgccgcgaattaattacactatggggcacagtcaaatcaacatgaatgttgcacgctgcgggtgcgggtgcatctgcgaatacagcagtatcacaatgttgctgaaaaatgaatggttacctgggctggtgtagttggggcaatagtcgcggccatataaccacataagcaccgcataatcgtgcctcatcgcaaccactcatattcacaccaggcactcgctgcaacaaggacaataaatcatcgaaaggcagccgtgtgcagacaaattcactgaaatttaaataaaaatcaaaacaaatgctagacaaaacacgagtccgggagtcggagtccgtaaaaggcgaaaagagcctgaaaggcagccgcatcaatatggagcatacactgtaaacaattaggggtggcaacagaagtggtagatacacgtttaactgcattgcaaatcaaaactttatttgatggccaatacttacgctgcttatttatgctggttttctaatcaatttaaggtaagcactaatatatttctgcagtgtatgggcaatgtcctacaacagcaacaacagctcaaagtcggcattatgaataacttttaaatttgaatgtgaaataatcgctttgtctgcgcgggctaccgttagcaacatgctgctgttgcaagtgttgctggagctgcagtggctgctgttgctgccagtgatttatgcagcaacatttgatgaaatataatacaaaaggcgcacagcagccgcagcaacaacaaagataaattgccgcacgctaaattgtaagctatataaggtttaaatgcaaagtgtgttgtccgtagcctgttgcacgttgcatgttgcatgctgttgctcgccgcttggctgctgcatgttgcaacaaatgttgctcggcatttatggcttcatttgacaacagtattgaaatcactacgttttccagcacttttcctacgcttttttttttattcatttggttctacttttctacttttctcacaatttattagacattagttgctattgcacggttttcgtctccacagatccggtcaaggcaatgcactcgatctccaccagagcatccatgggcagcttggccacctggaaacagctgcgggccgggaaatccttattgaacactgaaacggcagataaggagacataaagcatatagttgtttttggaaatatagcatagctgccataaagtgtttacagttaacaataaatgggcgataaggcgctaacgatgccgattgccttatcaggcgattgcgatcaaaaggccggtgtatacagtaggtattgcattataaacgacccttataaatagtgcttagtattcacaagccatatgcctagtacttaccccgcttgtagacctcattgactgccccgaaatcgttgagatccttcaagaacactgtgttcttgatgactttgtccactccggaatcggccgcctttagaacagcctccagattctccaatgccttctgcgcttgttcagtgggtcctccaggaaccagtttcatggtgtccttgtccagacccagacatccggacacatacacagtacgatcggccaccacagcctggctacataattgtaaatcacaatgaaatagaaggtgtgtccagcagcttttacaggtacaattgttttcttacttgtagggagccactggcttggcagcatttgcagtgctgataagtttcctcacaatcgtcgacattttgatctcgaaatacgatactatataagtggcaagaacaagcaaagtcaattgcagctgctaaaagtgaactgatcgaaagctttgacttgcgttcaacaagtgacttttgttatcagcttttgcttttcacaagctcattcgctttttcccgcgcaaacaggtgccatcagctgatttgatgaacagctgttcaatggatctgttatcataatgttaatataatgtcaaatataatgctcattctgttgcaaatgtaaaatattgggtaatataatggaaaaaattatattaatgggtgaattgcgaatgcaaaaaacgcttattccacatagcttagatatttgtttcatttttgctttgcgtgaaacctggcagtattattaatacattaagttaactcagcttctttaatatcttaattaacatattttttttggaatttataattcccgacctgcggaaatttgggtcgcacccgctttctctagctggcgaattttttttttttggccagccgatatttgatttaacgccaagaaaaatgcatgccatgtcacttagccacgcccatctgagccgccccgactaattatttattatttggcaattgctgtctgtcagtcgctgtcagccgggccaaaaaggcaaaaaaagaaagcctggccaaaaggttcccgtttcagaatctttacgcatgccaaaagtaccgaaaaaaaatggaaaaacactctgtaattatatgaagaagatgggccagatcctgaaatgtggcaaagggtcttaatcccagactgaaagctgcacccaaccccaactgcatgcagcatgcagcatgcagcgtaggtgcaacctcagagcaaagagaacacgcccaacaaaacgccgccttaagattgattgcagacgctttgttgtttctgtagctcgagcactgaaaaaaacacagattatatccttaaaaggttttgctaaaaaattttctcttgtaagtaagatataatgcataacatatccttcagaaagcttcttttgtggatga

SEQ ID NO: 37844 - DNA, 502 bp, DROSOPHILA
cttgttcttgccacttatatagtatcgtatttcgagatcaaaatgtcgacgattgtgaggaaacttatcagcactgcaaatgctgccaagccagtggctccctacaaccaggctgtggtggccgatcgtactgtgtatgtgtccggatgtctgggtctggacaaggacaccatgaaactggttcctggaggacccactgaacaagcgcagaaggcattggagaatctggaggctgttctaaaggcggccgattccggagtggacaaagtcatcaagaacacagtgttcttgaaggatctcaacgatttcggggcagtcaatgaggtctacaagcgggtgttcaataaggatttcccggcccgcagctgtttccaggtggccaagctgcccatggatgctctggtggagatcgagtgcattgccttgaccggatctgtggagacgaaaaccgtgcaatagcaactaatgtctaataaattgtgagaaaagtagaaaagtagaa

SEQ ID NO: 37845 - protein, 138 aa, DROSOPHILA
MSTIVRKLISTANAAKPVAPYNQAVVADRTVYVSGCLGLDKDTMKLVPGGPTEQAQKALENLEAVLKAADSGVDKVIKNTVFLKDLNDFGAVNEVYKRVFNKDFPARSCFQVAKLPMDALVEIECIALTGSVETKTVQ

SEQ ID NO: 37846 - DNA, 7961 bp, DROSOPHILA
gcggttacacaatagctggaaaaaagctgcaaaaaccatgaattttaaagattaagaactaaaaaatttcgaatgattcagagaatgattatgccaatccttaagtcttattgcccatcccaaattttacacgattagcacaatatgttgggcaccaattgaaaacagtagattttttgcagatttaaattgttaccaagttcgttttattgtacaggcgaataaaagcatttcattgaaaatattttaaaatccttttaaaagatagacaacaactgtgttaacgctcattatacgttttatttatatcgatttctcttttatgtaagaacaaaatttatttacagtgtttagatcgcgtttgcttgcttccgttttcgtgctttcggttcggcgttaaattgtttttcaaaatcaattctatgtgtgtcctacttaactcaaatccattacagaagtgttgcctacatatgcctggaatcgattcccacatatcaactaatagataaaacaactttttcgtacagattatcataatcacttcacgttgctttgggcgtacacaaaaaatgaagatagaggaatatgaatagtcattgcaatccttacgttctgttcacacgcatctcaaaacgtgggatgaatgtttttatttggattgaaacagacgacgtataaatgtacatcaaacgctctctaaaattcataattcatttataaatttattactttagctatatttatagttattaatattttcttgcttatatttctgttgttgcttctttacctttttactcagctgcttacaattaggggctgcattatgcattatttctcttatcttgctttgcgtacgattcttgtgggtggatgtggtgtgtgtggttgtggctctgaatggggtggtggtggagcaggtgtgtatgtggttgtttgggcttactgctatacacttgttatgcgcaaagaaatgaccataaacagtaattagagaatatcaagaaatatattagagggataataattatggtggtgccttatccaatagcatttttaactgttgaattttgaatgtcaggcttacaaaatgggttgcgaaacgaaattttacgattcggggcgcactaattgatatatttatgtattcgggttattggctggcggtcatctataatcgtggtcagtatccgccatatcaatgccgctcgtatgctcaggccattccgtccgagctgcagattgtgtttttcagttagtgtgcaagccctggcgatttgaagatgagtgtgttccggatcctgcttaagacgctcctgctactttttgtgggccgcttaggccaagtagttgtacactttgcgatcttccggcgatcgttgcagatactcgcgctcgattaggccctcaatgcgctttttgataaacacgggcgagggcaagaaacgcgactttagctgcgacgtcacatctgatactagcaagttgtgctaagaaaataaaaacaggaatcatggttaaatcacaatccaaccagatagcaaacgtataatacttacagccagacgcttgcgggccttcattatgcgcacaatagccgcttcgatctcgtgcttacgatcctcgtcgacctttccgcgcgtttccttacgctctggctctgattctcccttggcggctaccgtttgtatcttcaccctaaaatagtttcgatattattaccaggcgccgttctttcgcactgaaagtaatatctaacctgtggaacttggagttgaaggcgtcgtttacgtaaaactcatccgtgggctcaatgtccttagttttcgttttagaattgcgtactaacaaacgctgagcgggtttgcccatggacaacgattgtagtgctcggacgagctcccgttccggtatatcggtctcctggtgtatgtcatcgtaggtgagcacgtcgcggttattaaacagcagtagcacacacatctaattttggattatgaaatacatgttaaatgtttagttaaatatttttttcagatcaatgaaataaagctgcttctgctaaataaaattcggaggtgtacgaactaaaagatattttagcttacctggtacgtggacacttgcaatatgtgcttgcgtgtggtggtgggcaccccacagccgcttgaactggagctgggtgcatctttatccttttcactttcaactgccttgcggccataaaacacagcgttgatataggcggttcctattcgaaggggaaggcataaatacagtagttgcttaaaaaagaagatcatttaagtagctaacccatttgtggctgtaacgtcaattgacgtcctgagtgcttatttagatagaagttcttgaaaatgtcaaaggcttcacgcggagcggcgggtatattgcagttcggagttgctgtctgttacggaaattgaagataagttaacctattcacataattatggaacaatttaagcttacctgtgtgggccaaaaaccagtggttagtatgcgtaccgttagctccacaccgccaagggataaattgttattatttacaaagttcttaaactcatccatgatcgtattggagactgacatatctttaaacatgccctctagcttcgaggtgaattgacagccgcattcagtctgcaataatagagattaaagcgataaataattatgctaagataccaagtaacttgacctacctttagttttgatatcatattcttctcgaaatcatcagagactgatttgttcagcagcaatctcttggctaaatgcgtcttgtaatagcgctcaaagacatctttctccaataggaaacggaagagaaccattgtcttatccaagatggactcaatttcctgttcgctcatctgtggaaaagtaatacacattattaatacatttcagaaagcatattgtaaattcaactcactcccttgccaccctttttcagtttgtcatcgatgaatagcgatagatactccggggatttgttatttaggttcaagaaatgttcaaaatcggatgagatgacgtttttgaatatgcgatcgttggcgaacgagtgcaccagaaactggtcgaagcggtccttgagatccagcaagttctgcacgaatgttatgggattcgtgttgccgttttcttcttccttaaccagcatgcgtccttgctctcgcagatatgccgacattgtgtccgctatcaccttgagaccctcctccttcaggcgcgagaaaagcttatatgtgcaggccagatcctcggtctttgagttcttgatcatgtacaccacgcccgagttctccatttcaacaatgggtcgcatgtgctttttgatcagctcttcttcgaccacgcgcacaatgcggggctccgtatccttatcgagatacagcgctgcccgggaagattcctccgtgatgcgcgcttccactttcttgatgtaaacgccagcgttgttctcggcaagaaagttctgcgactcgaatttgtaaaacgccgccgattgcgcaaggaagggcttttcaaagtcctcttcgtagacagtgcgcgagttaatccccagggtgatcagcatactgcaagcattcttgatagccagatggttaatggcttcgccatgacgttcctccatcaccatgcccagcaacttctctcgcagggccttttgaatctcagaatagcgaaccacctggtaatggaaaaagcgataaatatatttccaacggaataaatgcaataaagatattcctacctgatccctgaacaaaattaatcccaaattgtacacattgtctacctcgcgctgctgcacataaactctatccatgtacatgagtatgtcgcggatcatcaccatagatgtctggtggtctgtccaggcctggtttaacttgggtaggaaattgctgtgcagagcctccagcacatccgcccgcaccttgtgctccaggtgttctgagacgacctccctcagaccgtaatacagtctattgccgtgcttatgcagcaccatgttgtacgcattccggtagagttgttcaaacgatagtccggagttgttctttttctgtatctcctggatagcattctttaagctggcccaaatggtctccacgtacttctcgtccatggaggcctggaagagaaatataagattattaatttggatagtcaagaacttatttctcagggattaaaacttataaatgcataagagtgtaagagggatattaagactttcgcttgttagtaagttaactaaaagttgaaatccctgtttggtttttatcagatggtaggctaacattgaatgcccttcgcttgtactccggtagccagagtgggtacttccgtgctatttccttaaagcgtttttctgtactttctgcgctcgctgaagctgaggttgatggcccagaggtggttgcactagtttcagttttaacgacagctggagcagcaggagctggaactggcatggaaagtggcgtcggcgtgagcgggtggttagtattaattctgttatcagcccgaactctgccaccgctggcggcaaggtgataactccgccgcgaggcagaagctaatccctgagcggacaatcgattttgggactgctggtgttgctgcattgaggaggcgttgggcacattgatgttcatgcttcgcgcctgctgtccaagaacgttttgccttgcaatccggcaaggcacggcagagtccacattaccgacagttgcgccattgaagttgttggagccggccaccatgcgattgtggtagcggccgttggcgttgaggttgttcagtggctccggctgctgttggcggggatcgcggccttgcatgagattgctacgctggtccagctcacacgtcctgtcccggtagtggctcctctcttcctcgctgagtgccagagagcgaggggctggataatagcccgctgctgaagccggtgcctggcgagaccgactttggtttaacgacttaatgatgatagcttcaatgtcacatccgccgcgcggttctgctacacctggtccgctgctcctcctcctcctctgtgctccgtactccggccagagttctactcgcgattcgggtctcgcccttcaccctgctctccacatacaggtgttcacagtctttttgtgtgtgttgttggtcaacaataatttctcgaaaactacgattgaattcgttgtaacttaaaaactaaaatgtgtgttgaaaattcccctggccccggttggtgttttgatgtttttatttgtttttgatttttggtgtttgcttttcatgtcgcctgacattttgtggggagaaatgtttggtgtcgcctaaccggtgaatttgctaattgttttataaaaattatctaactcttaatacccgcaaatggcattatcttatcgaaacattttgcaagttcatgatgcgatcgacagatttttcgctgcaactctcatctcaactgcaaagcgagtaaggggcttttcaaatgagtatatctcgttttttaaattcgtttgcaaattgcactcaaccttttcaaacgcttaatcttaaaaatttgaagatcattgttttttgaaccaaagaaatggcataatctgggattatacaacttgctgtggacagcaagctctttcttcatagtgatttcttggatttgagcttaaaatgaaaatgtttttacagtttgtggtttaaacttgtattagttccgggttgtcagataatagataatctcatattagttcgctcttagcaatattacacgattaagagtgtgtatcgtggttttaacgatgctccaatgtgggttcttaccggaaaggcccgaatgcgcattttgccctccttcttgggaggatttccccgcagattcatgctttgcaagcgtcggcactgctcctccactttattggcggttcggactccggagcagggagctgcaagaagagcaggtgcttctccgacttttccgatgacggaacctgctttcctcggcggcaatcaatggttaacacaacaagaacacagttaacctgggttatccttggtttatcctgaaagataaggagaggtgaatggattagttctatcacagatctcccagcatgtttacgctacaatccgcgtagggtggtgccgagatgagcattctggtttcgtatatttgtgcaaacattccacgcaaatgttagggtgtcaagcgcgatgtacacaagcagacgtgtgtacgtacatatgtatatatatgcccgtgtgtgtatgtctatttggggaagcggctggttttattcgcgaatagtttgcaattgcggatatgtcccgggataccaatccgccgtactgcgtcgtcacttcctttgtcgccgcctatatcgcagatatcggatatatgtgcatgtacattgattcgctggcccatccgatctctccgcgtaaaagaaacggtgaaaaaaactcacacggcgacaatataattgttatgtacatatacgtgcaattaatacaagaaccgttgttttcgcacgcacttccaaccgatgatcgataaatatacgtcccagggaagtgcattcaattgctagacgttatcgagccaatgcttctattttcactttgttgctttctttattttcttaacgattcttctatttcactttgtcatggaaaagacgggttacatatgtgtgtgcgtgtgggtgcctgcccgtctcacggtctacgcttgtgtgcgtatgtttttgtacctggccttttgaaacggctttccacgtcgctttcgcacaatttttactatttcaaaatgtattttaccggtgcgaatgcattagtaaagtcactactattatttagcttgatttgttgctgttttcaacgtttacttgcatttcatattgattgtaggttttaatagcgatgggcgacaaaagtagcattgttgttgtttttcgaggcgaatggtgatagctatcgatagtacttttccatcgatagtgtcaaaaccagttgctctcaactttatgataaataaaaccagtaaagttaacaggaaaggaactgactttgcatcgcacgcaacttaagaaaatatgtagttactttttattttatttgttaaaggaatataaatattaaatataaaaattaaaaggaaagtaactgacttcttagtacgcttgcatcacaagcagaaccagaagaattattgtcactaattattgatttctttatttatataaattaatttttatttggtaaagattttatgttcataaattttgaatttttaaagtacataacatttccaaatatatatttaaattgtcttatgtatataatattttatcataatttatataacatttttttcccatgtctagctaacagtgttgcaaaattcgtgttgctctctgtgaatggtagtatttcaaaacgaaagccctaaaagtatgctatatttttaagtacgcactggacttcaaatttcagttagtccatttcaaaagtttgtaatacagataaaaatagttaactataactatgtaggtgacaaaaacacaaatgattttgaaatagtagtgctttttgagatttcagaataattcttggaatatgaacgcacaattttatcgataaacgcatgttaaaaagtttaggagttttataaaataagccgtttaatatctaccttacatcgtatctgggaaattcccgctctgactgcgagagtgaaagctttgctgaagaactaattaccctgcgacaaggtctcggcattcggttaataatttaattatgacaacttgcaacaggcgaaaaacagatgtaaacggatatccagcgatggctaccgcatgtggctttcttaattgcccatcgatgcccactgcctttagtactcccttggttga

SEQ ID NO: 37847 - DNA, 3002 bp, DROSOPHILA
ttaaaacctacaatcaatatgaaatgcaagtaaacgttgaaaacagcaacaaatcaagctaaataatagtagtgactttactaatgcattcgcaccggtaaaatacattttgaaatagtaaaaattgtgcgaaagcgacgtggaaagccgtttcaaaaggccaggataaaccaaggataacccaggttaactgtgttcttgttgtgttaaccattgattgccgccgaggaaagcaggttccgtcatcggaaaagtcggagaagcacctgctcttcttgcagctccctgctccggagtccgaaccgccaataaagtggaggagcagtgccgacgcttgcaaagcatgaatctgcggggaaatcctcccaagaaggagggcaaaatgcgcattcgggcctttccggcctccatggacgagaagtacgtggagaccatttgggccagcttaaagaatgctatccaggagatacagaaaaagaacaactccggactatcgtttgaacaactctaccggaatgcgtacaacatggtgctgcataagcacggcaatagactgtattacggtctgagggaggtcgtctcagaacacctggagcacaaggtgcgggcggatgtgctggaggctctgcacagcaatttcctacccaagttaaaccaggcctggacagaccaccagacatctatggtgatgatccgcgacatactcatgtacatggatagagtttatgtgcagcagcgcgaggtagacaatgtgtacaatttgggattaattttgttcagggatcaggtggttcgctattctgagattcaaaaggccctgcgagagaagttgctgggcatggtgatggaggaacgtcatggcgaagccattaaccatctggctatcaagaatgcttgcagtatgctgatcaccctggggattaactcgcgcactgtctacgaagaggactttgaaaagcccttccttgcgcaatcggcggcgttttacaaattcgagtcgcagaactttcttgccgagaacaacgctggcgtttacatcaagaaagtggaagcgcgcatcacggaggaatcttcccgggcagcgctgtatctcgataaggatacggagccccgcattgtgcgcgtggtcgaagaagagctgatcaaaaagcacatgcgacccattgttgaaatggagaactcgggcgtggtgtacatgatcaagaactcaaagaccgaggatctggcctgcacatataagcttttctcgcgcctgaaggaggagggtctcaaggtgatagcggacacaatgtcggcatatctgcgagagcaaggacgcatgctggttaaggaagaagaaaacggcaacacgaatcccataacattcgtgcagaacttgctggatctcaaggaccgcttcgaccagtttctggtgcactcgttcgccaacgatcgcatattcaaaaacgtcatctcatccgattttgaacatttcttgaacctaaataacaaatccccggagtatctatcgctattcatcgatgacaaactgaaaaagggtggcaagggaatgagcgaacaggaaattgagtccatcttggataagacaatggttctcttccgtttcctattggagaaagatgtctttgagcgctattacaagacgcatttagccaagagattgctgctgaacaaatcagtctctgatgatttcgagaagaatatgatatcaaaactaaagactgaatgcggctgtcaattcacctcgaagctagagggcatgtttaaagatatgtcagtctccaatacgatcatggatgagtttaagaactttgtaaataataacaatttatcccttggcggtgtggagctaacggtacgcatactaaccactggtttttggcccacacagacagcaactccgaactgcaatatacccgccgctccgcgtgaagcctttgacattttcaagaacttctatctaaataagcactcaggacgtcaattgacgttacagccacaaatgggaaccgcctatatcaacgctgtgttttatggccgcaaggcagttgaaagtgaaaaggataaagatgcacccagctccagttcaagcggctgtggggtgcccaccaccacacgcaagcacatattgcaagtgtccacgtaccagatgtgtgtgctactgctgtttaataaccgcgacgtgctcacctacgatgacatacaccaggagaccgatataccggaacgggagctcgtccgagcactacaatcgttgtccatgggcaaacccgctcagcgtttgttagtacgcaattctaaaacgaaaactaaggacattgagcccacggatgagttttacgtaaacgacgccttcaactccaagttccacagggtgaagatacaaacggtagccgccaagggagaatcagagccagagcgtaaggaaacgcgcggaaaggtcgacgaggatcgtaagcacgagatcgaagcggctattgtgcgcataatgaaggcccgcaagcgtctggctcacaacttgctagtatcagatgtgacgtcgcagctaaagtcgcgtttcttgccctcgcccgtgtttatcaaaaagcgcattgagggcctaatcgagcgcgagtatctgcaacgatcgccggaagatcgcaaagtgtacaactacttggcctaagcggcccacaaaaagtagcaggagcgtcttaagcaggatccggaacacactcatcttcaaatcgccagggcttgcacactaactgaaaaacacaatctgcagctcggacggaatggcctgagcatacgagcggcattgatatggcggatactgaccacgattatagatgaccgccagccaataacccgaatacataaatatatcaattagtgcgccccgaatcgtaaaatttcgtttcgcaacccattttgtaagcctgacattcaaaattcaacagttaaaaatgctattggataaggcaccaccataattattatccctctaatatatttcttga

SEQ ID NO: 37848 - protein, 773 aa, DROSOPHILA; identical to SEQ ID NO: 26493

SEQ ID NO: 37849 - DNA, 3508 bp, DROSOPHILA
agcatccgcgtccagatcacagggccctgattcgggatcaacggagattaggcaggattgatcgaggtctgactgaaggattgtcagatgactacgaatgctctcgagttttttcagagtgtcctcacgctcggatacctttgattaagaagggtgtaattaatgaggatatgctaaagctcagaaatatgtaagtcgaatccctcaccagtttttcgataaagcaggacacacgttttcgccgaatctcaatggtctggaactcctgtttgttgtgcagatcgagaagatcattgagctccgcgtttagcagccgcagcatttcgctctcctgggtgtcgtggatcgagagattctcgagcatatcgcttgtaatcgcgtccgcggtcagtgtatcgttgggcgattcctccattttggcctgatctctggactcaatgcaccgggtgatctcgtgcagctgttttcacggtatttggaatgttaaaaaaaagctagttagaaagtttcgatgtgctttttgattgaatacactgaaaattttaccaagaaattcggtatttcactaaaaagatactcgattaggttttcgattgtacgcttaagcagccgattaagcgataagaaaagtattccaatgaatctataattaaactgagctcaataatgagtaacgtcacctgacgacgatgatgtttttgttttttgtttttaaaacaacgaattgaataaattccttccataagcacacaatgcacatatgcagatttctggttgagtaatgccacaataggatatctcacctgttgattgagctgtgctatgcactgatccttcaaaagtaacttctgcctggccgtgtgtacaacctcgtccaaggcattgatctgtgacttcagttcgccgatctcgtcatgcttggcggctatctcgccgactaaggacttcatgctctcggacatctgcgaacaaagttaaacgccaatcaaagccaagcattaaatatcgatgaacaaaatatcaaattttattaagagcagcacaaaatatacgtatttagttagcgagacaatcatttagagttctcgcgcttgtgggacgacttcgggtcccacttgacattggaatcaccgccgccttttcccttcaaggatctatggcctaccttctcgctctcgcattccgcgtgggcgggatcctttcccacgccccgcaattgattaacggtcagtgtctctagggaaatgccattgaaatcaaagtcggtgcagtgaggagaatgctgcacgcgttctatgatcgcacaaatgtcctcacgcagcctacgattctcctcgagggtatgctgttgtcgcacttggacagactgacagcaggcaacgatcttgctgtacgcctccttctccaagtccgacacgttgcccaggatcacgctgttcacgtggagcaggaaatccacccactcctgaaaagtgaccagacgcaactggcaagtgtgctaaaagggtatgaaaatgggtcatataaaataatttatctcaagggggattttgctaggaattagtttcaatggataccatccttgatttacaacgaatctcaccatgtcatcaccctcgtgctcatctaggcagtcaatctcgtccagccgcttcagaaatatgctgttcagctcaaagctcatatcgccagcatcgccgttggtatcccgcagcttctggatcagacagcggtaatgttcggtggacatcgcctcggtgctggcagtgcaccgatcaggagatgaggcttttagcgtcgattcttgatgtggatgcgaggcactcgttccggttggctgcacttgccgacacatttgactggcagatgatggtggtggcggtggcgatgatgcaggtctcgacggattcagacccatggacttggcgtctaggacgaaaccggcttggcgactggccatgatatcaattcaaaatgtaattaccacgttcttcttactaagagctgatttagtcggccagggaatagcttgtgtaattagacatgagtatgactttaaggtttctacatcgaaacgttcacttcgaaagcggcaatctcaaggcactgctgatcggaaagatcgaatgcagttctcctcgccttcaactgcacgcaaatcgcaaatcacaaatcactcacgaaagtacaaaaatcacaacaaaaaacacttgtaaagttgtaagcttattaaaaacaacacaaaaatgggcggaaaaaaaaataaaaaatagagaaaatatatctgattcgaaccttggcggcgacgtcaagagcagctcagcgcgctgcgttcatatcttttgtttgcagtcttctgacgtagcaatgtagttttgtttatttatatttttcttgtttttgagctacacacacgcgtattaagtatacggtttcagcatgttgttgtttttatttcttgccacgatccaaataccgcgcgtttcgtctgcgctccgttcgcgatcgccaacgaaaccgaactgagcgctccgctccacacactcgctccccaccaccaccggccaagagcggctctctagagagttgaaaaactcgacggactctcagcgcttatcagtgcgtcggggaatcgaattggatcgctgcgtgtgtttacccaagaacttagcattctgaatttctggccgggctcacgatatacatatgtatgtatgtatcttacacaatatgcgaaagtcatcgctgtttgcccaagttgcggtttcggggttctgccaatttcgtataattgttaactcatccggtgtatatttgcccatggataagtttgtttggtcgcattgataactccgatatggtcgttcaacgcggttacacaatagctggaaaaaagctgcaaaaaccatgaattttaaagattaagaactaaaaaatttcgaatgattcagagaatgattatgccaatccttaagtcttattgcccatcccaaattttacacgattagcacaatatgttgggcaccaattgaaaacagtagattttttgcagatttaaattgttaccaagttcgttttattgtacaggcgaataaaagcatttcattgaaaatattttaaaatccttttaaaagatagacaacaactgtgttaacgctcattatacgttttatttatatcgatttctcttttatgtaagaacaaaatttatttacagtgtttagatcgcgtttgcttgcttccgttttcgtgctttcggttcggcgttaaattgtttttcaaaatcaattctatgtgtgtcctacttaactcaaatccattacagaagtgttgcctacatatgcctggaatcgattcccacatatcaactaatagataaaacaactttttcgtacagattatcataatcacttcacgttgctttgggcgtacacaaaaaatgaagatagaggaatatgaatagtcattgcaatccttacgttctgttcacacgcatctcaaaacgtgg

SEQ ID NO: 37850 - DNA, 1403 bp, DROSOPHILA
cgatcgcgaacggagcgcagacgaaacgcgcggtatttggatcgtggcaagaaataaaaacaacaacatgctgaaaccgtatacttaatacgcgtgtgtgtagctcaaaaacaagaaaaatataaataaacaaaactacattgctacgtcagaagactgcaaacaaaagatatgaacgcagcgcgctgagctgctcttgacgtcgccgccaaggttcgaatcagatatattttctctattttttatttttttttccgcccatttttgtgttgtttttaataagcttacaactttacaagtgttttttgttgtgatttttgtactttcgtgagtgatttgtgatttgcgatttgcgtgcagttgaaggcgaggagaactgcattcgatctttccgatcagcagtgccttgagattgccgctttcgaagtgaacgtttcgatgtagaaaccttaaagtcatactcatgtctaattacacaagctattccctggccgactaaatcagctcttagtaagaagaacgtggtaattacattttgaattgatatcatggccagtcgccaagccggtttcgtcctagacgccaagtccatgggtctgaatccgtcgagacctgcatcatcgccaccgccaccaccatcatctgccagtcaaatgtgtcggcaagtgcagccaaccggaacgagtgcctcgcatccacatcaagaatcgacgctaaaagcctcatctcctgatcggtgcactgccagcaccgaggcgatgtccaccgaacattaccgctgtctgatccagaagctgcgggataccaacggcgatgctggcgatatgagctttgagctgaacagcatatttctgaagcggctggacgagattgactgcctagatgagcacgagggtgatgacatgcacacttgccagttgcgtctggtcacttttcaggagtgggtggatttcctgctccacgtgaacagcgtgatcctgggcaacgtgtcggacttggagaaggaggcgtacagcaagatcgttgcctgctgtcagtctgtccaagtgcgacaacagcataccctcgaggagaatcgtaggctgcgtgaggacatttgtgcgatcatagaacgcgtgcagcattctcctcactgcaccgactttgatttcaatggcatttccctagagacactgaccgttaatcaattgcggggcgtgggaaaggatcccgcccacgcggaatgcgagagcgagaaggtaggccatagatccttgaagggaaaaggcggcggtgattccaatgtcaagtgggacccgaagtcgtcccacaagcgcgagaactctaaatgattgtctcgctaactaaatacgtatattttgtgctgctcttaataaaatttgatattttgttcatcgatattt

SEQ ID NO: 37851 - protein, 260 aa, DROSOPHILA
MASRQAGFVLDAKSMGLNPSRPASSPPPPPSSASQMCRQVQPTGTSASHPHQESTLKASSPDRCTASTEAMSTEHYRCLIQKLRDTNGDAGDMSFELNSIFLKRLDEIDCLDEHEGDDMHTCQLRLVTFQEWVDFLLHVNSVILGNVSDLEKEAYSKIVACCQSVQVRQQHTLEENRRLREDICAIIERVQHSPHCTDFDFNGISLETLTVNQLRGVGKDPAHAECESEKVGHRSLKGKGGGDSNVKWDPKSSHKRENSK

SEQ ID NO: 37852 - DNA, 3317 bp, DROSOPHILA
attacaaagtacggttctaaaacttaaacgtattttgcttttttgatctgaaaattctgcacttggccgtgcggcgattatgtgtatcatttttctttgccagcggctgggattctacgttattgtattttatattatttgtgcttaatttggggagcacaggtaaggagcagtgggagccgtgcacctgatcccaagagtgttgtgactcttgaggccgctggacaagttcgttgattcgcggcaggcaaatgaccatgtgctcctcaacattttgtgggcaggagcacttggactattagccaagatattttccctcccctttccttttttttttcgtttttttccttttgtcaattcccagggacttttgcttggccaaggaacgagatttatgttagtatggtgtcagtttaagttaatgggttatactccccgccagttttttatttaatattttataggcgaacgttttttgtgcgtctcattcttatttttatgcacaattttattctttttcctttggctgctgcgcaggtgaattttttttgaatttatgaccataccttttaaattgctttgtggcaatttccgtggcacccacacaatgcgagaagttaatttattagtaaactcaatgtttcaggtttgttatgatttttgttttttagctgaaaaacgacttaagtatatatgtataatctatataatctatctatataatctatatttttccctgcttaacgagttgctattaaaaatctgacacattaacttttagtaattttcgcgtatgaatatgtatcacaaacacattcgactacaagctttatatcgaatattttatcggaaatcagtgttaatcaggactctctcaaatgtcattttggcaagctatagtattgcaaaccaaagcgatctctgccacacgtgttttttcctcgcaacgcttataaattacgagataagctctgagtcttatagaaatccagagtaagatatgaaacgtcattattacaatactggggatgaccagcaggaggtggagagctctccaagtccgccgcctcctccgcctttccaatcgccattatcatcgcccgagtctttgcagaccccggatggatatcccattttgtacgtggatgtggtaaagaataagcccaaacaggagttgccgccgtccgcatcaccgtcccaaccacttgcgccggagttcagcatctttcgcgaagattttccggctctgccaggatcattaccatctgcattaccaaccgcattaccaacgacatcgagccctgtggtgcccgacgactggacagccatgatgagcaacagcgagcaggtcgaactcgccaaatttcgaaatacagttatccgtaattccagtgatccgtgcgttaacgctaacggcaacgaggtgctccgtcagccaacccatgctcccgagaagcgccagaatatggagttgctgccccatatgtacggttatctcggcaatccgttccgtttaaatttgagcatgatatttaccaagcaattcctgctcgaaggcgtcaggcagagggctataaatgcggcccacaagagggctgccctggcaaaaccagcaatccaaccaccacccggattcgagaattgcaaaatttttgcccgcttgataaccaacagtgatggtatgccactgggtggagtcacatttgagctgggctcacccactaatgaaacgacttcgaatgtggaggcgaaaccttcgggttccaccattcagggagcctttgggatgttgggactggccaagaaactgcgatcgattaatcagaacccgcttctattcggaaataatgttgcccacaatataggcggagccgcggactcgatctttaccgggccaattcaagaagcccgtttgactcctcaggagatgagctacaaattgccattgaactatctcttcaatgtaaatatgagcctacaggagcccaaaatcgaggaaatgcatgatgagctcctatttttcttcttctacacatatgctggcgacatgatgcagatgctcgcggctgctgaactggcggaacgtggatggcgctatcacaagtatgaacatttctgggtcattcgccaggcggacaatcccaactacttatatcacggattccgggagttcggagagtacaattacttcaacatgtggcagtggaagatcctgccacgacacttttacctggatcccgagatcctggagcgcactctatccaaggaagagctgtatgtgacgtacggataccatccccagatgtcgggtatttagaagaaagttcttttgtcatcaatagccagggatatacgggtttaaaaattctctctgacgctgtagcatcttttttataaaaacaaattaaattttttataaatattcataagcgttttattaataaattcagtgtggggaatgtatttatttatatttagtatatatagttgcctgttttcttagttctatcaattggtgttttttgcgaatttgtagtgttcatatttattcactatttatttattattgtattaaaagttaaccagcggatgaccaacccatgttttagtcaccttgcaaccacggacccaccgccgaaaaaaatccaagcaaccacaccctccaaatgccatcgcaaatccacaatccacacaagaccactgagtacccagcaccaccaccaccttcatagccaagccccaaagatacgaggaaaatcgcagcgctcattagcaaaatggagcagacggacagttgcacatttggagtcgcagctttccgcccagacacgatctcttggccaagtgtcgccgtcatttagcccgctaattgccacgtaaatttgcaaccatttttggcagctcattaaatttattattaaaacaaaagccggagcgaagccaagttaattgccatcaaattgacatgcgagccgcttggagacggacgacaacacccgcctggaatggccgtttgggatttgctcgctgggattcggactcgccggagctcgcaactctgcgcatgcgtattaattgccatggaaacttcataatttcatgtggaaaaatgtgaacgttaggcgtgctcagtctgtatacgagtatagatatatatatatatatatacagcccaccgcaagtacaatgtgtaatttaagcgagggagacttaaaagattggagtggaaccaggtttttggatctgtccacttggcggcttatttatggcacggcgaagtttgattgaaatgtgttgtctgtaaaattgacaacttg

SEQ ID NO: 37853 - DNA, 1317 bp, DROSOPHILA
atgaaacgtcattattacaatactggggatgaccagcaggaggtggagagctctccaagtccgccgcctcctccgcctttccaatcgccattatcatcgcccgagtctttgcagaccccggatggatatcccattttgtacgtggatgtggtaaagaataagcccaaacaggagttgccgccgtccgcatcaccgtcccaaccacttgcgccggagttcagcatctttcgcgaagattttccggctctgccaggatcattaccatctgcattaccaaccgcattaccaacgacatcgagccctgtggtgcccgacgactggacagccatgatgagcaacagcgagcaggtcgaactcgccaaatttcgaaatacagttatccgtaattccagtgatccgtgcgttaacgctaacggcaacgaggtgctccgtcagccaacccatgctcccgagaagcgccagaatatggagttgctgccccatatgtacggttatctcggcaatccgttccgtttaaatttgagcatgatatttaccaagcaattcctgctcgaaggcgtcaggcagagggctataaatgcggcccacaagagggctgccctggcaaaaccagcaatccaaccaccacccggattcgagaattgcaaaatttttgcccgcttgataaccaacagtgatggtatgccactgggtggagtcacatttgagctgggctcacccactaatgaaacgacttcgaatgtggaggcgaaaccttcgggttccaccattcagggagcctttgggatgttgggactggccaagaaactgcgatcgattaatcagaacccgcttctattcggaaataatgttgcccacaatataggcggagccgcggactcgatctttaccgggccaattcaagaagcccgtttgactcctcaggagatgagctacaaattgccattgaactatctcttcaatgtaaatatgagcctacaggagcccaaaatcgaggaaatgcatgatgagctcctatttttcttcttctacacatatgctggcgacatgatgcagatgctcgcggctgctgaactggcggaacgtggatggcgctatcacaagtatgaacatttctgggtcattcgccaggcggacaatcccaactacttatatcacggattccgggagttcggagagtacaattacttcaacatgtggcagtggaagatcctgccacgacacttttacctggatcccgagatcctggagcgcactctatccaaggaagagctgtatgtgacgtacggataccatccccagatgtcgggtatttag

SEQ ID NO: 37854 - protein, 438 aa, DROSOPHILA
MKRHYYNTGDDQQEVESSPSPPPPPPFQSPLSSPESLQTPDGYPILYVDVVKNKPKQELPPSASPSQPLAPEFSIFREDFPALPGSLPSALPTALPTTSSPVVPDDWTAMMSNSEQVELAKFRNTVIRNSSDPCVNANGNEVLRQPTHAPEKRQNMELLPHMYGYLGNPFRLNLSMIFTKQFLLEGVRQRAINAAHKRAALAKPAIQPPPGFENCKIFARLITNSDGMPLGGVTFELGSPTNETTSNVEAKPSGSTIQGAFGMLGLAKKLRSINQNPLLFGNNVAHNIGGAADSIFTGPIQEARLTPQEMSYKLPLNYLFNVNMSLQEPKIEEMHDELLFFFFYTYAGDMMQMLAAAELAERGWRYHKYEHFWVIRQADNPNYLYHGFREFGEYNYFNMWQWKILPRHFYLDPEILERTLSKEELYVTYGYHPQMSGI

SEQ ID NO: 37855 - DNA, 2879 bp, DROSOPHILA
acagcttaaaagtaaactcagctaagcttaatattcacttgatatattcctaaaattagagtccactgatagagaccaaatctgacagtccaaataggttgctttgtatagttagtttttgtatatttaagaaacctttaactccaatggaatttcttccagttgagtttcactcggctactgttctttggttctctggtctagggtctggcacttccacttcaactgcaactgcaactgcaactgctactgtgcgcaaaactgtcaaaaagcgactggtcgcatggcctgaactccatgtgggcttgatttagtgctacgttctctgactgctgatgccgaggctaaagatttgggatggggatcgggatgaggacgatcggtgggaccgctgagttatgacttgaactctgtagctttgcccatgacttcggtttgtggaccttgatctgggtggaatttagcggcccagctgtttgtgggtcaatatcagtttaagtgccagttttaacgccgtaaaactgaagctttcataactatcagcgcaaaagcctaagaccttctttgctaactgtattgattattatttgccaattgagtaatcagcattatcagttatgttggctgttcattaaagggcactcgaagagcaatattgagtatttgcattaaatatcaattacagtagttattagcaagagaaaacttgtatatattgattaaacttttgtaatagaagttccttagaagcgatattttgaacgggaatttaatacccagagggcttttaagttgaaaatgaaatgaaaaacagcaagaattttattttatactggaaagaagttatactttatgagttttgtaacaattattacctcttatcattcaatttcgcaattcgaaattctgtttatcatttagtaaataaacactcaattgatctcatatataaagagggttgatcaagctgcaaatagacacaagtgaatcgaatttcataatggctgcatttacaaaatattccttagctttcctagttttggcatactgctttaccgtagttccggctaagcatccaagtcgccaggaagcggaggagaatatgtccaagttcatgagtgtccttcggcaagagcaattaagtgccggctcacctcgattcaatgatgtcctgggcaacgccagggccattgtcgaataccaggacaaaggattcattggaattcgaggcattttccagtggatgaccagtccgaatcctcgcaacgatggcgtctataactttatgcagttcttcgccgatgaatcaagtggatatataggtattcaaaactacgacaagagctccaagttcacggttctgttttcaatttgggatgcatcggatgcatttccgggtgatgatttcgcctgcgagacctttggaggcgagggcgtcggttataagtgctataacagcactttcccactgatcagcaatgccatatactatctcgatgtagagatcgagggttccaccttcaggggttatatctcggatccgcaggagaatctcgacagtgtgaccagcacccaggttaatcgtcatttgattggcgagatcatcactccgcacgaaaagctaacgaatcttataccatttggatactacaacgagaactatcgcgatagggacacctgtagggaggcctttgaactggtcaccgtcaaccaggcaccgcatcaatatactaagtatggtcatgccaacaccaagttcaccgaggcctatctctacaactcggagtgcgaggtcgagaatattttggtggctctaacggcggacaagaagagcaccatttacttcaccagacccactgatctgaatctatacaattgagcatccaaaaatactggattggagtatcaacttatttatttataagctgttgtttttatatattaaagtagtttaaggcgcgattattattacatttgtttattaaaattatacaatttcaaagaccttgtatgtagaaaccaagtctaaatattttcgttgttaatacttatcaccaaaatctttgttgattctcagcttaactttcagaactcctgtagatctttggatttttctgtaaaagccaggcaaactagttactcgacaaaatcagagtgcctgttggttttcaggaaacttgtctagactgctcccgtttctgctcattaagaccaatcccctgactggatgcgtttttagcatgtcctacgcagtccggcactaactttttattgtctgtgcgggcaggcggacaaaaagtggacgaggagcgaaaaaaataaatgaactgtcccattgtcttctgggattagggctaccggtgctcggctatggcttctcagctcagtcctggagcttctgcgccgatggtgggtgataaatgttgagaagctagcggcggcactggcgcagactccattgaaattagttattcacgcggatcgtttaaggcaatccaacaccagaaggcagaaacttggtagctgcctgctgttctatggttgcatttattttggataccccttaataatggagatgaatgggtggcagagtattaaagaaataataatttaatatatgaataagatacatgaaagtattgttcttttaaaaatgcgtatatcattttcttaatgtaatgtggagtttccctttggggaaaaataatagtgccaaaattggattgctaaatacccttgcatactttttggatataaattatttcttaggggatggtatcaaatgaaatcagtttcgatttaagcacctttaattctacttcctttttatcatcctggttataacatttgaatatatagtacgctccagatttaagaac

SEQ ID NO: 37856 - DNA, 879 bp, DROSOPHILA
atggctgcatttacaaaatattccttagctttcctagttttggcatactgctttaccgtagttccggctaagcatccaagtcgccaggaagcggaggagaatatgtccaagttcatgagtgtccttcggcaagagcaattaagtgccggctcacctcgattcaatgatgtcctgggcaacgccagggccattgtcgaataccaggacaaaggattcattggaattcgaggcattttccagtggatgaccagtccgaatcctcgcaacgatggcgtctataactttatgcagttcttcgccgatgaatcaagtggatatataggtattcaaaactacgacaagagctccaagttcacggttctgttttcaatttgggatgcatcggatgcatttccgggtgatgatttcgcctgcgagacctttggaggcgagggcgtcggttataagtgctataacagcactttcccactgatcagcaatgccatatactatctcgatgtagagatcgagggttccaccttcaggggttatatctcggatccgcaggagaatctcgacagtgtgaccagcacccaggttaatcgtcatttgattggcgagatcatcactccgcacgaaaagctaacgaatcttataccatttggatactacaacgagaactatcgcgatagggacacctgtagggaggcctttgaactggtcaccgtcaaccaggcaccgcatcaatatactaagtatggtcatgccaacaccaagttcaccgaggcctatctctacaactcggagtgcgaggtcgagaatattttggtggctctaacggcggacaagaagagcaccatttacttcaccagacccactgatctgaatctatacaattga

SEQ ID NO: 37857 - protein, 292 aa, DROSOPHILA
MAAFTKYSLAFLVLAYCFTVVPAKHPSRQEAEENMSKFMSVLRQEQLSAGSPRFNDVLGNARAIVEYQDKGFIGIRGIFQWMTSPNPRNDGVYNFMQFFADESSGYIGIQNYDKSSKFTVLFSIWDASDAFPGDDFACETFGGEGVGYKCYNSTFPLISNAIYYLDVEIEGSTFRGYISDPQENLDSVTSTQVNRHLIGEIITPHEKLTNLIPFGYYNENYRDRDTCREAFELVTVNQAPHQYTKYGHANTKFTEAYLYNSECEVENILVALTADKKSTIYFTRPTDLNLYN

SEQ ID NO: 37858 - DNA, 419 bp, DROSOPHILA
tatatatatatatatagaaagagcttttaattgaaaattataagttttctctcacaattcttctgtttgagggacatgcatctcttctttgagccgattgttctcgctgaaatcggagtagctattgatcatggactgcagctggctaatctggttatctcgatcctttagattttcctgcagtcccttgatttggcaggaaagttgtccgttctctgttctcagctcatcctgcagctgctccacctgatccagtcgcgtttgcaggctctgcgctttcctcttggcgtccttgagctcctggcactgatcctcgaagctggccatcaggctttcggtacttcgtgcagagttccacgctttgattttcttggtttttcagcagggaagggaggtctcgcagttggcgggatagatca

SEQ ID NO: 37859 - DNA, 2288 bp, DROSOPHILA
atgtccgagagcatgaagtccttagtcggcgagatagccgccaagcatgacgagatcggcgaactgaagtcacagatcaatgccttggacgaggttgtacacacggccaggcagaagttacttttgaaggatcagtgcatagcacagctcaatcaacagctgcacgagatcacccggtgcattgagtccagagatcaggccaaaatggaggaatcgcccaacgatacactgaccgcggacgcgattacaagcgatatgctcgagaatctctcgatccacgacacccaggagagcgaaatgctgcggctgctaaacgcggagctcaatgatcttctcgatctgcacaacaaacaggagttccagaccattgagattcggcgaaaacgtgtgtcctgctttatcgaaaaactggtatccgagcgtgaggacactctgaaaaaactcgagagcattcgtagtcatctgacaatccttcagtcagacctcgatcaatcctgcctaatctccgttgatcccgaatcagggccctgtgatctggacgcggatgctcagatgctggaagctctacgtagacgcctgctcaaccttagccaacttaatcgagaactgcacggaaagtaccagcgcctggacaccgagtcgaaaaagctggaggcgaggattgaatcggaaagcagcgttcttcaaagaaatagcgatgttctaagggagatcgccgaactcatctgctcgttgggttccaaggagttctcctacaacgaaatctacgacgaatcctcgaaagaaaatccattttgtacgaccattgcggatatgtttgcacggaaattcgagcaggagcaaaatcaagtggaaattaacacaggcaacagctccaccgattgcccccaccgccagcagttggagcacacgctgctccactgccagaccgagtcggatctactgcaggccacccgggataattacctcagcatcatcgatgagttcaaaagggatctcgaggagctgaccgaacaggtggagcagcagcagcagcagctgcagcagagctcactagccagccaatcctgcccagagcccgagctccatttcgtcgatcagtcacggatcaactgtgaactggagatacaaaacggacaactttcctgccaaatcaagggactgcaggaaaatctaaaggatcgagataaccagattagccagctgcagtccatgatcaatagctactccgatttcagcgagaacaatcggctcaaagaagagatgcatgtccctcaaacagaagaatttaccgaaagcctgatggccagcttcgaggatcagtgccaggagctcaaggacgccaagaggaaagcgcagagcctgcaaacgcgactggatcaggtggagcagctgcaggatgagctgagaacagagcgcaaaatcttgcgagaggaggtggtcgctttgaaggagaaggaggctgtgtcctcgggccgagagcgggcacttcaagatcaacaaaagagtgcccagttggagatggaaaagatgcgcactcttgttcggaaaatgcagagccatctgcagctggatgacatccggcatcgcgaaagtatccagcggatgaacgagacaactgaatctctgcgggaggagttgcgcaccatttcggaaaattgccagcaaatgcagatccgcctaaatcaacagaccgaagttaaccagcagcaggaacagattatcgactcctttcgaaaatggaaggacgcccaggttagggccgatgaggcgatgcgtctttgcgccaagcgggccgaggaacacatccacatgctgctggacgaaaaccggacgttggccgaggactatcgcaatctattccgagactacaagctcttggagacggagataaaacgagtgaagcaggcggtcaactgcgcgtccagttcggcgataagttgtccacctccgaagagtggcggtctgaccaatcccgaggcggggaacgatgtgagttggaaatatacaaatttttcacaaatctttatatgccaaaatgccaccatggccaggcgattgcagaacttgaccagcacctcgcagcggatttttaaccagaatcagactatgaacgatcagtactgcaactccttgatctcaggaagtccggctggaattgggcaaccggtggcccaatccatattgcggcgtactcgatcgtcacaggatcagtcgtaggagtcgccaggatttgcatgcaactcctccttccatttaaaaatcgttctcacccaaaatctctatgc

SEQ ID NO: 37860 - protein, 739 aa, DROSOPHILA
MSESMKSLVGEIAAKHDEIGELKSQINALDEVVHTARQKLLLKDQCIAQLNQQLHEITRCIESRDQAKMEESPNDTLTADAITSDMLENLSIHDTQESEMLRLLNAELNDLLDLHNKQEFQTIEIRRKRVSCFIEKLVSEREDTLKKLESIRSHLTILQSDLDQSCLISVDPESGPCDLDADAQMLEALRRRLLNLSQLNRELHGKYQRLDTESKKLEARIESESSVLQRNSDVLREIAELICSLGSKEFSYNEIYDESSKENPFCTTIADMFARKFEQEQNQVEINTGNSSTDCPHRQQLEHTLLHCQTESDLLQATRDNYLSIIDEFKRDLEELTEQVEQQQQQLQQSSLASQSCPEPELHFVDQSRINCELEIQNGQLSCQIKGLQENLKDRDNQISQLQSMINSYSDFSENNRLKEEMHVPQTEEFTESLMASFEDQCQELKDAKRKAQSLQTRLDQVEQLQDELRTERKILREEVVALKEKEAVSSGRERALQDQQKSAQLEMEKMRTLVRKMQSHLQLDDIRHRESIQRMNETTESLREELRTISENCQQMQIRLNQQTEVNQQQEQIIDSFRKWKDAQVRADEAMRLCAKRAEEHIHMLLDENRTLAEDYRNLFRDYKLLETEIKRVKQAVNCASSSAISCPPPKSGGLTNPEAGNDVSWKYTNFSQIFICQNATMARRLQNLTSTSQRIFNQNQTMNDQYCNSLISGSPAGIGQPVAQSILRRTRSSQDQS

SEQ ID NO: 37861 - DNA, 2551 bp, DROSOPHILA
tttggctgctgcaggcttggctttagaggcctgttccttgggcgaggtcttcttatcctccggagaggacttgctggccactggcttttccgccttcgactttgctggctctgatttaagtgaagattttgaaggctccaacttaaccgcagactttgatggctccgatttagtgggttcagatttgactccattgtggggagtcgtcccatttgcactgggcactatctttcccgctccaggacgctgctccacttttgccaacttcacctccaaatgctgcatgggcttgaaaatcgcagccggcgctttggtgccaccggctattttcacactatacagctgagactccgcatcctggactttggccagccaatcctgcatcctgctctccagcaccacagagtacagatcttcgccggaatcggatccttgcgttttacgcttgccatggactagaaatctcttctcgaattttgtggcaggttcctgctctttgatgtaggcctccagcacatcgttcacctccttgtaggacagtttgtactcctccagaagatcggtgaccagcacacagcgatcgaaatcgatcatgcaatcgtcgagagcctttttaagcgacatttcgacaatttgtttagttaaaattgcgcgaaatcgtattgcgggcgtgccaacttatgtgactaaaaaaagtgctaaaactcaccagcaaaataatgaatactgaattcgaaaatttgtgactttgctatgcatattgtcaatgtagaaaaaggcgtatttattaaagttaattaattaattattatatatatttagttgcttttttttgcttgaattatgagcttattaatagactttacatttagcttaaatatagctaaattgaaacaactgctatctatcgataacatctacttgccgctattgcaaagataagaagaagaaacgagaagtaaacaaaccagatatcctaataaattttgatttctttttaatgcccaaacaatgcaagtaaatccaaaacacaacacagaagctcacagacaagccgagtaagtgataaaaatacaagtgaatgcagcaagtgtaagacccaattacaggcaggatgccaacaaggcgcgaatcacccaaattgaggagttcatcaacgaggtgctgaaagaggatctcagagagctggaaaagtgcatcgggcagtacaacgaggagatcatggagtacgtccagctgaagaacaccctccagaccttcgacacccacctaccagatggctacaaaacgcaagtcaacatcggcagcaacgtattcatgcaggctcgcgttcggaaaatggatagcattctggtcgatgtgggcaagaatgtgttcctcgatatgagcattccagatgcggaacgcttctgcgacacacgcgtaaagatcttgaccaagcaatccgatgtcctgcgcgacgaaagcgtcaagaaaagggctcaaatcaaaatggccctcatagcaatcagcgaaagaaccaaacttattcaacaggatgaaagcaaatagcttcgctgcgtccacagaagctgaaagcatctgtatccttgttcgtatcagtagtgatcacattattaccaagattacacaagcacttagtttttattttataccacaatttacaaagacaatttacaagttacgcgcctccaaagtgttgatggcatagagattttgggtgagaacgatttttaaatggaaggaggagttgcatgcaaatcctggcgactcctacgactgatcctgtgacgatcgagtacgccgcaatatggattgggccaccggttgcccaattccagccggacttcctgagatcaaggagttgcagtactgatcgttcatagtctgattctggttaaaaatccgctgcgaggtgctggtcaagttctgcaatcgcctggccatctgcggaagtcaccaatagacaccagttagacaataaagttagaaagtattattttaattccagctgcccgtttaagaagtccaatggttatccaattcgtcaaaatttggaacaggcttgttgaaaattaaggaaaaattcaagttttacatggtttggtggcattttggcatataaagatttgtgaaaaatttgtatatttccaactcacatcgttccccgcctcgggattggtcagaccgccactcttcggaggtggacaacttatcgccgaactggacgcgcagttgaccgcctgcttcactcgttttatctccgtctccaagagcttgtagtctcggaatagattgcgatagtcctcggccaacgtccggttttcgtccagcagcatgtggatgtgttcctcggcccgcttggcgcaaagacgcatcgcctcatcggccctaacctgggcgtccttccattttcgaaaggagtcgataatctgttcctgctgctggttaacttcggtctgttgactggcgggaagagagaacatggcagctgctcttatatggatgcactctatcctggaaaattacctactttaggcggatctgcatt

SEQ ID NO: 37862 - DNA, 459 bp, DROSOPHILA
atgcccaaacaatgcaagcaggatgccaacaaggcgcgaatcacccaaattgaggagttcatcaacgaggtgctgaaagaggatctcagagagctggaaaagtgcatcgggcagtacaacgaggagatcatggagtacgtccagctgaagaacaccctccagaccttcgacacccacctaccagatggctacaaaacgcaagtcaacatcggcagcaacgtattcatgcaggctcgcgttcggaaaatggatagcattctggtcgatgtgggcaagaatgtgttcctcgatatgagcattccagatgcggaacgcttctgcgacacacgcgtaaagatcttgaccaagcaatccgatgtcctgcgcgacgaaagcgtcaagaaaagggctcaaatcaaaatggccctcatagcaatcagcgaaagaaccaaacttattcaacaggatgaaagcaaatag

SEQ ID NO: 37863 - protein, 152 aa, DROSOPHILA
MPKQCKQDANKARITQIEEFINEVLKEDLRELEKCIGQYNEEIMEYVQLKNTLQTFDTHLPDGYKTQVNIGSNVFMQARVRKMDSILVDVGKNVFLDMSIPDAERFCDTRVKILTKQSDVLRDESVKKRAQIKMALIAISERTKLIQQDESK

SEQ ID NO: 37864 - DNA, 6606 bp, DROSOPHILA
tcgtcccaataataatatatataatgataatatatagatagataatatctttatatagaataatataatccgcataattataattgttgaaaattacataatgccaaagcggatttcaaaataaagatttaaaattaaaaattaaacaaatgtaaatcaaggtagattcatcatagatataacaatgattgataaagttatcaacagaatatcagatctttgggtttagtactttcttttttaaggaaataaaaacttttaattttaatactgtgccaacatttttctgcgtgcaatgtgaaacgaaaaaggggaagaaagatgcccattcttatcagcaggaggtatgatatgtcaagtgtgaatatagcacacggaccgttcaatgatggtaacgtgcggtaagacaaccaacgggatcagtttgcttttaagagcaggtttacccagccggcagataagaatgtgaatgggcgcaaagcactcgctagaatttttgaattttgcgcttattctcgggctgccagatagctgaaaacagtttgatgttggtatttttaaatgaagccctggctttacaaatataggaaaatattgtacaataggtggtttatttgaaaggttaataaaataacaatgctcaaaagctacaaactcgtttttccttattctaacttttctaagtttaaaattagaaatatatattttaaactctttcaagcataaagatcaaacgataagaagaacttaaagatttgatattagtaaaaatgttttgggcagggtatataataagataagatttatttcataggtacagggttcacaacttttttaattcattgggattggtgaatgcataatatgggatagaatattcttgaaataccatccccaagattaacggtaactggcaagtgtcatccctaagcgataggtccgttacgactcgcgcatcgctggcacgagtggcgatgttttaaaaaaatcaatatgaaggccacaacgtgcgggagttcgtgaaagtttagctagcgttattagtcaatgatgtcggggcgttgtgcactcgaattgatagccgataattcgcccggactgccgccgcggcagtgaccagatagatggccatggccaactgaacggaaggagagcgcgagaccagaaaaaagcgagccacaagcaccaaacagccaccaagtgatggcctcctccacatcctctgcgcgtgggaacaacaaagcagccaccaccaacaccaccgcagccaccgctcccgtctccaccgcctcgtcggctgccgtttccggttccggtgccacctccgcggcagctactgcctccgctccgccagctgtgaccctaagcgagctgattggccagcagctgaagcacctgaacgccgatgagctgctgcacaaggacgagctgcagctgctcctgctcataacgcctgtgcaacgccagaaactgagccgcaatctggaggatggcgatctggaggccagcacctcggcggcgccactttcgcgtcccgaaaacggcgaggaggatgacgacctgattggggcggtgggcggactcggtatttcgtccccaactacgaccaaggagccggtgctagattttaggtaaacataacgatgtggccactagtccataaaagcacaaacccaaacttaatcgctttcactaactaaccagatttgtcaaaacgttaagaatgtcgatagtgtcaattcacaatagcaaacatagtcgttatctaatatcctaaaacaggaagaaagtttaaaaacaaaaaacatattcacattgtacaatgattatacccattatgtgtaaagcaaaagggaatgctggattcggggaaaagtatgtaacagtacaatgattcgtttttggctcttttaagtatttatgttcataatcagattgactagccatgacgattcagccaagcacgtccgttcagctgagtaaagggtataagatagtccagggtatccattatttttattatttgaaaaaacctaaaatgcgtttgcttgaatgtgtattacgtgttggtaagaaataggcattttttagaagcagtaataaaattcctcagacaaaaagcttacttttccacacatataaatgtttaatataaatctttttttttacgtatttattattacattgatttttttatagtttcgcatgtcatcctcgaacaatatgcaaagcaaattaaaaacgcgtggtgctttttcaaccagtggcctaatgttggttaggccaagctattatgcaaatccataattaccccacgaaattaatttaatttgtgggaggtgattttgcacccttgcacattgggcttcgtttaagattaaatgacccgattaaaaaaaaaaaaataaactaaaaattaatatttaataaactagaaattaatatttaatcgaaatataggtttacaaaaatgtgcaattttgaagtcacatttaaatcatttcatttggttcatatccatccatccatttgttgccagcactttttaccactttttaccactttgtaataacggcccagtatagtcggttgcatgcattcgtacgtttaggttaagaaacattgtttgctgtcgaactcggtatttgggtcacttcgttttgacatttgccgtgaataattaaccatgccacccttttgccaaccgcacaggccacacgtactcaaatggtttcaacatctgcgccaccaaacgggccacttcaagtcggaggaggagtctcgtcgtctgcgggaggctggtaacgattcgtatcgcaaggagcggcatccgctcaaggccagcgatctattcacggaggccatattcctggcccccgcccggaacacgctagcagccgccctggcccacgccaatcgctccctggttctctttgattgcggtctatatgcggtaagaaatccatgtatttcagcaatggattaagtggtataccatataccacactggcttaaacagttttggtcaatatgcatacatgttgtaaagatatatatcttaatatctgtaggaatcctacgacgactgcctgtgcgccctggatctgggctatccggaggagtacttgccattgattaagctgcgccaagccgcctgtgccttaaaactgcgtaactttgcgctctgcgaggagcatctgcacgagctcctgcacattgaactgaaccaggtgttcgaagcgaggacccatgagctctggcatcagtgcgaagtgctcaaggtggagcgcttcgagatggccgtacagacgggcgatgatctggatatcaacgattcgaaagcctttgaaatgtgagttcgaatgttccatgtggataatatctaataggttgtatatgttttatagagcctggttggacaactcctcgtcgctgcacacaaccagggcggtggccaagaacgcgctcatcttcgaatcggaagcggtggccatggtgccgagcggcaattgccgagtgtgtgactactgcgggatcacacagttcattccctttccctgcatttactgctccaaccgtctggtggtctattgttcccgacagtgccgcttcaagcatgcggcgatccatgcagtggagtgcttcggccaccagatcgagctgttcgagtcctttggcgaggttttcggaatgccgcgactcctgcagctggccttcaggatgctgatcacaggactgccggaacttttgggccattgccgaaagaaaccgacgctcagcaagctttggtcggccatcaatgggggattgcaggagcgacaggatatcgcttacagtgcagtgctgcgattggagcgcctgaaggaggagcgacccacggacacggtgatcgcattggcattggccgcccacatcctgtccatttacctgagcaagtgcactacgttttttgatcagctggagaagagtctgcctacggcctctcggatgtcgagtgccgaatgggagctgctgtgtgccgctctactcatgcgtcacattggccagctgcgccacagatcgctcactgcctgccgatccttcgtcctgccagctgatccgcacgtcttctcgccactcaacgaattccagctatgggccgcacccatgcgcctgcaggagggccatctgcatctgctggccggcgaggtggctgtcgtgtcgtactccgtctacccggataccctgaacttgtgccgccacagttgttcctccacgatctgcgccaagttctccggccgcacggtgaccgcgctggcccttttggatctgccggcaggctccggcatctacaactgcttcgccggaggtaactttcagcaattgccccgggaggagcgcaccaaacagctcctggagagcggcataaggtgccactgcaacgcctgccagttaacgcactcggatgatcagttcgtaagttgagacaccattcatttattatgtaataatgctttaaataattatcctcccgcagcataagtttcatcgctaccgttgtgataacccaaactgtatggagatcttcacacccaacgccctgccccatgctccaagtctgcgttggtggctatccgaggagtacacccagccggagttcaatggcgccgacctgatcatgtgtccacattgcggcgagtaccagaaactggagtggttctgggccttcaccacgtcgctcatcgattgcgaactcatcgaggagaggtgcaaactgtacgcggccatcgagcgcgccgagaaccaactgatggatctgcacgagtgcaaggtggctctggccaggctgcttctggagcagtgcctcatggtgcaccgcggtaagtgctcggaaatggagagctttggcatttatatatgatttttgatcattaccagctcacgtttccctcttggttgcgcaccttttccgcttcttgatctaccgtttcattgaatttattcagattatccacataatctaagattatatttgcgattaatagtctaaatccagttcggaaagttttctacctctgaatcaagctatgaaatagtcttatatttaaaagattataataatattatcctttaaagaaccagtttattcttaaaaggataatattagttttttaatggcaatctaataagatttcgtaatcatgtaccccatatattttctgctagtcctcttctcctagatcctggtaaactatctcttttgatctctctctttctctctctgctcctcctacctctaacaactgcgccaaccaaaagagggggccacagtcctggacgattgggagttcaacaaactgggctccatcctcagatccgtgctgcccagcgtgatggcccagtatggcggacagtcaatcgagtacgtgaagtacttctcctacttctgggatgtgatggcgctgagcaactacaagtgcaacgatcgggagctgatgcaaatgctaaatgctttggagttcatagccgacgagttcaaggatatattcatcaactactacgaggattatattgcgcccaaatttgctgaagagtcctatggcagtgtcgtagatacgcaagtttagatgagagtcccaaacaaaatgaagcgagcaaagttaaataaacttagatatattttactcagtagcgaaaagaaaaaaaaaaacaaaagaaatgaaaagaaaagaaaacacccacacagattctaggaaaattctattgttgaacgacccatacaaaacataattgcatatatactttgtgctattattcaaaaaaatggtgctgagatattaaattgtacgaaacgaatgttacattcatttaggtaattaagtcaaggcaaatatcgtgctagagaaatcaaaacgatcatattagtagagagtcatatcatgcacacattatgttcatatcacacctaggaaatgattaattactgatcaactgattgattgattatatagcaaatgactttttcattttgcattgcgagcaatatttatgaattaacatacatagctacaagggccaacataagcgatggatcactgtactctcgtcgattttcgggactctttaaaatttagttaaatgccattcgaaacgcaaacggaaactttggatctcggtgagctgtacagtgaccactgcctaaatgcgatacctaatcgatagatgataggccgaggcaaatctaagtgtaagcattaatttagcttctgagaagcttctacctaagcgtagccactgatctcgattgtttgccacgaacacgacaaattgttttatccaccacagagaaaaaatcccttactcaatcacttacatacatattatgtatttgcttgccatcgggcagcctgactgtaagcttttaatgcttaaaaatcagataggaatcaaacgcaatcactgcagaaacagaaaagcaaaaaccaaaaaccaaaaaccaaaaattaaaaatgaaaaacgaaaaaccaacaagacaacaaatgaacaatttaaattaacgaatattcgaattatatgaacaaacaagtgttttttcaaacctcgccttaattttttaaagtgttttga

SEQ ID NO: 37865 - DNA, 2852 bp, DROSOPHILA
ccacaacgtgcgggagttcgtgaaagtttagctagcgttattagtcaatgatgtcggggcgttgtgcactcgaattgatagccgataattcgcccggactgccgccgcggcagtgaccagatagatggccatggccaactgaacggaaggagagcgcgagaccagaaaaaagcgagccacaagcaccaaacagccaccaagtgatggcctcctccacatcctctgcgcgtgggaacaacaaagcagccaccaccaacaccaccgcagccaccgctcccgtctccaccgcctcgtcggctgccgtttccggttccggtgccacctccgcggcagctactgcctccgctccgccagctgtgaccctaagcgagctgattggccagcagctgaagcacctgaacgccgatgagctgctgcacaaggacgagctgcagctgctcctgctcataacgcctgtgcaacgccagaaactgagccgcaatctggaggatggcgatctggaggccagcacctcggcggcgccactttcgcgtcccgaaaacggcgaggaggatgacgacctgattggggcggtgggcggactcggtatttcgtccccaactacgaccaaggagccggtgctagattttaggccacacgtactcaaatggtttcaacatctgcgccaccaaacgggccacttcaagtcggaggaggagtctcgtcgtctgcgggaggctggtaacgattcgtatcgcaaggagcggcatccgctcaaggccagcgatctattcacggaggccatattcctggcccccgcccggaacacgctagcagccgccctggcccacgccaatcgctccctggttctctttgattgcggtctatatgcggaatcctacgacgactgcctgtgcgccctggatctgggctatccggaggagtacttgccattgattaagctgcgccaagccgcctgtgccttaaaactgcgtaactttgcgctctgcgaggagcatctgcacgagctcctgcacattgaactgaaccaggtgttcgaagcgaggacccatgagctctggcatcagtgcgaagtgctcaaggtggagcgcttcgagatggccgtacagacgggcgatgatctggatatcaacgattcgaaagcctttgaaatagcctggttggacaactcctcgtcgctgcacacaaccagggcggtggccaagaacgcgctcatcttcgaatcggaagcggtggccatggtgccgagcggcaattgccgagtgtgtgactactgcgggatcacacagttcattccctttccctgcatttactgctccaaccgtctggtggtctattgttcccgacagtgccgcttcaagcatgcggcgatccatgcagtggagtgcttcggccaccagatcgagctgttcgagtcctttggcgaggttttcggaatgccgcgactcctgcagctggccttcaggatgctgatcacaggactgccggaacttttgggccattgccgaaagaaaccgacgctcagcaagctttggtcggccatcaatgggggattgcaggagcgacaggatatcgcttacagtgcagtgctgcgattggagcgcctgaaggaggagcgacccacggacacggtgatcgcattggcattggccgcccacatcctgtccatttacctgagcaagtgcactacgttttttgatcagctggagaagagtctgcctacggcctctcggatgtcgagtgccgaatgggagctgctgtgtgccgctctactcatgcgtcacattggccagctgcgccacagatcgctcactgcctgccgatccttcgtcctgccagctgatccgcacgtcttctcgccactcaacgaattccagctatgggccgcacccatgcgcctgcaggagggccatctgcatctgctggccggcgaggtggctgtcgtgtcgtactccgtctacccggataccctgaacttgtgccgccacagttgttcctccacgatctgcgccaagttctccggccgcacggtgaccgcgctggcccttttggatctgccggcaggctccggcatctacaactgcttcgccggaggtaactttcagcaattgccccgggaggagcgcaccaaacagctcctggagagcggcataaggtgccactgcaacgcctgccagttaacgcactcggatgatcagttccataagtttcatcgctaccgttgtgataacccaaactgtatggagatcttcacacccaacgccctgccccatgctccaagtctgcgttggtggctatccgaggagtacacccagccggagttcaatggcgccgacctgatcatgtgtccacattgcggcgagtaccagaaactggagtggttctgggccttcaccacgtcgctcatcgattgcgaactcatcgaggagaggtgcaaactgtacgcggccatcgagcgcgccgagaaccaactgatggatctgcacgagtgcaaggtggctctggccaggctgcttctggagcagtgcctcatggtgcaccgcgagggggccacagtcctggacgattgggagttcaacaaactgggctccatcctcagatccgtgctgcccagcgtgatggcccagtatggcggacagtcaatcgagtacgtgaagtacttctcctacttctgggatgtgatggcgctgagcaactacaagtgcaacgatcgggagctgatgcaaatgctaaatgctttggagttcatagccgacgagttcaaggatatattcatcaactactacgaggattatattgcgcccaaatttgctgaagagtcctatggcagtgtcgtagatacgcaagtttag

SEQ ID NO: 37866 - protein, 882 aa, DROSOPHILA
MASSTSSARGNNKAATTNTTAATAPVSTASSAAVSGSGATSAAATASAPPAVTLSELIGQQLKHLNADELLHKDELQLLLLITPVQRQKLSRNLEDGDLEASTSAAPLSRPENGEEDDDLIGAVGGLGISSPTTTKEPVLDFRPHVLKWFQHLRHQTGHFKSEEESRRLREAGNDSYRKERHPLKASDLFTEAIFLAPARNTLAAALAHANRSLVLFDCGLYAESYDDCLCALDLGYPEEYLPLIKLRQAACALKLRNFALCEEHLHELLHIELNQVFEARTHELWHQCEVLKVERFEMAVQTGDDLDINDSKAFEIAWLDNSSSLHTTRAVAKNALIFESEAVAMVPSGNCRVCDYCGITQFIPFPCIYCSNRLVVYCSRQCRFKHAAIHAVECFGHQIELFESFGEVFGMPRLLQLAFRMLITGLPELLGHCRKKPTLSKLWSAINGGLQERQDIAYSAVLRLERLKEERPTDTVIALALAAHILSIYLSKCTTFFDQLEKSLPTASRMSSAEWELLCAALLMRHIGQLRHRSLTACRSFVLPADPHVFSPLNEFQLWAAPMRLQEGHLHLLAGEVAVVSYSVYPDTLNLCRHSCSSTICAKFSGRTVTALALLDLPAGSGIYNCFAGGNFQQLPREERTKQLLESGIRCHCNACQLTHSDDQFHKFHRYRCDNPNCMEIFTPNALPHAPSLRWWLSEEYTQPEFNGADLIMCPHCGEYQKLEWFWAFTTSLIDCELIEERCKLYAAIERAENQLMDLHECKVALARLLLEQCLMVHREGATVLDDWEFNKLGSILRSVLPSVMAQYGGQSIEYVKYFSYFWDVMALSNYKCNDRELMQMLNALEFIADEFKDIFINYYEDYIAPKFAEESYGSVVDTQV

SEQ ID NO: 37867 - DNA, 2195 bp, DROSOPHILA
atatgcctgggaactgaaaagtcttacataaacattgttgcaaaagtgctacaatgtgattgttcccaatgttctgatttgatacagtgcttattcgatatgtgtgcacattacatctccctccttttggaaaataacgtaattttatgaagttattttataattaaaaattttatatatatattaagaaccctcttcttgcgctcttcgtcaggactcaccagcgctcggctctcgtgttttcgggccccgtcagcaggcgactcggggcctgtctagtaacatgttcgtgtaagttacgaaccctcttcttgcgatcttcgtcaggactcaccagcgctcggctctcgtgttttcgggccccgtcagcaggcgactcggggcctgtctaggaacatgtttgtgtatgtgtgcattcggaacaagtgccgttggtcgcactcagggtgaggggtcaacgggggaagcggatataaaagcagcggggcgggagaagaggtcccagtctcgaacggacacataacggaaccgctagcagatcgcgaactgaatcttaaaataaagctaatcgtaaactcgaaccctcttaactatcttgactattatttggagaaccacagcatgttggttgtcatatcaaggtgaggtatgcggcagcgagtgccgagaaccctgatgcaagtggaacttgcgttaacttatatatatatattgctttaagatttatctgacttctgttggaaacgtgccggcgattacgacgatgccaagtagttggcacaattcaattaaacagaccagctggcaacagcgtgagaaaattgattccagtctgactagtacacgatacggtaataaatactcaataacgtggcatttttaaagtaatataaattgattaatttgaaccaacgagctttcttgacttttattaccaatattttacgtcaaattaagttagtcagatattaaatgcaatcttgaaatatgagccttattattaaatgtcttctatgggctctatactcacctgttttctgacacccggaaagatgactaaaaatgctacatagaatgtggcaaatagcactgagacggctacgattgagacatctccggttacgggtgttcgatttgagaaggaatatagcgttggtcccccatcgtctcgaaacgcgtcgaaccagcctttcatgctggttgctgttgctgatgtcggggttttgggatctatgcgagccaaaaaaattgagatattatataaaaagtattgcggcaaaaaacgccaaaattaatatgacggatatatctgcgtggagtatttggcaagagcacttaatttaaaagatttgcattgcaaaatcatgcgaaactcggcacaactgatctcatcgcatctggcagataccacgtatctgcaattcgtgactaagcttttaggtagcagatactttagattcaagtggcaggcatctcaatgcaaaattagtttggtaaacagacaaatatatgcaaatatttttgttaagttcattgggtatttaagagtatcacccggaaatgtaaaatgtataaaagttaagtaatctacacggggaacgacataatgttcttttagaaacagaaacaacccaaattgatttgaccgctctacaataatgtttgcaaagttaacaaaccagaaatgagacctagagccggatctaaagacaaacaaattaccaataaaacgctacgtcgaaatctttagatgccatgtggggggcttgaacaattaagaaaccaaaatagcaactgaaaccggcgagaaaccatcatcagcttcgattgttgatttctgcttctgaagcaatgacgtaggcaaaagttataattaagtgtcgataaaattgaatggatttaacacaatggctgcacggtcgtagcgattttataaataccctggcaaaaatgaaaaacatatgctaatggcaatcgagggaggaactcatgtattacgtataattcagtatatgttatcttggtaaatgaataaataaatacaaaattattaatctaaggaaaaatacccaagaatgtattactactttttcactaataaaataatgatttgatgacctgtaccatttgtagtctgtgtatatttttgactttaatggcccacagtatttcatcttcatatttgataaataata

SEQ ID NO: 37868 - DNA, 195 bp, DROSOPHILA
atgaaaggctggttcgacgcgtttcgagacgatgggggaccaacgctatattccttctcaaatcgaacacccgtaaccggagatgtctcaatcgtagccgtctcagtgctatttgccacattctatgtagcatttttagtcatctttccgggtgtcagaaaacaggtgagtatagagcccatagaagacatttaa

SEQ ID NO: 37869 - protein, 64 aa, DROSOPHILA
MKGWFDAFRDDGGPTLYSFSNRTPVTGDVSIVAVSVLFATFYVAFLVIFPGVRKQVSIEPIEDI

SEQ ID NO: 37870 - DNA, 5348 bp, DROSOPHILA
aaaaattctttactttactttaatggcacagcacgtccttaattactaaaatatttcaagagggtgtcataatcatccatatatgattatttagaccttttgggcttacgttaagttttttggccagtgtggtcaatcatgaaccgttaacaaccctttttaaattcgcaagaaaaatacctgatttcctatacaccattttgacgatcgtttgacggttatgtcatctagtccctagcttcaattccttcccacactcacacatggctaagactgcagagccgtgacgaaccaagtcacctcaagagatgatcgctgcgcatgcgcataaccgtaagattcacacatgcctgggaatcggattcggaatcagcgaggatgtgaatgtggacggggatgagaatgtgtgtgtgtggatgaggaacaagagaaatacattttgaaaatttaacgatgcgcacattttattaccgcaattaattacaaaaacaacgcggccaaaacgaaatcttagtcactttatcagagaggtccagtggataaaaaaaatgaaagagagtagtgcacggagagcgatctgaaaggagcgataaggtttatgatagatgtgactagtagaacgctactagcaaatggttctgggtctgcagattgcagctcctctcgtaattggaggcgcgacagtttgtctccagcagtcaaacctggttaattggagaagagactcccggtctatgagagagagagatacggagcgagaccgacctgtacggtcaaacctgtttctcgaccaattaaattcgagagcgggagcgtaagccaggctttaggcccggccaaaagacgatgacggctgctgtgggctgtgaggccaagacatttcgtgtttcgacgcgtaacgcgacagttccccgggctaaaaagcgcctacgcctcagaaaatagtcatccgaaacggtaacgcctgcggtctatgagtgattcttcggtgtggagaagaatgggtttcaagcacgccatgctgcagcgcagttacgacctttcgccctcgccggcgcgtacttcacccaccaatggagtccagaacttgggagctggggcacagttgccaccggctcaagtcactgactttagcatcagtaagattctgggcaaggagcgtaaatccgctcaggatacgagcacgaatatcctggatctatccaagagcagtagcaacagtattaggagcccacaggctcttggagggctggcaataccatcaactccttatgcctccggtgcctactccatgttgccgccagatttggtggccatggccaatgccaccaagttctatgcccaattcttcccgcacttactgcccgcctatgcggctgctgcagcggctgccggcttgagtactcctcctacgtcgccctatcaaacacatcagcatcagcagcatttgccaaatcagcagaaacgcttctttgctccctatgtgatcaatggatcggttcccccaccaccaccactgcagcagcaacagcaacctctcatacgcaccaaaagcaccgcatgcactcgtccggattgcccggagtgcctggattattaccaaagattgcagactggtggctataagcagaccgcacctctcatctcacccgccgcctcctcggtgagcagttccaccggatcaatacgtcctgtgagggatctgattatgagtgccactggaggagccgccagcactaacatctcactgaccaccgtgaccaatctgagtctgaactcggtccaggcaacggccgtcggaatgatgcccaagatgaccggtggactgatcaccacagccgtcggcagcaacagtggagcaatcggtggtatcggtggatacaatgccacatccgccgaggagatcagctacaagtgccggatttgcgagaaggtattcggatgctctgaaactctgcaggtgagattttattattgttattaaattattattacgatggtgttctgtttacaagtatatatcatttatgacaaccaaagcgtttagttatcagttattagctttagaaaagataattcatcctaaatatattccaaactctaacccaaggattcaatttattcttaaaatccctcaaaaacgagtaaacacaaaacacccacgaaacaaatttttatatttatagtgtagacagaattttaattttttttatttcattagaccttcaacttttaaaaaatgaaatacaaatattcaaaaaatatatgcaattcccaattagaatttaagaatgaaatgatttagatttgccagattatattttatttcagtttgctgctgtttagttataaaaaaagcgaaacgaaatgaacgattgtatgaaattttcttataaattaaatagcacaatcaaacttatacgtaaagtcacttaaagagtttgtacttacacacaagcatttggcaaatgcacgcgtatttttttttttaattataagtaacaaaaaaattaatgatttagatctcatcaacggttacgtatacatttatcacaaagaaatatgtgtttatgcggagtactaaatgattgagaattattattgcaaagccattaaataactttaggaatttaactcctttcaaaacatctaagccaagaacagcattaacctttcacatggccatacatcacataagatatcgtttggccggtcctcaaagtccacatccacacgagatcctcccaaaacgggtttcttcaccaacagagataccatatggatttgggcggggcctaaaaaacagagaaacagtagtctaattggaaggcggagctccgaagaaaagagtggagattcaagtggagtggggaagagagaggcagcgaagaattgagtgccttatgcaaatctcgcaagcaatccgagttcaaaatggagtcggccgaaaacagaaacagaagcgggcaaaaaagagagaactggttttacgcatgggtgcagctacaagatacgttagaaagggccagacgccgagcgagaggtaatcacaaaatggccactttgggaaagaacaccaatttcagtagctaactgaagcaagccacatttgaagttgcaacaaaattattacaaacaatggggaacattcgaatgtgtaaccatggtattttttgcatttctggcttattttgtataagtataaatgtgtccaaagctcagttttcagtaactttatattcgaaatcttccaatcctcactagaacttatagaataaggtattaatattaggacctaattaaaatgttgctaaacatactcatcttgaaagcctcccttccaaaaactaactaactaacgaacagtttgtagaaaatcgctgttttatgaatttcacaacagattttcactacctcaggttttttattaaaattttaaatctcttactattgctacaatattactattgctaagctaatgtatcttatttatttatcttatttgtctattatgttcttatttcaggctcatgaaaagacgcacaaatcgccgcgttacgagtgtgcggattgtggaaagggtttctcccagctgcgaaattacaaatatcacctgtccgttcaccgaggaaccaaggagtttgccgccgagtgtcccgaatgtggcaagacattcaacgataagggatatttgagcagtcacctaaagattcaccggaaccggaaggagtacgagtgtccttactgtcccaaatcgttcaatcagcgtgtggccttcaatatgcatgtccggattcataccggcgtgaaaccccacaaatgcaacgagtgcggaaagagattttcgcgtaaaatgctgctcaaacagcacatgaggacgcacagtggtgagaaaccgtatcagtgctccgtgtgcggcaagtcctttgccgatcgcagcaacatgaccctgcaccatcgcctccactcgggaatcaagcccttcagctgccccctgtgccccaaagccttcaccaaaaagcatcacctaaagacgcatctgaattaccatacaggctgcaagccgtatgtctgcccacatcccaactgcaatcaggcattcacccagtcgagcaatatgcgaacccacgctaagaagtgtcagtaccgtccgttggatggactcacggtcacatcatccgcacttccagtaccgggaaaacaacaaacaggtccaccgcccactttggccatggccatggctcaaacatttcaaatgccgccacctcctggagttctaacacctggatctggtccatcccaaccgccgagtcagcaaacccttctcagcaatctcaggacattctaaatgggtggaatcgttgtgcccggccagtttcaaccaaatttgtggcaattacaaagtgcagtacttccactgttgttattcaatttacatttattttcaagcaataattttgctagaaattaaattaggaatagacattaattattattaaaataggcatatatattggccagtcaataaagtataatatcaaatacaaaaggattccaggattctagaaataatattttggattggagatatgattgggagtccaactaggtaatttcgcttataatcagataacgcagccttatttaattcaaatcttctagtgacaaaaattaaaagatgtatgtttttttagtaaacaaatgaacgaaccgttgcagtacatttaacatatttaaaagtgcgctctcactcagccagatggcgccacctgatagtttattaccactgtaggtgtgttgagtaactaaacgaaatcttgctgttaaattgtattcacagctgtcctaaaaccgagttggcagcccttttcccctcaaaaatcgaaagtctgttaatatatcgataagtcaaggcaattgtcagtggtaccgtttcgtctggtatgaccgtgttgtgaaattttgttagaaatttacaatataagcgagcataaaaaacgcaggaaaagcgcaaaaaaatcagtaaaacgtgcctgcggacccaggctgcggtgcgtccagttggccgtagaaagcctttaccaaattcgatcgaactgagaattcgattcggttaacttctgcattgggctcaatttcaccattgcacacgtgtctggagcttttcctgggttcggtcacctcctcctcggattgcggacgatcccgtggtagcgctgggaaatgcccagcagaggacggcgggcagttcgagattgttccggcaaagaagcaggcgcaactgcaacagacgctggtcaccaacgacagcaccggactctcaatggctgagtactggcagcagttga

SEQ ID NO: 37871 - DNA, 1782 bp, DROSOPHILA
atgggtttcaagcacgccatgctgcagcgcagttacgacctttcgccctcgccggcgcgtacttcacccaccaatggagtccagaacttgggagctggggcacagttgccaccggctcaagtcactgactttagcatcagtaagattctgggcaaggagcgtaaatccgctcaggatacgagcacgaatatcctggatctatccaagagcagtagcaacagtattaggagcccacaggctcttggagggctggcaataccatcaactccttatgcctccggtgcctactccatgttgccgccagatttggtggccatggccaatgccaccaagttctatgcccaattcttcccgcacttactgcccgcctatgcggctgctgcagcggctgccggcttgagtactcctcctacgtcgccctatcaaacacatcagcatcagcagcatttgccaaatcagcagaaacgcttctttgctccctatgtgatcaatggatcggttcccccaccaccaccactgcagcagcaacagcaacctctcatacgcaccaaaagcaccgcatgcactcgtccggattgcccggagtgcctggattattaccaaagattgcagactggtggctataagcagaccgcacctctcatctcacccgccgcctcctcggtgagcagttccaccggatcaatacgtcctgtgagggatctgattatgagtgccactggaggagccgccagcactaacatctcactgaccaccgtgaccaatctgagtctgaactcggtccaggcaacggccgtcggaatgatgcccaagatgaccggtggactgatcaccacagccgtcggcagcaacagtggagcaatcggtggtatcggtggatacaatgccacatccgccgaggagatcagctacaagtgccggatttgcgagaaggtattcggatgctctgaaactctgcaggctcatgaaaagacgcacaaatcgccgcgttacgagtgtgcggattgtggaaagggtttctcccagctgcgaaattacaaatatcacctgtccgttcaccgaggaaccaaggagtttgccgccgagtgtcccgaatgtggcaagacattcaacgataagggatatttgagcagtcacctaaagattcaccggaaccggaaggagtacgagtgtccttactgtcccaaatcgttcaatcagcgtgtggccttcaatatgcatgtccggattcataccggcgtgaaaccccacaaatgcaacgagtgcggaaagagattttcgcgtaaaatgctgctcaaacagcacatgaggacgcacagtggtgagaaaccgtatcagtgctccgtgtgcggcaagtcctttgccgatcgcagcaacatgaccctgcaccatcgcctccactcgggaatcaagcccttcagctgccccctgtgccccaaagccttcaccaaaaagcatcacctaaagacgcatctgaattaccatacaggctgcaagccgtatgtctgcccacatcccaactgcaatcaggcattcacccagtcgagcaatatgcgaacccacgctaagaagtgtcagtaccgtccgttggatggactcacggtcacatcatccgcacttccagtaccgggaaaacaacaaacaggtccaccgcccactttggccatggccatggctcaaacatttcaaatgccgccacctcctggagttctaacacctggatctggtccatcccaaccgccgagtcagcaaacccttctcagcaatctcaggacattctaa

SEQ ID NO: 37872 - protein, 593 aa, DROSOPHILA
MGFKHAMLQRSYDLSPSPARTSPTNGVQNLGAGAQLPPAQVTDFSISKILGKERKSAQDTSTNILDLSKSSSNSIRSPQALGGLAIPSTPYASGAYSMLPPDLVAMANATKFYAQFFPHLLPAYAAAAAAAGLSTPPTSPYQTHQHQQHLPNQQKRFFAPYVINGSVPPPPPLQQQQQPLIRTKSTACTRPDCPECLDYYQRLQTGGYKQTAPLISPAASSVSSSTGSIRPVRDLIMSATGGAASTNISLTTVTNLSLNSVQATAVGMMPKMTGGLITTAVGSNSGAIGGIGGYNATSAEEISYKCRICEKVFGCSETLQAHEKTHKSPRYECADCGKGFSQLRNYKYHLSVHRGTKEFAAECPECGKTFNDKGYLSSHLKIHRNRKEYECPYCPKSFNQRVAFNMHVRIHTGVKPHKCNECGKRFSRKMLLKQHMRTHSGEKPYQCSVCGKSFADRSNMTLHHRLHSGIKPFSCPLCPKAFTKKHHLKTHLNYHTGCKPYVCPHPNCNQAFTQSSNMRTHAKKCQYRPLDGLTVTSSALPVPGKQQTGPPPTLAMAMAQTFQMPPPPGVLTPGSGPSQPPSQQTLLSNLRTF

SEQ ID NO: 37873 - DNA, 22150 bp, DROSOPHILA
ctttttgaatgcatgcctcgccctgctcgcgcccagtcctcctcccccgaaaagcatgccgaccagcaaatgttgcccttttgcgtttgctgtctttgcagaagcaaaatcaataactgagaaatccaccacactgctgctcttcgtgttgaattctcaacttccgcagcaaagtgaaagacatttcagtctctgacggcatttcgtagcgcgcaaacactttcttcgcgtcgcgctccccatgacatatttccaaataaaaggaaaaagctgtgaaagtaatagtggttaattgtttttaagtaaaacgaatttctattgtgattaaagcgcttggttccgttgcgtacgatagtgtttttcgttaagtgacaaataaaatcgtgctcttgttaatctaaaaattgtttaacctaaatgcgcaaagcgattatgaaataagaaagacatttgaattttgtctttgttttcacaagggtttttcgattcactccttttcacgcaacttgtctgcgaaaccgccttagtagtttcgctttccgaaacgcatttaggatcggtcttggggttgtgcgtaatgtctgaacccaccccattttactcggcaatgctccagcaccgaccaacccacttttactagccaccacatacagcagcagtggcagcaacaacagcgtccttttagccggcaaagtcttgggattctttcttttttttttttgctttaaacatttctcttcgaatggcgtgatacttcagtccgtccacctatagcttttgtcttcaatcacgcactaaatttaagcacaaactgatggtagaaaaaagtctagtgccataacaaacttgcctttctgttgcctacttttttgggccatcggcttcatttcatattattgcagttcatgagcaaacatgctaatcgtgttatcgtatgacaattggtaaacacaaacactgagagcgccgatataatcaagcaaagtacactaattaaatatataataaatcaccaacggatcctggcatagaatgagccaaacttttaaaactttaatgcacggcaacgaagaagtcagagacggagttccgttctcggagcagcagcagtcgtcggaggatgtaccggactccacagcgacaacaacggcgacttcaacagccggcgagcttggtggcggcccaagggatggcggcgaggatgatttcaccgatgacaacaacttcgaatcgaatttgcgacgtcgcaaaggcaaaataatttcctgtgccaaggagaccatcgagaatggtgagtgccaaatttagaacggaaaacaaaaactccatgaattttcggtttcatatatatatttgaagtcatgcgccacagctctttatctatttgtattcgattgccaagctccggcagctgaatatttgagtttaccgcctttccattgtagacatgtgaaaaacaaactttctacctgtttatttgtcataggtagatactatgaaattgctgtttctcatatgaatagaaagaaagaaagtaagaataaagtatctatgaatgtggaaacttgcacaccattttaaagtttgtacagcatgcacacaatataatagattttccaaccaatacgcttaatcatgtgctagtaagttaataatttaacacttccgtgcgtttgttctgccttgggaccgacatgaaagtttttaaatgggctgcgttttcgcacgacccgagcaactatccaattacgctgaaattactttcagattggcgcacatcctgtcagcaatagacaaataaaagaaacttttgcatgcatttcactcagacgtcggtgtgcatgtactagtgggtaggagggttaaagaagcctcattgccattgtcccacttgagtcctttgtacagcggagctattgaaaagcgtcgccgtctgaaggaaggcgctatttgaattatttatgcgaagatgacaaaggaaatgcgctgcgatccttgcacatcaccgccgaccgagctgtcggttattccccattggattactcattaattgcttgggcgccgcgctggctaattttgcatcagccatatacccatatcgattgtcttttccttgttggttagcctagtctggctagcctagtctagtagttcaagtgctcacctctattgggccacatatgaagagtcctgccattcttattcgcctatgtttacttgcggtgactgtcttgagggtagttaattaaattcattagcttttatgggtcaaggttgcgtgtgtataataatatatggggtgtctgtattggattgatggctcaacgacatttgtaatgacaaacagaatgaaaatgggctacaatatcggctggtataagggttggtttctattttctttttcatgtcgtgacttctgacaaccatttgagtgcaagaaaatggagttatagctttcttgaatagtagctgatcatagtatagatattacatttttcttaaccttatgtaatcattaatcttgtgaaatatttcttgcaatttgccgcgctaacaagtaccatgtccgtttgaatttctaatggaatcacacggtctcccacttcgttagctgtgaaaattgcacaacaaatttagcagcatgttgtggcgtttttcgcgtaagctcatggagactatcccttccacccacggattcctggcctcgattggctcctcctcatcagccaacgccacttggttgttggcgcgagtgttggggttcaggaagtgcgcggatttacgtgttgccaaaatgtcagacatgacttttaaactttactggcaatctgggacgaccgagtgacgtggccaactcactcacgctcctaccaccgccagtgttgcattagccgacaaaccatttgactgaaaatgcattgcgtgcgctaggaattagaaggaaatttggccaacatcgttggaagttcatcgattttatttcgatcccactgtgctgcaaagcgcgtgctaatggaattgaatcatactcactcatatctaacgtcttctcttctcttggcttttgtgtgcctcatttctttgctcttgtctgtatttgtattcacatttctgtttgcctccgctagattgttttgttgtcatttttatttgcgttagcttcagggcattgcctgtaaatttgttagcctgcctgccaccggcattgacagctcccctgaatgttgagggcatagatgcgccatgattctgacagttaaccccttttatggcattgttgtcaggggttcaagtggaaaataaatttctttgagcctgccgtcgttttcaaaaattattgttcgatatttatgtattattgtatgctctgaaagtgcatagaacttaaactttaaaacattctgcgatagttctattcctttttctgcgatttgtgatttgagtgaacttgcattgaacttttattaacagtattaactaaggcagttaatacttttttaaataaggctgtagtaagaactaaactgtttgcgaatgtttacacattttagttgtgtattttgagcaaaacagcagcacataaacaaaaaccaggctaaatgtttgtttagtcgactttcttctagggtttttccttcgaatttatattaatggattttttctaaggacgcttatggctcagcaaggagcacatacattaaaccaaggatataaaagctttatttgtgtcagatttgcagtttttttttgtgttggctaaaggggaataaagacgtcctttgtgctcgctttcagttgcacttgaactttgtggtatattcaaaaaagaggtcgttgcaagcccgacaatatcagacctttcataaagcttacaacatgctgaaccattattttgccatttactttgcaaaactgagaaaactgatttcttaaataaaaaaaaatttaacgacattttcattgtttgtgttgcatacttcatggcgcttaagtgcgcatttcacccaaattccctttacttccgtttcctctgaaaaattaatggctgtttctgttggtacgccaaagcaattgaatggaactgagtgcttaagaaaaatatgttctatgtggccgccttttcttaaagagtgtaaatggcttcgtataaataaaataaattctttaaaatccctgttgctggaagtcttttatttagaacttatttcccgacaacttggataacaatatagcaaattttcaaactacttatcagccatatctgctattgcagtttgtttttagcaaaaccacagtttcacaatcttgatatgtaaatgcgtggcaagatgtgtgcacttgtagcaactgagctacatacatacatatagccataataccaaccaggttcagcagcttcttgcctgccggcgtctgcagttttcccgggcgatgctagttacaggcaaccggatgtttctgggtacgtttccatccgatgcatggctaccatatgcttgggaaaatcctgcctaaagctcagactgactgacacccgacccgatgtgggatacttacaggtaaagaagctgagcttgcattcgccggcaatcccagccacaattcggttttcacctgtgcgtggttgtgttttaaattgttaaattcatcgtgggcaaacatcaacgtggcttctgtttcgatggcatcgagagcagcttaatttccgtggaaatcctctgtgcacccacacttttcgttagttaggtttctggtgaatcgggtagcattttcatttgcgtagctgtttcccggttatggcttacagctttgattggctgctaatctgattggtttcagtcaactttttgcactttttgtccagaacgagcttaacggtttttttttttaataatagcttttgtttaaaactggaatattattcgagctagtcaaaaatttatgagctttagattagagtctttagattatattcgttagttcaacacatctatggctgatttagctttaatatgggtaacgtcttcagacttttaaactaaactaaagcactgattcaactttgatttcaaacaaagtctgaaaaggtctacgtacagtaactgctagggagttggcctacattgatgggctgcctggaaagccagacaatcggacaatcttacctgcattcccgatgcgcataacattgttgtcttgatgatgctcatgtccggatggcttagccaaagccgtaaccagctttgcaggaaacaataggcggtatatacagtgcacaaaacccaattccatggcaaaggaagttactagacagaccttcctagcacctcttcgaccgacgtgctttcgtccaagttgagctgaatcgcccacggcattgctcttcgtttgctactcagccacaaaaaatttccttccaaaaaagaaaatgaatataaagcgaaaaaaaaacgtctgtatttatattgcatgttttggtttttcgccacgggacttggctgtagtccaaaaatacaccgcatcgcgaatccttggtttgcgcggcacttgacatgagttccttaaaactgagagtttaccaaaaatcatttccatgcaccaagaaagcccctaaggaatataaaacattttacaattgcctatcatacaaaatatgaatttgtttctattgatttcatttatataggtgaatttggttcgcagtgtaggaatttatatttacaagtcgtgccgcaagtgcactttcaaattctgccgaaaacggctgaaatagaaattgaaaaatcaatgaggccaagtcgaagttgaatgtgttttctgtctgcggaagaactttattagatccagttcgaaactgtaagaagcctttaatattggcatttcgcttttatatttttggccgacagaagtttgtatgtaatgtaaaggttcaatatactcttaaattctcttcaaaggcttattatacccaaaaccctgataggtatgctttaatttcaatcaaacattatcttaaaaatgagtaaatattcttatggcaactatgtttttgcaattattaataaattgaatttaatttccaattgcttggaatctgtgataaaatgtattttcatatgcttatcattcttgcggttggttgcaaatcgtgtcccgttgatgtgcgcaatttagttatttaatttacatcagcgcaaaatcaatttccggttgctgtacgcagggcaggcgaagaagcggaaaattgctgtcagtgtcaggagagtcataatgtttatttaataaaatgacggatagtttcggacagttatgaggattccctttagtggaaattcgagacaatttgtccgatggaatattatttgtaaaatcacaattgaaatttaatgcatgtaatcgactatataatgtttttaaagcgaaatagtttaaccataaaaaaagaaaattatatatcatacatttgtggacaagaaaaataatatgttttacatcactggccgagtcgacttattcatttttgtccgttataagtccgtacaaagtactataaggacataaaagaaatgtgtagtgatatcatatgtcaagactttttctacgagtcctcactgtacaagcgatagtgtgtcctatcttgtccgccatcgatttgctccttaagtggtttgtctttgcgtgttctcgtcatacatcttgtttgccttgctgctgtttagcagatgtccaagtaccagtaaatcaattatgttggtatatctagaaagtaaatatatgatattatcactgatttccgtaggcttagcttaagtgctttgagctaaaggtatttcaggtattctgtctgcttcttttgacatctttaatgggtttctatattgatgaggctcaaaaccgcactcaaaattgttgagtgtgagtcgagtggcaaaaaatggcacccttgcagttctgtagataatctagataagtttgcagttctcttcattttcaaggctcttaacagttaaaaccgaattttgcctttctcagtacatggttttatggtctttaaaagcagcaatcaattttcatatacagaagttatgaaaagcatggcaaacatgaaaatttatttcaaactcagcaattggtcaaaaatctcaatagcgggttttcagtcagttaaaaagtgggtttatataatgataaaaatcttcactaatttaacttgctaaatatgtgttgaagaattcctgttaaattcaagatttacttcctctgtcgaggggctattaactaaaagcattcgaaatgacaatgttccaaagccacattacgaatgcgttatggaaagaggagaattatgtctagcctatcagcaatttacatttagcttgtcgcagattgaattacaatcaaaatgcgattttcccgcaattggtttaaactaccaattaaaattattaaagtcacgacgagtgcttgttgcatctttagaaaacccattaaaatgttgcatattatactgacagcttgtccgcttttatgtgtacgtatgtggacgggtattcgcgttataacatggcagcactgacagccaaacagtgttcgacatgggggaaactttgccacccattcacgtgtccttggaaatttcctggttgtctggctttcggcctgctcgcctgttgttatctcgcatccttgcctgattttggtttgacctaagtggtttttcattataaacgtaagaaagatttattatttaattttctcacataatgtgtaattatgtctgcaagctttttctttttggcaacacttgtaccctattagcgatataattatgctggcctaaatgttagacaccaaaagggaacataaaaattaaggacaatatttaacctgattaaagtgtgcgttccttacaaaattgattattaaaatcaatttaaagaactgctaaataccaagaattaaattgttgagatttgaaaatacatattggatttcttcttttccaaaatgctttcacagttgtcaattaagtcttaggggaatggtaaaagtaagttgtgaacttctcaagttgtcgccgttagacctcattaactttttccttagccaactgagcagaacgcaagtctcttttactgtgataacctttagccatttctgttcaagtctggcatatttatgcaaaagacttgtaacttaaatggtagattaagtttatctaaatatatatttcattgaatggaattgggactcaaagttgcctctcaattgttttaataaattatgttttgattccgtggaaacgttttgattttgaaaaggcagctttcaattatatatgcagattcaatcaatatagtcgaagctcgctgaagagctcgttttgctgaagagtccctaacatttatccccttttttccgtttttcccttgtcgttttgggtggccattttgacagtttgagtggttttggttgtcagttatagcattcgagagcaaaaaggactgtaaaagcatgtctataaaaaatccttttgcattaaaaattatcacagactgtgaggaaaactcgagagagatagattatgtccgtgagtgatcttgtgtgatatacaatatattttgaaagcctcttagtcacgacaaaaatttagacttaaaaatgcgatctaacatcacagtgagcacctttaagccgcttggtgctttattgcattagattgataactgaccactttcacttaacatgattaaaactcaattaaggactttgcactctggtgttcaaaaagacacatatccatgccggcgataaagttccactgccttttactgctatatattcagttgcttgtgccccgcacacaaatgcaattaatttatgctgaccaagcttgggtccttcaatgttcactgtcctgtcaaccgctttggcagcaaaagttgcagattaactacccaaaggggaggcggctggataaatggaggctgtcggatggagagtgggcacgattacggggaactcagtttgggaacattaatcacaataagcactccgtgcatcaataaaaatgtttcacacaaaacatgaccatatcctgctgtgcagcaggatatcgtgccacttaaacgtgaaacgggaaaaaaacaattcagtcggtcgatttttaatacaacgatgtgttaaattcgcggtatttaatattttataacaaaggattttatgaagcatgcgtacatatgtcaggcatattaactctatttaagcgtatgtcattaagagcaatttgatgcgggcgaaacttccaattaaactgcatattgaagagaataaattcgaggtcattaggcattcgcctgtaagccggttctcaaaacaattgggtgggtaattgcgagagttctttgatatataacaaacaattaaatgtagttatgatgtgcaaacttaagaaattcaatttgctttcacaacatttaataaggatgctaaccatctcccacatttcacatgcggtggtgaaaggacatcgtgtcaactatactagttaagtgttcacttcctcgaacggctacctgacttgactcagtgatgattagatgatggcggtgatgacgacaggatgtgctcccttttgtgaggatgttgctgaattgatggaatgttgggatggtgggtcatcatcaaaattacatcatctagtttcaattagacgcaattcaagctggagccaattaagtcaggcatttagtagcgagtgttgaaggtttgctaatgagcttttgcagctcctctttggctctcgtcaccattaaggttaattaaaacataaactgttttaactgaatgcttaaggaatgttggtaatgttgaggctgcagccgtcagacacgaatctgctgattaaattcactccttcatcccgcttatgcaacaaattatgcgttgctgtggttctcggcccatggtttcattttggcgcccagcaaaagagcctgagtggttgggtggttgggttgcccagagccgatttcattaattattcaagacacagtccgccccttaagggctcccagtgccgctgatttaacagccgaaaacattggctggcacttcctttgctggctcgtcttgctcctccaattggagtcctcgtcctcgtcggtgtcaacttaagcatgtgcggactgtataatgaattgtgtggttcatgctgatggagcagctttctgatgcccaactcttgatgtcgtgtattactcacccaaattggtttggtttacaatgtattgaattaggaagtgtggcttgattgcacttttttccaacttttgcttgtcacaacgaatggggaacatttatttatatttactcagtaacttctcttacgaggtctattaatgtgactaatatagctggggtatgttcttaaataatttaggctattagtttttatatcgatttttgttctttattaagctaaatcacgtgatttcttttttcttttttaaggacgctctatattttatggcttgtaacccttattagcatatgccgaccctggccggcaataaagtgatttctagccgcaagctagctttttatttactcacgatgctttagattttattcgcaagtcccgcaggatatagcacgcgtgctctttttcgcagaggtccttctggctgtgatccattcttttgtcacaattttttttttatgagccgagcgtgagggtgcgatgtctaaacccatttgtgtgtttagcatatcaaaatggctggcaatcgtagagcggttacattgattgcgtatgagtttatattcctccgggtcgttgctattccgcttatggggaataccacaggcaaattcacagctcatttgcaatgcaacagcatcccattcgatccattcggcactggttaaaggtttcgattttgatttggatttggatttgcattgttcatgttttatttatggaactaattacgaaattccacatacgtgatttactcggttgcccaaaatatgcagacatcaaatcgtgctgctcctgcggtttgttcatgtcgcttataattagttttatacatatgtacatgtatcgacatacttataagcgttctaaatatacatttatctaaaatttgcttgctctaggctcttggcgtgcaccctaattaaattcggttttgttcccaaatcggaggcaaagtacagtttaagctgtataattgagtttgttacacaaatatctaaatattctaatgagtgcggataggggcttagtaaaatgttacgatgtgtaattaatgatgagcaatttcgcctgtgcaaaaccaagctgaataagtcattacgaaatgtggtctatttgagttgacgaaagctttttgcgaattaagggattttgaacctttcaaacgaattcaattttaattagaatatttataatgatgaccgttacgctatttcgagtcttaatgaacatggattttggaatgtcccattgaaatttaaaacctttttttattaccctaatattttttagcgagggagcacacttgcaaagtacttttttacaaccttatcgttaaatggcaaaaacattctgaccttcgtaatgagctcggtgaacttagaacgaaccaaccattattattattcttatcgaaagaaaacattggcagggaaccaagccaacgcttgaggtcactgcaagtggcatttgtcattagccaaaattcaagtgaaagctgttaatagtcacaaggacattaacggtggcggaatgtcctcgcgcgctatcaattttagtgcagcttcgactgtttgtttttcctccttgctattttgtcttctcgctgaaatattacttacccgggcgaaaataagttcatcattaattacgaccccgagaaactgtttgaaaacttccaaaacaatttacattgtgaaataatatcgagtttttcatttctaaactaagtttggtaaagcacttacagttgtaattgtaggtttttatcaagaatagtgtgaatttgcagtaaagtttttactgctgtcgtaaaaattgggattctgattatttaaacagtcattttttttttttatcaaatcctgccgtttacttgattttgtttctttcggggttaaatttcttgtcagcacttcccctttcaccacttggcttttgcatttgttgatgtttctatcttttctaattaaaagttccggcaatgttggctttctatgctttaaccatgtcaggttggcttatttgcggttcgtattcttctcttcctttgagctgctttggcctgtgtgtacttgaatcccgtatttttacctatgctatgttatgcaacccatttttgggatagtgtggatttatctcaactagtctgtaaatttaatatgattactttgccttacttttttccagcttcccgccaactacgccgcaaagtgccctacgcaggtcatttgatgactcctcgtcgcctttggctcaataaaattcccacacaatgtgatgtggttattgaatttcctgaggatgcaccagacgaagcgctacgctggctcctagcccgtatccgctcgcagccgccggctggtctgggtctattggtccaggtcaaggcgcacgagagtacgcggcgaaacgcgttctatgtcagtgctcctgttaatgtgtaagtggaacccatagtctatttactctataatatcactttaagttttaaaataaatcgaattagaataatatataatctgttgttttcagactgtttaaagccgctgaagaagcccgcctgccaaaacgcctgcgaccggatttgggcggtgctttgagggagttcaccacccgcgagagccattgtttccagcagttgcgcggcgatgtgggaagcacggcactattcacctcccaggagcgtcagtggctggtcctccaggtgctgcagggtctgcgagccggctgcagtgacatcgaggccctgcacggccgagcggctgtcgctgagggtcagagcatcgtggccacctggcaggagtccggtctgatcacacaggtctttccgctgcacgagcccagttcgctgacgcagctccagacgcactgggttaagcagatattcgcaccgcaacctctgggtaagatttattatcatacggattcatcactccattcctatcatatcaaattgtaaatgccttcaaatggtacagaagtccaaagtaatatgcttgattcttaaacatcttggaatcgttgaatgtgaataaaagtcataaggcaaatattctcctttcagatgacattgctgcctattttggcgttaaggttgccttgtactttgcctggctaggtcattacacctgcgccttgggagttccggctgtgtttggcacaattctctactgcattctatggggcaagggtcaaacggcccaggacatgggccatgtgctcttctccctgtttaatgttgcctgggcttcactgtatctggaagcctggaagcgctattccgtggagttggccttcagatggggcactttatcaacgccgccagagcttttggaaccacctaggccgttgtataaggtgagcgtaacagaagttattgacaatttgtttgatttatcgtatatcgcggatcattgctccagggtccattggaggagaacaatgtgacgggtcgtttggagcccaaggaggcgccggcatggcagcggcgagcatttcgctatctggtcagctttcccataattggatgttgtctgtgtgtggtctttgctgtgatgtttctcatgttgcgtttccaggtgaggaagtactttaatgacatgtagaaatgtttccaaatgtatatgcctaagaattaccagaatggcctaacaaatattgagctttatggaaatataatttggtaatttaatagaatctgaatcttacttcagatttagtatgccttttcaaaatttattagtttatttataagcatttctagtgtctgaaatttccataaagctttattaccatttgcaagggaattcgaaacactttccttatcacgacattcgtgttccacttccgtatacttaatgtcgctttcacgttaagcatactaccaatttgaatgcgcacgagtgaatgaaatggtgtgcctgcttatcaatttgtttgcaataatcatatcacacatacgctcccatgttccatatatattttaccggtttccggttgacccacataagccatttttctaagttggtcttaattccttacactttactttcgcaactagaacactcaaagagataaggccaaagtaaaataagtctatcactaccacacatcattgaattgttttcacatttttcttatcatttatgctttcgttttatgttgtttttgtctatttttgtatacttcacaggattggctggatcaccataacataccagacaaaggaattgctcaatgcatgtataatttgcacaaggttcttattcatttttcaattgcatttcaataatttactatgattaatgtatgatcgaacaatccacgcatttgtgttgtagttgtcatttgctatcattcaaaaacgaaaatatcgcaataatatttatttctgggcattgataaaatggttaaaatagctataccattgtctgtggaaacagttcaaaatcaatccaaatattttgtagttcatattttgtatttgttcacaacagtttcgataaaagaaggtgatgaattgagaaactgcagggtggtaaattccaagtggtttttttttcattaaaagtttttcacacatattcattttggtagaagtatttttgcagcggcttcaggccatcattttgcatacgcaattttttccttttcccatcccaagctgacgttaattaaaatgctcagctggcgaaaaataaactgcctttgggaaactgaaaatagatacggaaaggggaaaagtaagagtgctggcgaacgcaacctcgacgttgataaaatacttgtactataaaacgttgcttggcattagaaaatgtcacgcagaatagaaagtcttgactagttccataaaatttgagctaacatcttttgtaaaagaagcttacaataagtaaattcaataaatagctccgctttaagtggtaatttccaaatcgcattagatggtttaaacggacttaattaattttgtatgcacttcagtgatagttgataggagaattaactactgaaaagcttgtttgcctagcctgttgataaaactgtttaacctttaccagcgagtatttacagtcacccatctgcttgtgtcattaaaaaagttaaaaagctgccagcgcagtggacaagctcctgcacacatctcactaatctgagaatggaccatttggtagttgttggttgcctggctgtcggccaccattcggtgtttgcaggtagttcatgtggcttaatgcgcaccaggagccagaggacaatagcacttttggtatggttcgctttttagtgttcaaccgagcaactaaatgctgtcgtaatgaagcgtataggggcgaggtgggaaaaacgtgtgctagtatgtgttttggtgcggctatggcgctatttgtcaaaagcagacttttgtgtttaaaacctggttacctgggatatcacacgaataataataatattgagtgctttaaatgggctaaaagaaactggttaacttgcgacatattcccaatagaatatcatttaaatcgatgcaacaaatctattgaacatgttattagttaaacagcataaacggaaaagttaaccattaaaattgaccaaataatatttggttaattaggctaaattaataacattaaacaatggtttatatatgttacaataaagcaagttctattgttcagctttttaacaataggctatatgatgaggaaatggcgggaaatgttgtaattgtgtgacatgacgactgccacatcgtcgacaaaattgcatttaatgctcgaaaattatttttaatttaatcaaagtgcgtaaacactcaatgagctcttcattagcagggttcaaaaggcaggtgggtgaaaggtcagtgaaagaatgagtaataatgatgggttaattagcacgaaagtagcaaaaactgatggaaaactcaagtaagagtgggctatgccaattaatattgctgttatgcgtgtgtcagctattagaaaactatttattattaatttattacaattgtgtgtatttttaacgcctacaggactggtgggactccaagttgccggaggaaagtgtattatgctgcctgagtgttataccgaaagttttgctggcaggagccattaccttaatggacgaggcctattttaagttggccgtttggttgaacgaccgcggtaaagtggatccaaataatcacatgtgtgtttatatctttaacatctcgtatttcccaaacagaaaactaccgcctgcagtcgaaatatgagaaccacttgatagctaaagtggctcttttccagtttgtcaattccttcctatcgcttttttatatagctttctatttgagggatgaggagaaacttaaagaggtatgtatcttgaatattatatacagcaatagattttgtaaaaatagctcttcatattgccacagcaactggctggtctgctcatctcccgccaaatcattggaaatctacgagagtctgcgattccctattttcttgaacaatggaaactggccaaattgagcttcaatatgtggggtgctcttagccctacccaaaatgtgacccgcagtctagccgaggaactggccactgcagaagcggaactaaaggcggagtccactggtacgcccaccaaatcccaacagccggaatcgtcgagtaaacggaatattggacaggctgaaatagagagctcgttgtacaaggtgattgacacatttcaaggagtatatcctttgtgaactgacttatcgattaacactgccccacagtatgatggcactttttcggaccacttggagatgctcgttcaaatgggctatgttgtgctcttttcggccgcctttccactggctggagtttgtgctctgatcaataacctgatggagattcgttcggatgccttcaaactggcccatgttcatcagcgtccatttgggcaacgtgtggccaacatcggaacttggcaaaatgccctgagcatcctgtcgctcgccgctgttatcgtgaattgcgccttgattgggctctctggacaggtgtcgaggctatggccaggtttgaccacggcacagacaattattctaattgttaccctggaggtgagttctgtgcacagagtggttctctggttatatagaaaagggagcgctataattgagactcaacgtacatatactgatttgcttatttaccaatttataaacgtaatattagctgaaacctattaaatacatttgctgactctacagcacataatgttgggactgcggcaagcacttacctggcttctgccggagttgccatcgtggttggcagcggaaatcgcacgtgccgaacattgccgccgggaaatgcagtgcaagggcacctcgccgcgacccacaccgcccactccgcagtcgaccacgtcgacgcagccggaacaggagggacccggcggattgcaaatggagagcggagcgaataccacacgagaccagtccatggagagccaggtggccgaggatatacttctctacggacaggaattcgctggctacggccataacatcgaggcggatgtcaatatttatgagaatcgtgattcatcaccggattcgccgccctcgcaggtaagttaatgagctgtgtaggtgtggactttatgtgcaattacatatgtactccactttttagaccagcaccatactgattagaccgctgcatgagtcaacgccaccacatggtggagcctccctgaccagtctgcatcaggacggtaatggcgggtgagtgccttttccattgaactactaatagtaaaggagtaagggactggaaaacttaagtatttcgaacacgccaaagggccggggaaacccctaatggccactcattgccccattaactttatgaacatgcaccgaacatacgttttttacattcgatttttctctctattttttatatgtattattatttctaaattttcgaaaaatctctttggccttttataattaagcttaataattttgttttttaatagagcttgtcagagttgggttaaaaaatcgcaaatgtttataccggaaattccaccatacctgggctattcagtgcgaaatttaacaacttttgctggtaacagtcgaaaaatgcaacaacatcagaagctgcagagcgggtaaattatggttggatagttgttggttggatagatcgatgtgtgtttcgaaacatgttttcaaatgctttcgacgctgtaaattaatgggactaatactggcttcaaattgctcaactcaagtatattcaagtatttgcaaaaaagtatgtttaatataacgagcaactgaaaccagtattaggtgtgctttactttactttcttcatgtttccgagcttccaacatttttgcaacgaaaacttctaaaattggctgacctgctctatcttagtgacctactttgattataatatacctaaagaaaaattcctatatctttttactccttattcttacactacttactttctgtacttctcgctttttgtgcggcacacagagcttccgccagcacgctagcgctgaactcggcggcatatgcagctcgcatgcaatctatgcatattcaagaaataccgccattccgaaagaaatcaaccgattcagccgatcatacaggcagcagcgccagtagcagcccccagcgaaccacaatgcggcaactatcggcgcagcgggagccgcagcagcagacgatccctgagataccaccgtacaagacgcgcaagatatccgcggagagtgccatgcatctgaatatgagcgtaagatctgggcttacccgttgtatactaatagcataccctataaacaggatctatcccccccccccccattcacaagagtttccttagttcttcaaatgacctactgtgtctgtgtagctgctccatgtatttattgtgtctgtagactcttgcatcaactaacaaaagcctcgatactggttaccttactaacaacttgtagatccaccaaatcaccggcctacctgacctcctaactatcaacacctcggagttacagtgtatcagtttgagattagagaagagtgttctgaaaaagtctatccaatgttaaggcatattttaaagaaatactaggaatacttttcgttattcaaaacatatagcactgccctattcttcccaccacctttaaccaaaccgaatagcaaatgaaatactcacttaacctacaacctccttttaaaggacaagctacacataaaacttcatgcaccagaatggatgtcacgtttgaaagtcaacgacaatgctaatctgcatagaagcatagattgtatttcaaaggtagtggatagataaatactatatataatatatgcatatatcaaaacggaagtatatacctaagaatgatgtgtttgttactcaatgtgtgttgttggtgttttatgcgtgatgaaatcgcaggatcagtagaaatgtacaccgtagttgtgaattatactgttgaacccgtgttaaatatcgcttttattggaaatccagttggtcaaagggcaaatgaaatacgaaatttgattggcatggcagaagctttcgtacacacatatccacgctggcttccctatcactcacatatccacttacaaacaaaaggcatggattactagtatcatacatagatcatagtgtaatctccataagctttcgatgttgatagattttaaaactttttttccttcacaaaatacaatgctaataatattggttaattttgaatacaacttaaggaactcggaaatagcgcagatacagccgacattttgaagccagctccatcatggtgcaatgtggccatgagatcgggtgcacctggcagcaatttggccacgccaccagcttcacagcaccagcagcaaatagtggcctcctcgtcctcgtcatccggcggcggtggcagcgtctttagccccagtggccctgggccggctggagcttcaggcgttgggatcagcaattcccagtcaagacctagtgtcggcgcattatcaaactcttcatctggttcatcccataaacagcaattgaagcagcaagccaaggaggaaaaggagcgggctaaggaggagaaggagcgtgctaaggaggagaaggagcgtgttaaggagaaggagaaggaacgactgaaggaaaaggaaatcgaaaaggcaatggagaaagagaaagaaaaggatgcacagggagcagcagcatccacatcaacggcagcgactgatgacgaggctaagggtaaggtttatgcattacaacaaataatagtccgatttttagatataaatttaaatttaaaatattttgagttggtgtcaatttgatgttttaatggccatttaattgatacattttcagctgccgaactggccgccaagaaatctcgtctcaagcagaagctggtgaagagtgcgaggtcagtggccatcttctcgctgaagctcaaggagcgaagacaacgcgaggcggagaaggcagccaccatagcagtggagcatgctaaggtagggctaaaaaggtagtaaagtcaactaataattctttctaactttgtctttgtaggctctggccaagttgcccatgccacagccagtgggcggcgagttgtctcttatacccatcgaacaactaatacaaattgaggatatcatacctgcgatgaaagctgcaagcacttcgggtgcaaccacatcgtccagtcaagccggcccatcgacgtatcatcaacagcagcatcaacaacagcactaccacccaccttcaaatccacatccgcacacggataattaagctaataaatatcaagattgatggccaccctttcgcacactttgtaaatagttttctatgcacccgcccccattaagtcgagattttatcaaagttactgatgatatatgagcaaatttgctgaatgtgtgtcttgtccagagttggaagaaactaattaactatatatagtggttaccatatagaaaattaagttactcaaacaataggtcgacaagattcgaactttatttggtccaaagctaaacaatacagaatttgaatgaaatttgcctgtaggttaataatattaagttaccggcaaatttcatttagattttctaacgtttagtcttggtctgtttttttttttggtttcgttttccagtgaaaaccgagcaatttttccaaaaccatttcatatacaaatttatcaaagttttgtatgaatggagttcatttgaatacaaaactaaataatgtttatggcaacttagactttcgggtacagtgcaatagaagtgcatacatagaaattgtagtatgcaaagaaaacaatactttttaagagttgtgaaacgaattttgtgttagcgttttagctgttaattcgttttcgtagtcattgttgcttagcgtttagtcgtataaatcactttgttacacacaaaatgttgaaaatgttaaatttgcatttatgttgccagtgagcggatacttaataattacgcaatcgctaacactctcacacgataatcgaaatcagacaaaacaacgacacgcataactgtgagataatatcgtccattgttccttccatataaaggataacgccttcgcactcgcttttagctatggtacaacagatcagatggaaactattactaaatgcagctagctataaacgctgaaaactacatattacttgctgcattgtttttttctcgtttttctatgtgtggtcctagcttgatcgaagagaaaacgaaaaaaaaaaaattgcacactttatcaacagtctagtcaaagg

SEQ ID NO: 37874 - DNA, 4063 bp, DROSOPHILA
tataataaatcaccaacggatcctggcatagaatgagccaatgcacggcaacgaagaagtcagagacggagttccgttctcggagcagcagcagtcgtcggaggatgtaccggactccacagcgacaacaacggcgacttcaacagccggcgagcttggtggcggcccaagggatggcggcgaggatgatttcaccgatgacaacaacttcgaatcgaatttgcgacgtcgcaaaggcaaaataatttcctgtgccaaggagaccatcgagaatgcttcccgccaactacgccgcaaagtgccctacgcaggtcatttgatgactcctcgtcgcctttggctcaataaaattcccacacaatgtgatgtggttattgaatttcctgaggatgcaccagacgaagcgctacgctggctcctagcccgtatccgctcgcagccgccggctggtctgggtctattggtccaggtcaaggcgcacgagagtacgcggcgaaacgcgttctatgtcagtgctcctgttaatgtactgtttaaagccgctgaagaagcccgcctgccaaaacgcctgcgaccggatttgggcggtgctttgagggagttcaccacccgcgagagccattgtttccagcagttgcgcggcgatgtgggaagcacggcactattcacctcccaggagcgtcagtggctggtcctccaggtgctgcagggtctgcgagccggctgcagtgacatcgaggccctgcacggccgagcggctgtcgctgagggtcagagcatcgtggccacctggcaggagtccggtctgatcacacaggtctttccgctgcacgagcccagttcgctgacgcagctccagacgcactgggttaagcagatattcgcaccgcaacctctggatgacattgctgcctattttggcgttaaggttgccttgtactttgcctggctaggtcattacacctgcgccttgggagttccggctgtgtttggcacaattctctactgcattctatggggcaagggtcaaacggcccaggacatgggccatgtgctcttctccctgtttaatgttgcctgggcttcactgtatctggaagcctggaagcgctattccgtggagttggccttcagatggggcactttatcaacgccgccagagcttttggaaccacctaggccgttgtataagggtccattggaggagaacaatgtgacgggtcgtttggagcccaaggaggcgccggcatggcagcggcgagcatttcgctatctggtcagctttcccataattggatgttgtctgtgtgtggtctttgctgtgatgtttctcatgttgcgtttccaggactggtgggactccaagttgccggaggaaagtgtattatgctgcctgagtgttataccgaaagttttgctggcaggagccattaccttaatggacgaggcctattttaagttggccgtttggttgaacgaccgcgaaaactaccgcctgcagtcgaaatatgagaaccacttgatagctaaagtggctcttttccagtttgtcaattccttcctatcgcttttttatatagctttctatttgagggatgaggagaaacttaaagagcaactggctggtctgctcatctcccgccaaatcattggaaatctacgagagtctgcgattccctattttcttgaacaatggaaactggccaaattgagcttcaatatgtggggtgctcttagccctacccaaaatgtgacccgcagtctagccgaggaactggccactgcagaagcggaactaaaggcggagtccactggtacgcccaccaaatcccaacagccggaatcgtcgagtaaacggaatattggacaggctgaaatagagagctcgttgtacaagtatgatggcactttttcggaccacttggagatgctcgttcaaatgggctatgttgtgctcttttcggccgcctttccactggctggagtttgtgctctgatcaataacctgatggagattcgttcggatgccttcaaactggcccatgttcatcagcgtccatttgggcaacgtgtggccaacatcggaacttggcaaaatgccctgagcatcctgtcgctcgccgctgttatcgtgaattgcgccttgattgggctctctggacaggtgtcgaggctatggccaggtttgaccacggcacagacaattattctaattgttaccctggagcacataatgttgggactgcggcaagcacttacctggcttctgccggagttgccatcgtggttggcagcggaaatcgcacgtgccgaacattgccgccgggaaatgcagtgcaagggcacctcgccgcgacccacaccgcccactccgcagtcgaccacgtcgacgcagccggaacaggagggacccggcggattgcaaatggagagcggagcgaataccacacgagaccagtccatggagagccaggtggccgaggatatacttctctacggacaggaattcgctggctacggccataacatcgaggcggatgtcaatatttatgagaatcgtgattcatcaccggattcgccgccctcgcagaccagcaccatactgattagaccgctgcatgagtcaacgccaccacatggtggagcctccctgaccagtctgcatcaggacggtaatggcggagcttgtcagagttgggttaaaaaatcgcaaatgtttataccggaaattccaccatacctgggctattcagtgcgaaatttaacaacttttgctggtaacagtcgaaaaatgcaacaacatcagaagctgcagagcggagcttccgccagcacgctagcgctgaactcggcggcatatgcagctcgcatgcaatctatgcatattcaagaaataccgccattccgaaagaaatcaaccgattcagccgatcatacaggcagcagcgccagtagcagcccccagcgaaccacaatgcggcaactatcggcgcagcgggagccgcagcagcagacgatccctgagataccaccgtacaagacgcgcaagatatccgcggagagtgccatgcatctgaatatgagcgacaagctacacataaaacttcatgcaccagaatggatgtcacgtttgaaagtcaacgacaatgctaatctgcatagaagcatagattgtatttcaaaggaactcggaaatagcgcagatacagccgacattttgaagccagctccatcatggtgcaatgtggccatgagatcgggtgcacctggcagcaatttggccacgccaccagcttcacagcaccagcagcaaatagtggcctcctcgtcctcgtcatccggcggcggtggcagcgtctttagccccagtggccctgggccggctggagcttcaggcgttgggatcagcaattcccagtcaagacctagtgtcggcgcattatcaaactcttcatctggttcatcccataaacagcaattgaagcagcaagccaaggaggaaaaggagcgggctaaggaggagaaggagcgtgctaaggaggagaaggagcgtgttaaggagaaggagaaggaacgactgaaggaaaaggaaatcgaaaaggcaatggagaaagagaaagaaaaggatgcacagggagcagcagcatccacatcaacggcagcgactgatgacgaggctaaggctgccgaactggccgccaagaaatctcgtctcaagcagaagctggtgaagagtgcgaggtcagtggccatcttctcgctgaagctcaaggagcgaagacaacgcgaggcggagaaggcagccaccatagcagtggagcatgctaaggctctggccaagttgcccatgccacagccagtgggcggcgagttgtctcttatacccatcgaacaactaatacaaattgaggatatcatacctgcgatgaaagctgcaagcacttcgggtgcaaccacatcgtccagtcaagccggcccatcgacgtatcatcaacagcagcatcaacaacagcactaccacccaccttcaaatccacatccgcacacggataattaaaataaa

SEQ ID NO: 37875 - protein, 1338 aa, DROSOPHILA
MHGNEEVRDGVPFSEQQQSSEDVPDSTATTTATSTAGELGGGPRDGGEDDFTDDNNFESNLRRRKGKIISCAKETIENASRQLRRKVPYAGHLMTPRRLWLNKIPTQCDVVIEFPEDAPDEALRWLLARIRSQPPAGLGLLVQVKAHESTRRNAFYVSAPVNVLFKAAEEARLPKRLRPDLGGALREFTTRESHCFQQLRGDVGSTALFTSQERQWLVLQVLQGLRAGCSDIEALHGRAAVAEGQSIVATWQESGLITQVFPLHEPSSLTQLQTHWVKQIFAPQPLDDIAAYFGVKVALYFAWLGHYTCALGVPAVFGTILYCILWGKGQTAQDMGHVLFSLFNVAWASLYLEAWKRYSVELAFRWGTLSTPPELLEPPRPLYKGPLEENNVTGRLEPKEAPAWQRRAFRYLVSFPIIGCCLCVVFAVMFLMLRFQDWWDSKLPEESVLCCLSVIPKVLLAGAITLMDEAYFKLAVWLNDRENYRLQSKYENHLIAKVALFQFVNSFLSLFYIAFYLRDEEKLKEQLAGLLISRQIIGNLRESAIPYFLEQWKLAKLSFNMWGALSPTQNVTRSLAEELATAEAELKAESTGTPTKSQQPESSSKRNIGQAEIESSLYKYDGTFSDHLEMLVQMGYVVLFSAAFPLAGVCALINNLMEIRSDAFKLAHVHQRPFGQRVANIGTWQNALSILSLAAVIVNCALIGLSGQVSRLWPGLTTAQTIILIVTLEHIMLGLRQALTWLLPELPSWLAAEIARAEHCRREMQCKGTSPRPTPPTPQSTTSTQPEQEGPGGLQMESGANTTRDQSMESQVAEDILLYGQEFAGYGHNIEADVNIYENRDSSPDSPPSQTSTILIRPLHESTPPHGGASLTSLHQDGNGGACQSWVKKSQMFIPEIPPYLGYSVRNLTTFAGNSRKMQQHQKLQSGASASTLALNSAAYAARMQSMHIQEIPPFRKKSTDSADHTGSSASSSPQRTTMRQLSAQREPQQQTIPEIPPYKTRKISAESAMHLNMSDKLHIKLHAPEWMSRLKVNDNANLHRSIDCISKELGNSADTADILKPAPSWCNVAMRSGAPGSNLATPPASQHQQQIVASSSSSSGGGGSVFSPSGPGPAGASGVGISNSQSRPSVGALSNSSSGSSHKQQLKQQAKEEKERAKEEKERAKEEKERVKEKEKERLKEKEIEKAMEKEKEKDAQGAAASTSTAATDDEAKAAELAAKKSRLKQKLVKSARSVAIFSLKLKERRQREAEKAATIAVEHAKALAKLPMPQPVGGELSLIPIEQLIQIEDIIPAMKAASTSGATTSSSQAGPSTYHQQQHQQQHYHPPSNPHPHTDN

SEQ ID NO: 37876 - DNA, 17847 bp, DROSOPHILA
ccttcgacttgagcggacagttgaggttctcgaactaattgcaaaattgtcaatgatttattcagttggcaattaaggtgccaactaacggtgtggctggcacggctatatcgatttgaaaatattcaataatcccggagccttgataagctcatcaaacatgcacatggccatcagcaggggggggcaagtttgtatttagagccaagtgtgtttggtgaaggggggttagctgtatatttcagggtttcccctttttttgtcgagcggtttgggggggggttttgcgaggggacacaaaagtacaagttgctatggatcaagctcaaggcgtggcagttgggcattagctctatggtggagcacggcaaccaagcgaacaaaggtcaactcgacaagtgagttaaatgacaaggacctcaccttgccttccttgggcttcggctttggctttggcccgtgcgtgtttgcatgtttggctcgatgaggcgacgcgaccccaaaaatgaaactcaactttggctttgactgcggctcgggattgtggcgtgcaagcattatggcctttcgctttcaaaacaatgcccccatcctgtttcccggttggcctagtggcacttgctccttgttgttggtttttcgcattgcccttggccaattgcgagtgaattttgatgttttgactggccattcctggggccatttgacaactctataaaaccggtgtccttaagcccgccctcgtccttgcgcccaacccccaattaccgtccaactaccacccacctacaccccgctacacccacccacaaagtaaacgtaattgcccggagagtttcgcgactttcgacttggccagcaaactgaaaaagcgaaacttcaaaaaacccgacttgacttggcaactggaaaagtggaaaagcggaagcacgagctttcccaccgaaaagctctcgtgctctaagctttcgtcctggcgaggcgaaaacgtaaatgtcagtcatggagttccagtcgtcggatacatgtggaacacaacgaacacagcaggagcctctcgcgtctcatcccccgaatacaatgcgaaaaagtctgtacaaaaaatagacaaataaggagcaggagcgaaaacaccactctgtgcataagatataactcccgcagaactgaatacctgcaaaaagaaatacgcgttaaatggaattacggtgcgggaattgataaagtgaagtgtgttacagctagaaagcaagtgaaataaaacgaatacattaataattcatgcccctcatagtcagaagcttactagtttgataaggaattcaacgtaaatctgatatagtaatgtagaaaagttgtacaaagtaatatacatagcatatagcatatagcacagttacacagaacacaccgcaaactcaaacaaagttgacaaaaaaaaagctcacgcccctcacatctcagttttttctcgaattatttgtgaaagtgcaacaaacatatataaaaaataaaaaagaaaagggaggagagagcacagcaaaaaaaggcagtgacagcaggacctgcaaaggaattgccatcatttggggattacggaattatcgggatccgttctcattaaaatggatttaaggcaatgccgatgtgctgagctgcatttgtgcatgggattatcgattgtaatgcgcagtcatcaaattatgtttgaacaacgccgccgcgacagcgataatagcaacaataacaacaacaacaacaaccaaatcaacaacaaacactgatttggcccctgaccccctttggcagcaccccctccatccaacaccccctacgaccctgcccaagcaaaaggagcagcgaaaaagaagaagcgtcttatgaaacaattgaagcaccggccaaaggagcaaaggagcagacaaagacagagacaaaaacatcggcaaaggataaaacggaggccgagaagaagaggaagcagtagtagcaaagcaggaaacaacaacaacaacaaccgcaacatcgcatttttaaacggcaatacgcaaagtaagtgaagtgtaaagtgagcgagatggcaatagaaaggtgtagagtgccgcgaagagaggcggagagaatacacttgcaaaaatgtgagcagctaattcccagggatgttaaaaaaaattaaaccctcatggttcaaagattctaggagatggacaagtgatgaatggtcagtggaaatatatgtatgttttaagccaagtgaaatcaaaatgatttgagaagtacaaataaaagaaagaaaggaaagaatgatatatgatatttattggttgtagtacaggaaaataatagttaaaatgatatcccggattgatggtcattacaatgatcgtaccacaaaactctttctaactcaaattaaattgttaaaattatttttcaatacaaatttgatatatttttgttttttcgccgacaagatgcatagatctttcatagaatctgaaatctatatcttttttatattgcttttgagaagagtaaaccgatcatcatctacgatcactcctttttgttctgtgtaggtatgaagagagcaggtgggaaggcagtgaagtgaagtgaagcatttgtcgcatttgtgcagaattcccgacgtaattaatgtttaaagtctgtgtgtgtgtatgtgtgcgaaggtttgtaaactaggtcactaggaagttagccccttgacgaccatcccctctcatcagcgcctcttcagcggcaactctacgtcaaaggtgtcaactcgccaaatctgcaaccacaccttagttaagtgagccaccccgtagccaccaaaattatccacagcaccaccaccttttattcgtccttaacacaccgccatgattaacgcgcctcagtgcgattaactggcaaacaaatttggagtgacgctgcggcgatgtacatacatacatatatgtatgcatgtttgtgctaaaccgacagcatttccattcaataacacacgcggctcgtatgcaaacactgtaaaaaggttttatgctaaaaaagacgccgtatttgtgcatgaaaaactgtcattcatcatccaaccaacacaaataaccggtaatggcatcgccacattatggctttgtattttttacatcctcaaacacaaaaaaactttagttgatttctgacttgcatcgcattcatcacccactaaagtcgagcaatcaatcctcaaaatacgtatacgcactgttagttcagttgattaataggctaattatgaaggaaactgaaaggaaacactaaatcaataaatcctggcaaattagcatcagtatatatttgtgttagtgcaaacatttaagttttctatcaattttaaatacaaatatgttcagaattaagatatatttcaaagggaactatgctttgtttaattaagatttaaggttttataactataaaagccttcaaaatgtgccatctattttatattcacttacaagcagatttcaatcaagaccactctttaatatgatatattatgtctagaacaaccgagaaggcactcttaaattaaatattttagtaccgtaataaattatgaaacgtgctgacggtaaaatatataatacaattcatactttaagttatattttttttttgccctatatggttttacgtatcggtgtgtatgtgagtacctcgcacacgcaggacatagagataaaaaggcttctcccacataaaagttctattctgtttttttttttttatagaaaaatattgctggcaggagtttagaacattgccaaaggggatgcggacagatgaaggggcgggggcgtggcgggtaaaagccataaaactcaggcgccgaagcgcaaaatgcccttgccctgaacaaaaagaagaaattgaacagcaacaaccaacaacaaaaacaaagaagaacaagagcaaataaaatacaaactgcttatttatttatttgtttcgacaaatctcaattgaaacaaagcttaaaagcttcgaaatcaaaacttaaatagaaaccacacagacatccatccagacgaataaaacgaaaacgatagagcgcgagacaaagagacaattactattaaatccaagttcaattcggtccgcaaacaattgaatttgttgcagatttgatttggcttcatgtggattgcgataactattttcctgggattagtatgggattggattcattggcccgaccgcagtttgcttcctaatgagatttgcttaattaaaatgaaattcaataactggaattccaatgaatttaaatgttagagaaaaactctaattcggacttttgtggctagccattatttgcagcaagggggacataaaaagcatttggctttcgtttggattagtcagcaaggtcaaatctcgaaactgacctaagctaatgcaaaatgacttttcctgtcaatcacaatctatatttaattcaagcgaaattctctgccacatttcttgcgctataaatcgcagtacccattatagcatatcaacaaccaaattaagacgaaagtacaataaaatgcaactaatttcagttttaataatggatttgctggcggcttatttttgtttcaaatttggttattttctttagaaatgtgcgcatacattaagacgaacacaaaaaccagctttggctcaatctcttaaacctttaaaacgttatatgtacgcacatatttatgtacgaacaaatgaaggaaaatctcaagcctaattccgcattaagctgcaaggaaacacataacccaaaagtatgcaacataaataaaatttaaatcagcacgtttatgaagtggattatttgaactgaaatgcttattcaacgttattagatgagatttatggccaggagagcatttgaattggcagattattcgggccaaccaagtaatggccactatatcaaacaaatcagttatccttcaattgcaaaatacacagtgcagacaaatagtttaaactgtcttagtggtaatcaaaatcaactttaattatcaactaatgtatgtgtattttacgaaacaaaagtgcattatgcatgaacgaatgatagcaatatttttcaatataaaagcttacgattgttttccttttgttatcaattatctatcacactccacagacatactcctagatcataataataagttatataaatatagcatagattttgaaaggttaaaaggttttctccccaccactccctctaataatattgtatataataaaatatatatacaaatgtatttcataatttcattgccatccaattccgcatagtatctggtataccccatctgcagaaagacaccgaagtgtataaattgcttacgtttgcccatgtagtcataaaaattgctttggcacataaaacgaagcttgacgctcgcttttggttttggttttggttttggcctggtctagtctggtttggtttcatttggccccttaccgttcttgtttcctttggtttccatcgctggtgggcttgtttttttgcgagagtcctggccgtgtccttcttatatttctatttctatttgtatttgtatttgtatttgtattccccgatttgtattttgttcgctcgccaattcggtaatcacatttcaagcgttttattcgtcctgatttcatacgattgctgattcaagtttctgtttgtggtccttgccttgcaggatatgacaagtgatggtgctgttacgttttggatatttttgctttgtttaatcgcctcgccgcacctgcaagggggcgtggccgggaggcccgatgaactgcacatcggcggcatctttccgatagccggcaaaggaggatggcagggcggccaggcgtgtatgcctgccgcaagactggcgttggatgatgtcaacaagcagccaaatctgctgccgggcttcaagctcatcctgcacagcaacgacagtgaggtgagtagtcagtacactgaaaaaaaaacgatatatacctaaggatattttgaatgtaatgcgatgcaatagtcctacagtccaagttcgatacgaaaatagttttttatgtttcctcttaagctggctttaataagaataaacatttattgaagcttttgaactttcttataattttcataggtaactaatatatacaatatattacattaaatacccaataagtatccaataaacttcgaagcaacacagaacttgtttgcaacacgattaatatcactgcaaataatatcctgaccaaaaacccctcctgatgcactgagttctgtttaagccttctgttcacgaagcattttcgctcagtgcactagtaagttggaaagcgataagccctacttatatgcagcccctgctgcctcctctgctgccatgccacatacccttgggtgccacttattttgtttcgtttttgtttctgctcactgatgagtagtggagtgctggctgagcgctggcattcattagcatatttctctaggggatcaggctggggctggggctggagctgggcactgttaacaaaggacaaacagttttattatgccgcattaaagggtattgctgcgcgtgtgttccacaaattgaattcgccgcacaatccgccgcatgtccaacaatatttggcaatgcctcggcttaatgactgcacataaattgcgattgagattcgactggagcacgttcgaaacgttaccaacagcaattatattggctgagttcggttaatcgggcttttatgtgcgtgattcgtaattgataaagggtatttagcattaagaaaaatgtgtgtatatctcgaacaaggtcgcccaataaatgtcgcccggtgttcattaaatcataaatgtatttacatttattcgtgtagtgcaacgctgtaagtttaattatttcaatgcgaaaatctctcatttcccagaaagtttctatgagatcaataagtaaaagtttttgctataaacttcgaacttggttttttgcaatcaaaagttttacgcattttatctttaatgccagcagcagcacgaactgaacttctgcacaaagcttttcttgaataaatcggtataatcaaagtgaacacagtattgatcatattttttttattgatccttatataaaattgtgaaatttttgcattttgtagctaacttaaagagcgcggaatatgtttttagctggcatatttgttctaaatggaaaaaatagagcatgggcacgcaataaatcaacatttcaatagtatccagttgtctggatgctgtaacttctgttggcttttagagaaccagctattaaacaaatacccgccctccaaacggtcatgcatcataataaatggccagtaaccgatgtagtttccgttttccagttcccaaccaagttgcgcgctatcaatgccccttggcgcgtatctctaatacaatacatataaaaccaaaaccaaaactatctttatacattttcatatttcgcacatattttttgtttttttgtgaatttcgcattttaagggtctgcggtacagttgttgcggtttccactacttcggcggctgttttgggcctgcctatttttaagcgcgaacctcattagttttaagtgagcgaaagcttaactacttgttttgagttttgaatgaggtcactttgccccggccgagccgtagctcatcatttgagttatttttattcaaggctgccaggagggacagtcactactactacatacatatatcctacgaacatatacgaacatatacacgcccatttacgagccagatacggacatatagataggaacagagccggagaggtaaaccaagtcctatccctggtcatatctgttcctatctggcgtggtctggtctggtctggtctggttagttcagttcagttcagttcgcttcgcttcgctggactgagcctgagagccaggcgcgttatgtttgtggcttaggcaaacagcttccgttaaatgctgcataattagttgccatctccaggtcccacagccaccttctcctccggcacatccacatccacacttactcccacaacgcaacgcaccaccccatcccgcccacatccacgtcacttggcaagcgacaaggggcaaaggtcgcacgcaatgtttgcctttgccgctgccttttgcttgacctactttgatgtgtgaaatgtcccaaagaattctgcacaaaagcactgagagttgaacaaaaaaatgtataaacaaggcaggttggttatcctgtaataagcgaaatccctagtcggcttaagtccaagatcacacagaacaggtgaatacttttgtggcgaatttcgaatcgaactttgattttttaatggccaaatataggtgctgaaaaatcgtattattgcatttgcaaagctgccactttctatcggctaagtgccttcatgcgaaccactgaaatggcttaaaccggttgtcaagctttaggaataagccggaaattgatttaacagcgttgggataaaaatatgtgctcctaaaaggtttttgctttttcttttttaattaaagtttaattaaatcacaacaaagcattcaattatttaaactcacattttcaattgcaatacagaaaaggtaaatataatggctaaggtaatcaaaaattatataaataggcatctacagaatctgcgagttttaatttaaattgaatattgttttgtacaatgtaataatattcctaaatgtgctttgtattatagaagaacattctactaataaatcatttagctattttttggttaatattaaaagtactatagtactatgtactatcagttttatgctgcttagttgttctataaaatcagtatgcctctgcccacgaaaagggaaactattaaattagagcggacatcgtggcatgcctcggtacccaaagccaaagcacacacccagatctgaatagatggagtagtacgaacaggataatacttatgcataaacagggactggacatgagaaggaaatgaaaggaaaaaaaaaaccaattagaatggttgtttacacgcaaaccaagtaagaaatatgaaaattgtcgtcagaatggggtttgggccaaagtaaaggaaacgccgaacagggaaacgagtttgccatgtaaatgaatgaatgcgagaatgaataactgaatgaatgaatcatttatgtggccaatgtggatggatacacgtatgcccacgtatgtatgtatgtatattcacaacttcggcacaagggaaagggacacaccttcgtgaattattcattgtcatgaatgaatcttgtttaattgataaatgctatgacatggggattaatgaaaagcataatggaaaaatatcaaccaggtggcacataaattaggcaggacttggaatatggaaatttaactagctacataaatattgctacaaattcgtataataaatcacgctaaatgcaacaattaacatgcatagtttaaaatttgattgattataattttcaattttctctgccagcaagtttttaattaagcagcttaatttcgtagtttgctatgtcaaatccagcattccatccagttgattaattttcattttcaattatattggcgaaaattggacgagatgacgaaaattccttctgggccagttttgtgcattaaattcaatttaaaagccatgccaatgtcataaacgccccgcatgaatcacaaagccaattaatcatatcaataattatcttccaatgaagacagacacataaataacaggaaattcgctattaataactcctgaagggtcgttgcttagcataatcataatcaatacatcgcgttggccatcaaacgaaacctacatatccgcccatgtttatgaatatttatcgagcaccgacggatgagagtataagtattcttggcaacttggctaattccgctttccccatccccatcccaccattttcattcacagtgtgagcccggtttgggcgccagcgtgatgtacaatctgctctataataaaccgcaaaagctgatgctgttggcaggatgcagcacggtctgcaccactgtagccgaggctgccaaaatgtggaatctaattgtggtaagtgaaatttgcatagcgccagaatggctggaatatatacatacatacttcgaaatactttacctacatgccactgcccctccacagctctgctacggggcctcgagtccggctctttcggatcgcaaacgattccccactctattccgcacccatccatcggccacggtgcacaatccaacgcgcatcaagctgatgaagaaattcggctggtcccgggtggccattctgcagcaggcggaggaggtctttatatcggtaggtaatcggtgctaactaattacatttccatattaacttcgaaaacttttatgaacagaccgtagaggatctcgagaatcgatgcatggaggctggcgttgaaatcgtaactagacaatcatttctatccgatccaacagacgccgtgcgcaatttgcgacgccaggatgcacgcatcattgtgggactcttctatgtggtggccgccaggagggtgctctgcgaaatgtacaaacagcagctatatggccgagctcatgtgtggttctttattggtaaatacaaattatactacttagataccgatatctcatatgcatagatactttcacagagtcttcttgtaactaaactactttttttttaggctggtacgaggacaactggtacgaggtgaatctgaaagcagagggcatcacctgcactgttgaacagatgcgaatagctgccgaaggacatctgacaacggaagcgctcatgtggaatcagaacaatcagacaactatatccggaatgactgcagaggaatttcggttagtactactactctatccattgctaaagtttttgcttcaatgtgccttctttttgcgcagacatcgactgaatcaggcgctaatcgaggagggttacgacattaaccacgatcgctatccggagggatatcaggaggcgccactcgcctacgatgcagtgtggagtgtggctttggctttcaacaagaccatggaacgattgacaaccgggaagaaatctctgagggattttacctatacggacaaggagattgccgatgaaatctacgctgccatgaactccacacaatttctgggtgtatcggtcagtttgtgaaactaatttcataatacttagttagttacttatttttttatttgcagggtgtggtggcattcagttctcagggcgatcgtattgctcttacacagatcgaacagatgatagacggcaagtacgagaagttgggttactacgatactcagttggataacctatcctggttgaatactgaacagtggattggtggcaaggtaagcaaatcagttagcgttgaaaaaacaatcatataatcaaaatgtcggacgatgataaaaatcaaaagaagacaaagcatgtaacgactgaaccgaataagaacggaaatccgtccaaagacgacgttaatacaagaggatcattaacaagcttaagtgagaaaaatgatgaatccaaaaatccatcatcatctgcaagtcttcagcaagctcctaaggtagcaccaaaaccgaaaaagttatcaatttcggatgctggtaaagacacagtaacccaaaaagtcaaagaaaatgaagagccaggattttctaaacaatttgaaaaagaatctattggtgtgcgagcaaatagaaacagcagtgcaacaaaaaaggaaaatgaaaagctattagtaaagaccgtgcccggaaaatctcttataaaagaatctaacgatgaaaatgtggaaccatctagacgcacaaaaagtcagccagttggaaaaaaagtttacgaggaatcttcaacgaggcgagttcgtgagccatttgattcttttgatagggaaaagtacctgtctgatatgatcgattatgatcgatcgtccgaggacgtgccggaaaaaaaactatcttgggaaccagacagtacacttcgacgtcgttttgtcagcaataatgaatatcattctagtcttgaaggtgaggaggaagagatcgatttagattcagttggatcgtcaacaatgcgaggtagctatcgaatgccacagaatgccgaggatgaacgacctgttatcctagctgaaataatcaatatgggaaagttgaaggagctcaaggagcaacgcgaatcaactaacgtatttcgtaacaatcgtagagatgataaaaccattgatgaagtgaagggttccaagatcacaggaaccagcaaacaacatgttgaagaagttaaatataatgaaacagcaagtaatgaagatgatgacaatgcacaggtaaaacatataggtacaatcacaaaaatctttagcattgcgcaaagaatgaaagagaagaaaagctccaaagaaagtgaagaagacgagaataaggacgagaataaagatgtaaaaaaagatgaaaataaagacgatgaacagaaacttcccccggaaccagagatcgaattggaggccaaaaaagcttggacttttccgatcgcagagacatcacctgatatccctggagaaaatcagatcctgcaagaataccaaaaggttaaaattggcaaaagaaacaggaaatacagatgtataggcatcaatacggatataagcagaaaatctaagattaaaacatttatcagcaagtctgcaggtgatgacttagtagtataccatgatggtggaagattgcgagatataggacaaaccactgaaaatcttaagaatcaacgaaagaatcataaacacaaaaccgaaccagatgatatacccgttgatataggacacagcgatgatcgagtaagggaaattggagtgaatactaaaaagttaccaaaaatcataataccaccaattgccgagatgcatgtgcacaaaaatggcaaattaagggacattggaaccagcacagataagccattttggccaatcgatgacggaactgatgtaatctacatgcatcccattaagactgataggaagaaattaaacaaactgattgtggatccaccgccggataatggaccctacaagatgccaaccaaagaagatagacgaacgtactacaaaggttgtgaatatcattttcctggccgaacggaatggcgcaggcttttcttcaacaaaatccatggaaaatacaagctacgccgtccaagtcattggctctacacactagttttttccgttttatatattttgtttgtcattatcttttccatggcctggttcgatttcatcaaagatgacgcttccagaaaggtacccatgataaagatggcacaaccatttattagtttcactcccatcggaccacgaactaatcccaaggcggtatcctttgatcctagaaacagcacagaagtcatggaaaagtacgctggtataatggctcttctggaaaaatacggcgactatggacacaatccgcgttttggaacgtgtactgcgaatgaaaagtttggctatccaagcggcgaaccgtgtgtttttcttaaagttaatcggattattggatttaagaccgaaccctacatcaattccgatgagcttgtcaaagccaagatcgatgaggttgaatttacggccttaaaaaggttattggaaaatacaacaacagaggagggtcatttgaatcgcacttggataacatgccgttcagataaagataagaatgttttgattgaatttcatccagagccggcgataagaacggaatacaccgatattgaagagaaaatcgagtatattgcgaacgagggtaaaaagtcatttttcggcccaaacgatgtgaatcgaatcgtggctcttaagatcaaaaatctcaaagcaaatgaacgtgtccatataaattgcaaaatgtgggctcagaatatacatcataggaaagagggttatggccaagtttcgttttttgtgttattagctacaaatgaaaaccgcgagagggtggaaaaattactccgaaccgactactcattataaaatacataaatataactttctaataaaatgtgttatatgatatatgtatgtattatttataacatctataatccaggttcctcaagatcgcacaattgtcacccatgttctacgcaccgtgtccttgccattatttgtgtgcatgtgcacaatatccagttgtggcatattcgttgccttcgccttgatcatctttaatatatggaataagcatagaaggtaactatttaattggtagtgctcgtgcagaactaactaagggttatataatttctagagtaatacaatcctcgcatcccgtttgcaatacgatcatgttatttggtgtcatcatctgtctaatatctgtcatcttactgggcatcgacggacgctttgtcagccccgaggaatatccaaaggtgcgagttacttaccttaaaagttctcttcatttttattaaagttaatttgatataaaattatccattagatatgtcaagcgcgggcttggttactatccaccggttttacactagcatacggtgctatgttcagcaaggtctggcgtgtgcatcgttttacaacaaaagcaaaaactgacccaaaggtgggtttaaattaaattaactacaactatatattagttgctaatcattttgtggaattgcagaaaaaagtggaaccttggaagctatacaccatggtttcggggctattatcaatagatttagtgatattactctcatggcagatctttgatccgctgcagcgttatctcgaaacattcccactcgaagatccagtatctactactgatgatattaaaatacgtccagagcttgagcattgtgaaagtcaacgcaactccatgtggttgggtatgttgtgataacgatccattatattgtatataatatatttatattattttgcaggtcttgtatacggcttcaaggggctaatcctggtgtttggcctctttttggcgtacgagacgcgctccattaaagtgaaacagatcaacgattcgcgttatgtgggcatgagcatctataacgtggtcgtcctttgcctgataacagctccggtgggcatggtcattgcatcgcaacaggacgcgtcctttgccttcgttgctctagctgtgatattctgttgtttcctaagcatgctgctgatatttgtgccaaaggtcagccactacactgaactaaaagaagtagcacatttgtaatgatctctattcgcacaggtcattgaggttatacgtcatcccaaggataaggccgaatcgaaatacaatcccgattcagccatatcgaaagaggacgaagaacgctatcagaaacttgttaccgaaaacgaggaattgcaacgattaataacacaggtatgctgaattatggtagattatcttaataaaatcgtattttatttaattttgtttaaagattaaattcaactgttcgttgaacgttaatctaaaagtatttcggtcttatcataatttgaacaaaagttaaggattggaatttccagcggccccagtgaattccattcagcatgccggtttcaccttctctaaaataaagtccatttagcgagctgcaatatgaagtattatcaacctcttataaatcaaattttaatttgataattaatttaccttgacaaacatgagtgaaaccaccaaccaccgccatgctcggctgcacaatttttactagattcatcattatcacgatcaaaagttgagaaccttttatttatatggtatcttagggagtccccagctgttccagaatattttcccacccgttccagtttgtataattcagtttcactgtccacttgaaagtcatcaaagtgagcgtatactgtagcgccaggaccatgcttcaattgaatgaaaagttcgtgtggttgttctctagtcattaggtaaagcttctgaagaccgatgaaaaattcgccattcggatcgccaaatccatctttgtaactaaaccacgattggttaaaattaacacttccatctagtcgtctttgaatgacaatccaatctcttgccgtcgttttgcactgggtcacttgaaaaggttcttcttctggcaacattagctggtgaattccatttggactgccactaggacacgtgtgtggtgaactctggcccacttcgaacagcaaagtccataaaaatagtacaaaaaagcacgatttcattgtactcgacatgcgtactgttagaagatcggtggcttactgaagtatctaccatttaaaaggggaacattgggacgcagttttgtggttttgctacctttgaccgcattgcttgatatgcatatattctatttaggtcggcatttaagcaaatggattccaaaaaagtgaatggagactatttaaaagatagaactacatttttattgtttaaatgtttgtttgttttgcttatatttttattgttttataaacattgatttattaattttccgcttgcagaaggaggaaaagattcgagtcctgcgacagcgtctggtggagcggggcgacgccaagggcacagaactgaatggtgcaacaggtgtcgcctccgccgccgttgcaacaacttcgcagcccgcttccctcatcaactcatcagcacatgccacgcccgcagccacactcgcaatcacacaaggtgagtagagtacctggtgcatggaactatgcatcccaaatgccccttagccagttgcatgtggtaatcgatactagttacgttggtttagcttgacgttcttaatcgttatgttctcgattttaactagaaatcttagctctattcgtcggcattgacacaattgattaggaacaacaatataaatggagttcaaaggttatttgcttatgctaacgctatgtaaactcgattttcgcacaaaaaaccaaaggcaatttatcagtttctggaatgtctattgctttgtgtgcatacatatgtatcttaagcacttttgcagtttttgagcttatttatatcttcagcactttagcacttttttaataaatatcactgcttctgcacccttttttcacattttagcaagattattcaaaacatactaatacgtaatatatttatcttacagatactcatgagcatcgtacatgaaaaaacttgtcaatttcctttgcgtgataggtgaattatacaaaagatatgaaatgcaaataatgatgctaacggaaggatggatttaaacaaacacgtacttaaagaactttgtatcaactttaagctgagctaaataagtgaattggtagcagcaattttgtagaataatgaaatatgtattgtaccttaaacgtgtttagcattaatattgaaaacgaagtaattttaacttaaaagaaaacaaaacaaaaattcgacactagcatctaaactaagcgaattgttaggctttaaagttgcaacacagaaaccaaaaaaaattctagcaaatcaagagaattcattacgaaaagatcgtgttaaagttagtaatttttaaatgcaggtagagaagacaaattgttgattttgtgtttagtaaatactgtttttttagttaaacgaattatcctttcgaacctcatttgctcagcgctgtctcctagagctctctagttaattatatctgcgtagatgaaaattccccaaaag

SEQ ID NO: 37877 - DNA, 5167 bp, DROSOPHILA
tcatggagttccagtcgtcggatacatgtggaacacaacgaacacagcaggagcctctcgcgtctcatcccccgaatacaatgcgaaaaaaactgaatacctgcaaaaagaaatacgcgttaaatggaattacgcaccccctccatccaacaccccctacgaccctgcccaagcaaaaggagcagcgaaaaagaagaagcgtcttatgaaacaattgaagcaccggccaaaggagcaaaggagcagacaaagacagagacaaaaacatcggcaaaggataaaacggaggccgagaagaagaggaagcagtagtagcaaagcaggaaacaacaacaacaacaaccgcaacatcgcatttttaaacggcaatacgcaaaaaaaatattgctggcaggagtttagaacattgccaaaggggatgcggacagatgaaggggcgggggcgtggcgggatatgacaagtgatggtgctgttacgttttggatatttttgctttgtttaatcgcctcgccgcacctgcaagggggcgtggccgggaggcccgatgaactgcacatcggcggcatctttccgatagccggcaaaggaggatggcagggcggccaggcgtgtatgcctgccgcaagactggcgttggatgatgtcaacaagcagccaaatctgctgccgggcttcaagctcatcctgcacagcaacgacagtgagtgtgagcccggtttgggcgccagcgtgatgtacaatctgctctataataaaccgcaaaagctgatgctgttggcaggatgcagcacggtctgcaccactgtagccgaggctgccaaaatgtggaatctaattgtgctctgctacggggcctcgagtccggctctttcggatcgcaaacgattccccactctattccgcacccatccatcggccacggtgcacaatccaacgcgcatcaagctgatgaagaaattcggctggtcccgggtggccattctgcagcaggcggaggaggtctttatatcgaccgtagaggatctcgagaatcgatgcatggaggctggcgttgaaatcgtaactagacaatcatttctatccgatccaacagacgccgtgcgcaatttgcgacgccaggatgcacgcatcattgtgggactcttctatgtggtggccgccaggagggtgctctgcgaaatgtacaaacagcagctatatggccgagctcatgtgtggttctttattggctggtacgaggacaactggtacgaggtgaatctgaaagcagagggcatcacctgcactgttgaacagatgcgaatagctgccgaaggacatctgacaacggaagcgctcatgtggaatcagaacaatcagacaactatatccggaatgactgcagaggaatttcggttagtactactactctatccattgctaaagtttttgcttcaatgtgccttctttttgcgcagacatcgactgaatcaggcgctaatcgaggagggttacgacattaaccacgatcgctatccggagggatatcaggaggcgccactcgcctacgatgcagtgtggagtgtggctttggctttcaacaagaccatggaacgattgacaaccgggaagaaatctctgagggattttacctatacggacaaggagattgccgatgaaatctacgctgccatgaactccacacaatttctgggtgtatcgggtgtggtggcattcagttctcagggcgatcgtattgctcttacacagatcgaacagatgatagacggcaagtacgagaagttgggttactacgatactcagttggataacctatcctggttgaatactgaacagtggattggtggcaagaagacaaagcatgtaacgactgaaccgaataagaacggaaatccgtccaaagacgacgttaatacaagaggatcattaacaagcttaagtgagaaaaatgatgaatccaaaaatccatcatcatctgcaagtcttcagcaagctcctaaggtagcaccaaaaccgaaaaagttatcaatttcggatgctggtaaagacacagtaacccaaaaagtcaaagaaaatgaagagccaggattttctaaacaatttgaaaaagaatctattggtgtgcgagcaaatagaaacagcagtgcaacaaaaaaggaaaatgaaaagctattagtaaagaccgtgcccggaaaatctcttataaaagaatctaacgatgaaaatgtggaaccatctagacgcacaaaaagtcagccagttggaaaaaaagtttacgaggaatcttcaacgaggcgagttcgtgagccatttgattcttttgatagggaaaagtacctgtctgatatgatcgattatgatcgatcgtccgaggacgtgccggaaaaaaaactatcttgggaaccagacagtacacttcgacgtcgttttgtcagcaataatgaatatcattctagtcttgaaggtgaggaggaagagatcgatttagattcagttggatcgtcaacaatgcgaggtagctatcgaatgccacagaatgccgaggatgaacgacctgttatcctagctgaaataatcaatatgggaaagttgaaggagctcaaggagcaacgcgaatcaactaacgtatttcgtaacaatcgtagagatgataaaaccattgatgaagtgaagggttccaagatcacaggaaccagcaaacaacatgttgaagaagttaaatataatgaaacagcaagtaatgaagatgatgacaatgcacaggtaaaacatataggtacaatcacaaaaatctttagcattgcgcaaagaatgaaagagaagaaaagctccaaagaaagtgaagaagacgagaataaggacgagaataaagatgtaaaaaaagatgaaaataaagacgatgaacagaaacttcccccggaaccagagatcgaattggaggccaaaaaagcttggacttttccgatcgcagagacatcacctgatatccctggagaaaatcagatcctgcaagaataccaaaaggttaaaattggcaaaagaaacaggaaatacagatgtataggcatcaatacggatataagcagaaaatctaagattaaaacatttatcagcaagtctgcaggtgatgacttagtagtataccatgatggtggaagattgcgagatataggacaaaccactgaaaatcttaagaatcaacgaaagaatcataaacacaaaaccgaaccagatgatatacccgttgatataggacacagcgatgatcgagtaagggaaattggagtgaatactaaaaagttaccaaaaatcataataccaccaattgccgagatgcatgtgcacaaaaatggcaaattaagggacattggaaccagcacagataagccattttggccaatcgatgacggaactgatgtaatctacatgcatcccattaagactgataggaagaaattaaacaaactgattgtggatccaccgccggataatggaccctacaagatgccaaccaaagaagatagacgaacgtactacaaaggttgtgaatatcattttcctggccgaacggaatggcgcaggcttttcttcaacaaaatccatggaaaatacaagctacgccgtccaagtcattggctctacacactagttttttccgttttatatattttgtttgtcattatcttttccatggcctggttcgatttcatcaaagatgacgcttccagaaaggtacccatgataaagatggcacaaccatttattagtttcactcccatcggaccacgaactaatcccaaggcggtatcctttgatcctagaaacagcacagaagtcatggaaaagtacgctggtataatggctcttctggaaaaatacggcgactatggacacaatccgcgttttggaacgtgtactgcgaatgaaaagtttggctatccaagcggcgaaccgtgtgtttttcttaaagttaatcggattattggatttaagaccgaaccctacatcaattccgatgagcttgtcaaagccaagatcgatgaggttgaatttacggccttaaaaaggttattggaaaatacaacaacagaggagggtcatttgaatcgcacttggataacatgccgttcagataaagataagaatgttttgattgaatttcatccagagccggcgataagaacggaatacaccgatattgaagagaaaatcgagtatattgcgaacgagggtaaaaagtcatttttcggcccaaacgatgtgaatcgaatcgtggctcttaagatcaaaaatctcaaagcaaatgaacgtgtccatataaattgcaaaatagtaatacaatcctcgcatcccgtttgcaatacgatcatgttatttggtgtcatcatctgtctaatatctgtcatcttactgggcatcgacggacgctttgtcagccccgaggaatatccaaagatctttgatccgctgcagcgttatctcgaaacattcccactcgaagatccagtatctactactgatgatattaaaatacgtccagagcttgagcattgtgaaagtcaacgcaactccatgtggttgggtcttgtatacggcttcaaggggctaatcctggtgtttggcctctttttggcgtacgagacgcgctccattaaagtgaaacagatcaacgattcgcgttatgtgggcatgagcatctataacgtggtcgtcctttgcctgataacagctccggtgggcatggtcattgcatcgcaacaggacgcgtcctttgccttcgttgctctagctgtgatattctgttgtttcctaagcatgctgctgatatttgtgccaaaggtcattgaggttatacgtcatcccaaggataaggccgaatcgaaatacaatcccgattcagccatatcgaaagaggacgaagaacgctatcagaaacttgttaccgaaaacgaggaattgcaacgattaataacacagaaggaggaaaagattcgagtcctgcgacagcgtctggtggagcggggcgacgccaagggcacagaactgaatggtgcaacaggtgtcgcctccgccgccgttgcaacaacttcgcagcccgcttccctcatcaactcatcagcacatgccacgcccgcagccacactcgcaatcacacaaggtgagtag

SEQ ID NO: 37878 - protein, 1713 aa, DROSOPHILA
MWNTTNTAGASRVSSPEYNAKKTEYLQKEIRVKWNYAPPPSNTPYDPAQAKGAAKKKKRLMKQLKHRPKEQRSRQRQRQKHRQRIKRRPRRRGSSSSKAGNNNNNNRNIAFLNGNTQKKYCWQEFRTLPKGMRTDEGAGAWRDMTSDGAVTFWIFLLCLIASPHLQGGVAGRPDELHIGGIFPIAGKGGWQGGQACMPAARLALDDVNKQPNLLPGFKLILHSNDSECEPGLGASVMYNLLYNKPQKLMLLAGCSTVCTTVAEAAKMWNLIVLCYGASSPALSDRKRFPTLFRTHPSATVHNPTRIKLMKKFGWSRVAILQQAEEVFISTVEDLENRCMEAGVEIVTRQSFLSDPTDAVRNLRRQDARIIVGLFYVVAARRVLCEMYKQQLYGRAHVWFFIGWYEDNWYEVNLKAEGITCTVEQMRIAAEGHLTTEALMWNQNNQTTISGMTAEEFRLVLLLYPLLKFLLQCAFFLRRHRLNQALIEEGYDINHDRYPEGYQEAPLAYDAVWSVALAFNKTMERLTTGKKSLRDFTYTDKEIADEIYAAMNSTQFLGVSGVVAFSSQGDRIALTQIEQMIDGKYEKLGYYDTQLDNLSWLNTEQWIGGKKTKHVTTEPNKNGNPSKDDVNTRGSLTSLSEKNDESKNPSSSASLQQAPKVAPKPKKLSISDAGKDTVTQKVKENEEPGFSKQFEKESIGVRANRNSSATKKENEKLLVKTVPGKSLIKESNDENVEPSRRTKSQPVGKKVYEESSTRRVREPFDSFDREKYLSDMIDYDRSSEDVPEKKLSWEPDSTLRRRFVSNNEYHSSLEGEEEEIDLDSVGSSTMRGSYRMPQNAEDERPVILAEIINMGKLKELKEQRESTNVFRNNRRDDKTIDEVKGSKITGTSKQHVEEVKYNETASNEDDDNAQVKHIGTITKIFSIAQRMKEKKSSKESEEDENKDENKDVKKDENKDDEQKLPPEPEIELEAKKAWTFPIAETSPDIPGENQILQEYQKVKIGKRNRKYRCIGINTDISRKSKIKTFISKSAGDDLVVYHDGGRLRDIGQTTENLKNQRKNHKHKTEPDDIPVDIGHSDDRVREIGVNTKKLPKIIIPPIAEMHVHKNGKLRDIGTSTDKPFWPIDDGTDVIYMHPIKTDRKKLNKLIVDPPPDNGPYKMPTKEDRRTYYKGCEYHFPGRTEWRRLFFNKIHGKYKLRRPSHWLYTLVFSVLYILFVIIFSMAWFDFIKDDASRKVPMIKMAQPFISFTPIGPRTNPKAVSFDPRNSTEVMEKYAGIMALLEKYGDYGHNPRFGTCTANEKFGYPSGEPCVFLKVNRIIGFKTEPYINSDELVKAKIDEVEFTALKRLLENTTTEEGHLNRTWITCRSDKDKNVLIEFHPEPAIRTEYTDIEEKIEYIANEGKKSFFGPNDVNRIVALKIKNLKANERVHINCKIVIQSSHPVCNTIMLFGVIICLISVILLGIDGRFVSPEEYPKIFDPLQRYLETFPLEDPVSTTDDIKIRPELEHCESQRNSMWLGLVYGFKGLILVFGLFLAYETRSIKVKQINDSRYVGMSIYNVVVLCLITAPVGMVIASQQDASFAFVALAVIFCCFLSMLLIFVPKVIEVIRHPKDKAESKYNPDSAISKEDEERYQKLVTENEELQRLITQKEEKIRVLRQRLVERGDAKGTELNGATGVASAAVATTSQPASLINSSAHATPAATLAITQGE

SEQ ID NO: 37879 - DNA, 2724 bp, DROSOPHILA
gtgcgtcgtaattgccgttttcccttgtaccaggtgatgatggcatttggccgagagccggaggattcgcaggacacctcgtagcggcgatcggcaatcatcgagctgggcggctccaggattttcacaaccaaaggcttcactgtaattggacaggaagaacattcaattcaatgcaattgtaattaaaactgtttaccataatatttcatggtctcataattgcagttcgttttgtaaggcaatcattttggacccccccccccccccttcccgtttacttcgtacaaagctagggctgtgtgctctatgccccacagtatcaacaacaatttgtgtctattacgactcgacagctctcaagtgctgcacttcctggctggattatgactttgtccggccttccgatgccgtgtctgctgctcgttgatgactggactccttgagctcctgctgcattgtgttccacctggatggatggatggagtggactgaggccacggccttctgcgaacacgagggcctgacattcgagagttgacgccccccatcgactatgttgttttctcgtcagttggcatataattatttaatggcccttataatgctacatttagcattatggcaagtgtgcgttggccggaaagtgatgctaacggcttggccgcttgaaattttgaattttctttagcagaaggcctttaaattagagcctacatacatatttatgagcaaatcgatttttttgttttaaataattttgcactccgttgtgcaatttagaatacaattacatcaatccgaaattggaaaatgtaggctaacaaaatatccgaatatattggtaaagatttatggaacaggtatatatttagtggaaataatctttcgattgcatcctaacttttaggtatttaagatattggtgccaaggtatttcacaggatggtggctttccgtccaatttgtccgacttttaacaaatatattagggcaacaatcaacgcgacttacagtgcatatccagtatgaagctcttctccttgggtttatctaattgcgtattcagtgcctgacatgtgaatacggaattcaaatcgttgcgctgcaccgatggccacaacagacggttctcgataacatcgccggaattgtgctcgttttgattgtcgacaagcagtccatttacgagccaacggacttgcggttgcggccgacctattggaataccaaaaacaaaaaaaaaacaaaaataaaaaagaaagggggacaagaagttagtaaactggttgtaaaaacgaaaaatggtgcaaattaaaaagtcaagcttgaaaaaataccacaagccaagcctgagccaaaaagtagtccaacccaaaagcagagcacagactttgtgatattttcatttgcagcactttttctttgcttttttgccggtcaaagcttttaaggaaattaacaggaaattgtctagccgagcatacggatatggctcgtatggatgtatgtgggtgtctctctgtgtgtgtgtgtgtgtgtgtgggcgagtgtgtttctcttgtgtgtatgtatgtgtgtatcggagtattggggttaagttcgtcttttgtagtcagtcagcttaacttaccgcccaccacacgacaagtgataacgatatcatcgccctcctgcttgggccccaattgagtaccattcagctgacgaccccaacggtccatgatgattggctgctccggaagtactaaggacaaacaggatggaggagaaaaacaacacagatggatgggtttttcaatggcactcgaatctcatgaatacaattcgaaggcttcattttatgggcaacactcacttattactgacaaattgaaacggaaactttgcgtttgactggtgcgaaaatccacacgacaacggtaaataccctgatcatgtcgcttgatatcctgcaaaaattgtaagttattatttgtggattttgtgtttttatgcaagtgagtaaacggagaattagcatgcatacaatcaaccagaaaaactggtttcccaaccgtataattttcaattattgcatgacacttgagcttttgcggttttccctcgtgtgggcttcaaatgccagactagaagttgtcgtttgtcacattgtcacaagagtccttatgggcctttgcaaaacctgtgtagttttcaataaatacaatttttcagcatattgttctcccagagactttgctctttttgctcgaattcatttacttatttaataattcaattgagcgaggaaggactccttccaatattttgtgatttcttcttttgtgatttttctctgctgcttagaattgaatctcaaaatctatggttgttaatccgcttctttaaatataatattgcagaagtgattcagatactacgcacattcaatgcggattattttttgacatttttctaagatgcaatcaggtaaggaggatttttaataattcacatttcaattttaaataaatgctaagcaattgaattatagatttaatttttaaccgtttttcaggagctactcctttttgttggtacagttaggattgaatagatcaagttattcatgcgtaaactattaattacaaaattcgtgaacagatgacacccaatggaaatacgtattcgtccatttagtttgattctcgatgcgtgagcagactctttgacctgctttac

SEQ ID NO: 37880 - DNA, 309 bp, DROSOPHILA
atggaccgttggggtcgtcagctgaatggtactcaattggggcccaagcaggagggcgatgatatcgttatcacttgtcgtgtggtgggcggtcggccgcaaccgcaagtccgttggctcgtaaatggactgcttgtcgacaatcaaaacgagcacaattccggcgatgttatcgagaaccgtctgttgtggccatcggtgcagcgcaacgatttgaattccgtattcacatgtcaggcactgaatacgcaattagataaacccaaggagaagagcttcatactggatatgcactgtaagtcgcgttga

SEQ ID NO: 37881 - protein, 102 aa, DROSOPHILA
MDRWGRQLNGTQLGPKQEGDDIVITCRVVGGRPQPQVRWLVNGLLVDNQNEHNSGDVIENRLLWPSVQRNDLNSVFTCQALNTQLDKPKEKSFILDMHCKSR

SEQ ID NO: 37882 - DNA, 4629 bp, DROSOPHILA
attatacggaaaccaattggcatggtcgggattttaatttttgtgggaataatttactaaatgattcaagagctactattcgaaatctatttactgaattaaatgaacttttgcatttcaactgaaatgcatttaaatcgtttgaaatagcgtttatgtttcctttcctttacttttctaaaaagggattccaggtgcatcgcacacttcagcacacctgttgccactccaagagccaccccatccatcagctatgaaaacaggctaaaaaaaattgcaatagctcaggcacttctccacggatttggccatccggcacagagtttcgtgctcaatacaaatgcagagcaaaaattgattgattacggccctctcaacatgatatattgtgttttaaaaatctcacaattacctcacagccccgactggtgggatgtagccacgttgcacgttatccccgatttagccaatggatttttatttataacctgagtggcagtgcaaagagtgggaatttcgaaggagccgtgacagtttaaaagctttttttaatacagtcgggggtgtttggggataccgagatgaagggccaactgactgccggttgccagttgccggttgcccgggattctgtttagcaatttgacaatttgagtagttgattgctttcagtgcaccgcccagattgccaggacaatgggacatcgggaccacgaagtctgggcaatagaagcccagttaatacgaaccgcaactgacaactgacagacgttaaacgctccaactgggctggctcggattggattcaagggccatctggactacctttctgctccgaaaggcactcacagacagaatgtttgcaacaaaacttgccaaatcaaattgcattacggagaatagagcaaagcacaaacggcaaaagagtttgtctaactttcatttgcagttgcctatcccacaagattgaatgcgccaaaggtgtcacgttttcattatttcacaatccatcactagtgatgagatcctagtgcgattttttgtttaaaagacactaaccactaaagatttggtgggttttcttttgatttaatgtaacttaaagtattctaagttacattacagatttatgtataaatgcttttgacctactttaatgccgccaaaaatactatttatttcccactggaacaatcgcatgtttgtgtacttacattgccattgggtgaccacttggaggccccgcctcctgccgccgctgtgccagatgcaaactgatgtccatctgtggcagatgctgacgatgtggctcctcccggtccagccatcgctgacgcggccgcattggcgttggccaccaccgccgtggaggtgctgctcccggtggcggtgccagcggtggtgctgcccacgttggaggcattgctgccactgctgccggcgctgctcccaccgactgcttgattgaaatttattgatgagcagccacgttgcgggggggtcgtcgtgtccatgtgttagattggcgggttccgtcgttaaaaatatttacgattaaaagaaaattgcattggttgattggattggattggatcggtacagttcgatttgggttggatcggtttggtttggcgtcggtcgtattgttgttgtgttgatgagattgattacgattgcgggtcgccaaagaacaacggagccggatgtgcagatagcatattgccattgcgatggcgggtcacatgaaagtaaatgtcggaaaagtggccataaaatttgattaaagtttaatgctcgaagtgcacactataaaaaagctgctttattctcggttacttcagcggacacttgactcgcgcggggtgacattaaaaagcaaaccgaaattgagctatacgcgcaagtgactcctactcgccctacactgtacaaaattctgaaaaattatttattatttaaaaattgttaaaaaaaaattcaaaatattttaaataactaacaattgcttataattctcaaatttattaactaccttcgtacataatagaatataactgctacaagctccgcacaagtcgagtgcccccaaagtgtcaggaactgtttataatcttaccgtattgcgatggtattacatccggatcacgttcgtcctcaaccaaatcctctgatgatttcgtttttatgtccgtgtgctgccatcgcggcttctccaagttgccgccctacgagaaaataatacgtacattaattgttcgaaagcctttgaggaatgtgggtgcaagtgatggatgtgggatggttggattgatggctggtgagtggggaatggtgaatggtgaatggtaggtgcaaagtggtaaatccctcccataactgcaaaacataccttgaagacatcgctgggctgggcggttactccggcggcggtggccttgctgccatgatgacgattccgccgcaaattgtgcacaaatgtcaccacgaatattcgtatcgcgatggccacaccaataattatgatggtcaggacactgccgacaatcaccggcgacaatgtcagtgttacatcgtcgtctgtttgttgtaattcgcgtaattacaggttgacaatcgtcgttcataaatcatcatcgagttttagatagattcccatcacagcagtcccacgtatatcaaattgattggcgatggaagtggtagttaaggcgttggattccaccgacgaccataacgttaaatttgtcgacatgtgacggttttatttttagagaagaaaaagcgcagaatatattccatgagtgtaagtgtgtgataaaggcataaaaagtgggcgataaatccctacatgaaccagttggctaaacttgttaatgtgttggcaaaatggattaagattgatttgatattcatttaatgggtgggtgatgattttacttttcgattaggaacacaaaattagaagtggcttccttttgatattttccaaacaaaagcattcctgactctttgcataaggaattttcggaaaactggtccactgttcaggatcagcccttgttaaaaagtaattttacacatgtttcacgccatcgcatgatggcagcagggaatgtgtccttcaggcaggcatgttgattggagtaagtactgcagatgactggcggaggagccccacctgtcaggtgtcacaggcagagggactgagaggtggttggttggctttgggcttggaatcggaagtgaggcctattgcctgtatgggattaatgcagccaaggaaatcaggaaatctctggctaggccaaagaagccgatataatgctctgcacccagtgtccatcagatgcgagctgttcacttgtcaaaagcataaacccgcccgcccactttcaatcttcaatcccacccttgccagaatttccagcatccttgcatcatccatcaatcaaggcaaattgtgctgttcgcttttcggcggcgccatctggctgctggtagtgccactcacctgtcttgtaagctgttgagccaattatgaaatcggttagcagataagcggcactgcggcccttctggttatacgagtagatgcgcagccgcagcgaattattctcctggaccatcatcgaggtcagagtgtccaggttctccagcgaaaatagtgcctcctcggcgttgctcaaattgaatctgcgaagatggatcgtacagacaaagggttggttattggccggaggggctcgatatgattgcgaattaaatcaaacgaaatggccaggaaatcaacggcattaagcccttaatcaaatgtttgattgtgtttgtgtgcgtgtgtgtgtgtgtgtgtaagcgcggcctgagtaaaatccaatgccgcaaatactttttggcagcccttttcctttggcatttttacgggtttttcgctggcatgttttcctaaccccaagcacttttgccgcccccttccaatgctccagtcctcataagatatgcgctctttccaatcatgacctcaatttgaatttgatgcctctgccaacgaatgcggctttgacttgtctacccttccattccaagcaatcctttccttgaaaaaattctgaaatattagggttcgatgtctatatatatttcggctaaacattttaacattgatgacgatgtttgttgcgtttgttgtttgttttttttttttcgctgcccactgtgggcttcaatttcctttcgttatttttttttgttttgctttgacgatgtctttgtttttaataagaaatgtttatttgccttggttgaagcccaaaagaaaaatttggcataaatttatgcgaaagaaaaatgaaatggagacatatccctcgcataattttatgtgcgcatatgaatttcatttccccatttaccataaacatgtatacgcatttaataaccactatgaatgcaatggctcaaggacccatttcaggacaaacacagcctgcccaagagcgaactgtttcacgcctaattacacacctacatggagtgccatatatgtatgtgtacacatctcagaggtgaaggcacttgaaatacatttgccagaactcgagtaccccaactcaactcacccaaacactatta

SEQ ID NO: 37883 - DNA, 684 bp, DROSOPHILA
atgatggtccaggagaataattcgctgcggctgcgcatctactcgtataaccagaagggccgcagtgccgcttatctgctaaccgatttcataattggctcaacagcttacaagacagacgacgatgtaacactgacattgtcgccggtgattgtcggcagtgtcctgaccatcataattattggtgtggccatcgcgatacgaatattcgtggtgacatttgtgcacaatttgcggcggaatcgtcatcatggcagcaaggccaccgccgccggagtaaccgcccagcccagcgatgtcttcaagggcggcaacttggagaagccgcgatggcagcacacggacataaaaacgaaatcatcagaggatttggttgaggacgaacgtgatccggatgtaataccatcgcaatacgtcggtgggagcagcgccggcagcagtggcagcaatgcctccaacgtgggcagcaccaccgctggcaccgccaccgggagcagcacctccacggcggtggtggccaacgccaatgcggccgcgtcagcgatggctggaccgggaggagccacatcgtcagcatctgccacagatggacatcagtttgcatctggcacagcggcggcaggaggcggggcctccaagtggtcacccaatggcaatgatctcatcactagtgatggattgtga

SEQ ID NO: 37884 - protein, 227 aa, DROSOPHILA
MMVQENNSLRLRIYSYNQKGRSAAYLLTDFIIGSTAYKTDDDVTLTLSPVIVGSVLTIIIIGVAIAIRIFVVTFVHNLRRNRHHGSKATAAGVTAQPSDVFKGGNLEKPRWQHTDIKTKSSEDLVEDERDPDVIPSQYVGGSSAGSSGSNASNVGSTTAGTATGSSTSTAVVANANAAASAMAGPGGATSSASATDGHQFASGTAAAGGGASKWSPNGNDLITSDGL

SEQ ID NO: 37885 - DNA, 3247 bp, DROSOPHILA
cgccctttgtttacattccaaatagtcaattttgttttgtcacactatctttcgacttagcttaacatatttattgatatttacgcgtaattctgttagcctagcacagtttaaactctttcaatttctttgatctaatgtatcttaatctagcgctttcctttctaaacatttaacttcaatatttcttgtagctctaagcaggaccatttgccgatttagacggcgactcaaacataaactttgataaatttacaatcattcatatttatatacaacaacaaatgatatttaggtgtgcttgccatttttctttttatacaatttacctattcactatgccacgtatatatattttatatacaagtattcctatgctgtttacttttcatttcgaaaatattttagctacaaaatatttagctactacatcgtttgagtctttttgaagtttccttaaattagagtgtgtgtttaactgtgttgtaaaatgatgttaatccagttaactatatccaatattggttgggaaagaaatatacatcttcaaattcggttagcaagtttcatgtttgcaaatgccaggcattgagccaattttgctttcaaaatatatcgaaattgatatttcactccatctgttttagtttgatataacaagggatatgctattgaatcagaagatatgatgtttcctgtcacttgcacttattatatggttatatatgcacagcaccttaacgagaagaaaacaggcctatttcagttttcatattcctagaaaggtgttaaatgaagtgttgggatctaaagtaaataatacaagccacataaattaacgtagttacatattttacactttttcaataaataataaggaattattacttttttaaagatttaaatgaatctgaaaacttccacagtcctgtctgacatagattgatattcctgcaaagtaaatacatgcatccgaatctgtcgtatccagccctcggacttagacacaactctcgggcactcgctgcgtcatgaggcagtccttaatcgcatttatattgatgttatcgtccagatcctgcgaggagttacacgaggttgtggctgtcgtggtggatcccacaacgcccatcacgcttccagcacttcccatcaaaagacttgagccggagtggtgtggctgctggtggtgcgggtggtggtggagctgctgctgctggtggtgatgcctgttcagtgtggcggtgtgagtcgctccgcctggcaccccacccccaggtggatgatgcaggcgcccgctggcataagcgttcagtatgtagccaccgccgcttccgagtcccggtggcaatgtgcccactccgctactgtgcgccggctgcaggtgagctgccaaagtggccgtcgacgatagcgacgtgggcgacccgatgaccgtgccacccactcccatgcccaggcccatgcccattcccatgcccagcggcttgccaagaccgcccagtatgctgctgctgggcgagattacggtgctgctgcatccaccgcccactgcagccaccgccgccaacagctgcgcccgttgcgcgttgatttgattgtaggtgacagttgcattcaccgcatcgccggtcagcatcgtcgtcgtcacctgcaaggcagagagaatggagatataggtacactcaaaaagacgaatataagaagctgaattttgagaaatattcatatttcacatgtacataataatctactacatatacaaatatgaaagagaaaaattgaaaattacgtagtacgtaaattgtgttaaaatttaggaaataactgagctgcagtttattattaaaggtttttttttttttttttggtagccattcttgcactgaaagtcattcgcctggaaccaattgttctctaccactctagaattttccacgctaatgcaattatattcttatgcttgccgattccctgagcaattttcaacttttaaagaaactaaaaactataattttgaagcaggaaaaacctacaacttcatttcgtgctcttttaaaagtaataacgaccctgcaaagtggtacaaaacgtagttttttatacaaatacagcaattttttcggtgcaacatagctaaaatccgatattggcttgaccacaaacagttagtccattcttaaataaaatagtatggactcaatctgaaatccccttgacgctcaaaaacgtattctgcagatacatttgtgaaattcgatacaacgatgttttgatctgcctctcacttccgcctccgcaatccaattagcttaaatgattattccgaaatgctcgattttcgactagaacatctaaaatgccgacgaccaatactttgttattttgcattttattttaccggctggcaaagcgaaatgaaattctaattgaaatctcaatgcaatttccaggtgtcgggtgagtgggggagtattgcgaacactggcatgttcggctgttatggttcgcaatatttaaaattatttaattaacgaattgagttatgctgcgattgcccactggccgccactgacgcccatccaaccgcattttaagcctgcctggaatggtaatttaaatgtaattgaaatctgcgcagcaaatcccatttacagaatgaaacaaaaattccctttcagcccgactccgtatccgatttgggctcggaatcggaatcggatgctttgttatctggttccgaatgcaatgcgccttggagtgggtggaaaaaaaaaaccgcagagtcggctgatttcccagctacttctgtttcggcgtttttctgcattgcaaattggtgcggtcccagcggggcatcggtttttcgggctaatgtttttggccagattagtgatatatatacatatattcgcggactggcagtcaattggtcatgcccgatgcatatggccgtttcccggctctaatctcgttcgcacagcttatggtaatggctttctgggatctcgaccgttgtcagcgcataaaggagatatatgcatatatacatttatatttgaatattcatatgtgcaatatattcagacgagcggggcttggttataaataaattctaattgcgaacttaatgaaatgaaaacaaatgtgttttggccgacactctaatctcgaatgaatggctggcaaaaaatgtggtgaaaaagtaaaataaagtcaacgtggtaataaaatttattatacggaa

SEQ ID NO: 37886 - DNA, 679 bp, DROSOPHILA
atgtatctgcagaatacgtttttgagcggtgacgacgacgatgctgaccggcgatgcggtgaatgcaactgtcacctacaatcaaatcaacgcgcaacgggcgcagctgttggcggcggtggctgcagtgggcggtggatgcagcagcaccgtaatctcgcccagcagcagcatactgggcggtcttggcaagccgctgggcatgggaatgggcatgggcctgggcatgggagtgggtggcacggtcatcgggtcgcccacgtcgctatcgtcgacggccactttggcagctcacctgcagccggcgcacagtagcggagtgggcacattgccaccgggactcggaagcggcggtggctacatactgaacgcttatgccagcgggcgcctgcatcatccacctgggggtggggtgccaggcggagcgactcacaccgccacactgaacaggcatcaccaccagcagcagcagctccaccaccacccgcaccaccagcagccacaccactccggctcaagtcttttgatgggaagtgctggaagcgtgatgggcgttgtgggatccaccacgacagccacaacctcgtgtaactcctcgcaggatctggacgataacatcaatataaatgcgattaaggactgcctcatgacgcagcgagtgcccgagagttgtgtctaa

SEQ ID NO: 37887 - protein, 104 aa, DROSOPHILA
MYLQNTFLSGDDDDADRRCGECNCHLQSNQRATGAAVGGGGCSGRWMQQHRNLAQQQHTGRSWQAAGHGNGHGPGHGSGWHGHRVAHVAIVDGHFGSSPAAGAQ

SEQ ID NO: 37888 - DNA, 4312 bp, DROSOPHILA
taccaaagaaagcgcaaacacaacacgccaacttcgcaatgttctcctcttgccctctgcggaaatcaatgcatgccaaaatgcatctggatctgaatgcatattgaaaatgtgcataaaagctggctggttcgaaatgaagggggtggtgacaatgccgtctgctcggtatttttgcaactcgcacacccacaatcaattatgcaatatgaaaagccaaggcttgtccgaggaaaacgaaaaatcgaaaagcatttgcggcaatttctcaattcgaagtgaaagcagttggcatggcatgcagggggctgagttgtgaaccacaggcgtcgaaaaggggctgctctccatggcgaaagagataggggcagggatgaagtgctgtcaggacagacggcatcgtaaccggaccccgggctacgtcgacgtctgcattgcgccatgcaaactcgagctgcggcagcaacaactcattttttcccattattattgacaaagaggggggtatgtcgactgtcgactgccgattttcattgaatatttttcggccaaaacgaggccctcttcaggcctggaacgtgtggagctcagatccccagtcagagtcatggctcccagactgtgtgtcgggagtttgtgccaaaggctagcaaacagtttgcaccaccaccaacagcaacaataaggctcgagactcttctactcgacattctgctgacctcaatatttgttcaacttttcatcaacaattttgttatgcgattttggccccctcagcaccgcctccgtcgcctggctgtcataaatgcctgcagtttggcagtttgtgtagtgaaagtgattttcggatgggttcagttggtttattgctttgatttgccgctgctcctgctactgctgctgttgctgttgctgttgctaaacttctgtggtgctgattacgatggatggggtgtggcttttggccagcaatcagtgccggcaaatcaaatttcatgcctcaaacaagaatccactgactgagctaaaggaaggcggctgaattaaagaaagaggttgcacatccaaaacatgcgactcggggggcacttacccacacgcggcccaggaggcggcacaccagaaccacttggcaaacggggcccaaacacatgattgtgaggaggcgcaggctgtgggcgtggccatggacccacaacagctgacaaatggccgaggcgaaacagacgaacagcacaaagttcgacaagagaaccagtgtgctaatgaaggccaacttgcagcgctgcaatgaaatcgaagaagtgcgccgaccacaaagacaaaacgttaatcacttcttacgggcaccaggagagccaaattaaatggcaacagcagggccagatgatgtctgaaaaggacctcaaagaattgccagctggatgtcctaaggacctcatgccaactctgatggcgtcccaaggcaatgttttcttcatacaccaatggtacgtagtagaatgtgttcaccggtccgtccgagttaatcgatgctgtcaaagagaaagtttaagattctaggtgaatcaaaagtttatggaacctaccctgggccaaatgcttgaacatattgatcacgtagtacagcagaacgttgtgcaaaataagcagcatagcgtcttttctgaaggggtggattgatcgctaattattaaaagtaattaatatagcaattattagtacaagtatctcatagcttacgaaaatcaaaataatttggtataggaaaataatgcaagtcacaataagttcatggaaatcggccattataactgactccgccttacaaatgtataaattttgaattaggtttccaaaacaaaatttagacagctagacactgaaatcgttgcgttagatcatatgatttcaatgctctagcacccaaaacccaacacttaagattatccaacaaaataagaaattggcaatagaaataagcaaatgtctttagtcaaccgagttaaatacattgcccaaagtaaaaggtaaattactctagtacgacttaaattaactcaaaatacctttgccttgagatatcccagcctttcaattgtatctcttccactctcaggatctatggccacgcaatttatcaagatgcattaacatcttccattaatatcgcctcgattattatgcctacaattaagagtattcggccgcaggtatctacaaacctaatggtttacaattaccaattaacagattattccagtgaccaaagtgcctgatgaagatggaacatcagagtcaagacaatgcaatagtagagagcaaagcataataatttaatttaaatttccagcctgtgcaaataatgtaaaacattcctgcacattttaagtgctgctgcaaattgactgtcagtcagcaaagcggccacaaacatcagaaactgcagcgacaactgcaacaacttttgaacaactacagcaacagcaataagagttacgaaaacaataaccacacaatgacaatgcaaggcaatattcgcatattatacaaacaataaacattgttaattaatttacttcaactcgagcggtaactgcactttggcccactctaccgaaaaggatgactgtaagcttgtagaaagcacagagtcacataaggaattatttgcgaaattaccaacgcggcccactgtgattaaaaaatattaaatcttgaaacctcattaataaaatataagaaacaatgagagtgtttcacaatttattcatgtccacgaaataactttccaggacactcatcggagctctcatggaattcacttattaacgcttatatgatatggcgcttacttcgggcttttgataacttgtggcatatttcacgagcagtcgctataatgcctcatgcaagcggtatcattataaataatgactctgattaaatatgatgtaatcctttgccagggctaccgaatcgggcattttttaaatgttgcaaacttaattaagcatttatcatcgtcggcagagggaagggaagtgctggatgagataaggcgattggaggatggaacagacaagtgcattaattaacgggctgctgtccctggtaactgaccataaaggatttgcgttattaattgaacgattttcggatcaatattctacaattcacattgggagctgcgcactctcgggccacaccttccacattgcattataccttttatttttagtaatttgttcgtttgggccatttaagaataactgtcacgtacgtctggcatggcccgaacacacttaccatttcatcaaagtaaatcgagcttgaattgatttcgcacacagaagccgtatcagcctcctttccacaaaaactaccttggcttggccctaatgtgtgtcatttggccggcagttatctttgggccaaatgcacaaaggagcggtaattttccgaacatttcctttttggccagaaacaaaggaccacggcggttgttttttttttttttttttttttttggattcgattcgattttcttttcttgttagctaagtgaatttttatttgccatagcttttagtaattctccattatatttattcgattggggactttacttggtggcacatattttttaatataattttatatatacttcagttattatgttcattgctaataaaagtttatgaaactgaatgtgtagaatttcaaatttaaataagataaggccaagcgttgaaattcatatatcagccccattttcaatcagcaagcgcaacaagttataaccgaaaaagccaagctcttttaactccatttctgcattcatttcaatttcatttgcaaacggagctgaaataaaacggcgaaaactgagactcatttacacatttatgtgggaaaatgtcagctcctgagtaatttatgcacacaacggcatttaaatgccttttatttcctcttttttttcgaaacaagaccgcttcagttcgtcactgtttcgggttcactttcatttttcactgcgcaatgtttctctgagtaagagaaatgagctgtaatgggtgccaaaagccaacgacagggaaaaggagacaggaggccaccagacaatttatgcgagccttgggaattgtttcgaaaattgacaaattatggtcgtaagtgctgcgattagtccgttccgttccattcgccttttcgtttgctatttttgccaactgtcccaaggttgtcttcccaaaaccacaatgtgcattacatttactcacagagcagttgcagaaacgggtttatg

SEQ ID NO: 37889 - DNA, 513 bp, DROSOPHILA
atggtaagtgtgttcgggccatgccagacaaaagacgctatgctgcttattttgcacaacgttctgctgtactacgtgatcaatatgttcaagcatttggcccaggcatcgattaactcggacggaccggtgaacacattctactacgtaccattggtgtatgaagaaaacattgccttgggacgccatcagagttggcatgaggtccttaggacatccagctggcaattctttgaggtccttttcagacatcatctggccctgctgttgccatttaatttggctctcctggtgccccgctgcaagttggccttcattagcacactggttctcttgtcgaactttgtgctgttcgtctgtttcgcctcggccatttgtcagctgttgtgggtccatggccacgcccacagcctgcgcctcctcacaatcatgtgtttgggccccgtttgccaagtggttctggtgtgccgcctcctgggccgcgtgtggctcagtcagtggattcttgtttga

SEQ ID NO: 37890 - protein, 170 aa, DROSOPHILA
MVSVFGPCQTKDAMLLILHNVLLYYVINMFKHLAQASINSDGPVNTFYYVPLVYEENIALGRHQSWHEVLRTSSWQFFEVLFRHHLALLLPFNLALLVPRCKLAFISTLVLLSNFVLFVCFASAICQLLWVHGHAHSLRLLTIMCLGPVCQVVLVCRLLGRVWLSQWILV

SEQ ID NO: 37891 - DNA, 3019 bp, DROSOPHILA
atatttacaaattttgaggggttattaaaatttttcaggcagtaaaaatatttatttttgaacacgtcaatccattgattgctaaaggcagtttagcagctcacggccggaatcatcaattaaaaaatcgaattgactgttatctgtttttatatttctacacattcacatgagatgtctccgctttttccgacaattgtcgactgcaaactcttgtaatcctaatgaatccagcacctatttatttttcattgtgggaaattgtgcaaatgccatgacaacagttcgcttttggggggtcttatgccacgcatacacatggccacatggtctgaccatcatacggatacgagcgtgttcaattgcttaaatgtgccgtaacaacagtgcaaaaaagtacacaaaacctgtaagaaattctgtctgtcgcaacacaaattcggagtgcccttcagtaaagtaaatgatgttacttaaaaagatatatgacatatatatataattagcaaaattgtaaatttaccaggatgctgcgctaacttcgggatttcattttgtcaatataacaaggtgttctgaatgctattgcccccactgctccacataaacagatgtatctgcaggctggttagggtatttcgaacaagacagatactgatgtagattcactcctgcccgttgtttgcatacatcagtctgggctcggggaataggcagaagtgtacagggtggattgctgacagataggcagtatttgctgctattttgttactgcttgttactgtttcacatgaggctttgtctctcatcagtttaattagttggcaatgcttttgctttgctttttgccagacccttcacacgaacccccatggaaaacaaaagcttagctggaacaaaaataattttgtctatggcattgcatgtaaagctgacgcatatatttctgtacttcttaacattgatttaaatattttattacgaacatatacgctttcagctaaaacatgatcattggaaagtgttctggatatctatgctcatagaaatattcgtgcgaatcgccctctgagctataatcaccataccagtcatagtccactttcccgtaatgaccttcatgggagtcccaagacgaatcataattgttgtcccaatgtgctgtcatggtatccttaaagttaggttccggaatcggggatatgaacggtggcatggaaggaggattcggtgttggtgggatggttggaggtgctggtggtctagtaatcggtggactcggcggacgagttgttggtctggttggcggtcgggttgaaggtctgacctgaggtctatttgaaactgtctttttgtgaccgctgccgaagttacgccaaaccttgagaataaagtcgatgtggctcataacgtccgtgtacacacttgcatatttgcactgtcggtttgtgaagctggcaataccaatttggacgaagcgcttcgagttcttaaagggaattaaggcacctagaggaccaccggaatcgccattgcacagattactgttccagtttccggcgcagaactgacttcccacgatcttagcaccgatatactggcggcaaatttgcgctggctgccgccgtatgtttagggtcctgagcgcatcgctgtcggttccgttttcggtggtgccccaaccagttccggttagtatctgaatattgtcaatatacttcttccaattagaattcacgaaaatgcagatgggcctaatgttttctagtaaagcatacaaaaaggatgtagttggatttgccttttgtgtggtaaattgaagttatattataaaacccacctctgtaaaccactggcttttctagtcgcagaatggcgatgtcgttccataacatttggttgtgaaatagccgtggcttgaaaccctcgtccactttgtgctttactcgaacatggcagtaacttccaaagcacttggcatttttttcacttcttatgtactcccccagacgagcaaatctgaaaaaaagtatatattgtaaaatttctcattggatggatgtcacttataatgtctggttcggttgaaggcaatgcgctgcagtcagtaccagtcctgcaatgacattttataatataaacgtatatatacatataaaacaatttctgtacgaactgtttgtgatcaaagttccgccgcacacgaaatcaccatcagttgatttaagaaataccatccacggactggagttatatttagctattgtgccgttaacgacccttactgcactctttgatttagttataattccacaattcgggtcgagaaactgacaatatcctggaagtggtagaataaatagcatagccacaacggctaatgctatgtacttcataactgcggtcttaattgctcgaatgtcgggtgatcggtagaagatctctgctttataacgccgccaatgggcttatcaagaattgattcccggaaatttgtaagtataagtaaattttcataataggtcgagcaatacgcaagataattgtgattaagtaatcatttcttgtttattttaacttttaattaatatgtacatatgtatgtacttaaaatattctaataacttttaccatgttgaaatataaaagtatcctccaggataccactcgggactatagttccaatcccaatgcgatccatgattggtgtcataatcatagtcttggaaagtctgttttggaatccgagtagtatgccaccatgtaggaggacgggtggtcgttgggggtttctttgggatcggtagcgtttgacccttgccgtacatcctccacactcgaaggataaattcggcatggctcagaacgtcagtgaaaacacttgccttttgacaatttctgttcgtatagctggctataccgacttgcacaaagcgctgtgtgtttttatgcgtgatcactgctcccaatggaccaccggaatcgccattgcagagattactatcccagtttcctgcgc

SEQ ID NO: 37892 - DNA, 943 bp, DROSOPHILA
atttgctcgtctgggggagtacataagaagtgaaaaaaatgccaagtgctttggaagttactgccatgttcgagtaaagcacaaagtggacgagggtttcaagccacggctatttcacaaccaaatgttatggaacgacatcgccattctgcgactagaaaagccagtggtttacagagaaaacattaggcccatctgcattttcgtgaattctaattggaagaagtatattgacaatattcagatactaaccggaactggttggggcaccaccgaaaacggaaccgacagcgatgcgctcaggaccctaaacatacggcggcagccagcgcaaatttgccgccagtatatcggtgctaagatcgtgggaagtcagttctgcgccggaaactggaacagtaatctgtgcaatggcgattccggtggtcctctaggtgccttaattccctttaagaactcgaagcgcttcgtccaaattggtattgccagcttcacaaaccgacagtgcaaatatgcaagtgtgtacacggacgttatgagccacatcgactttattctcaaggtttggcgtaacttcggcagcggtcacaaaaagacagtttcaaatagacctcaggtcagaccttcaacccgaccgccaaccagaccaacaactcgtccgccgagtccaccgattactagaccaccagcacctccaaccatcccaccaacaccgaatcctccttccatgccaccgttcatatccccgattccggaacctaactttaaggataccatgacagcacattgggacaacaattatgattcgtcttgggactcccatgaaggtcattacgggaaagtggactatgactggtatggtgattatagctcagagggcgattcgcacgaatatttctatgagcatagatatccagaacactttccaatgatcatgttttag

SEQ ID NO: 37893 - protein, 272 aa, DROSOPHILA
MLWNDIAILRLEKPVVYRENIRPICIFVNSNWKKYIDNIQILTGTGWGTTENGTDSDALRTLNIRRQPAQICRQYIGAKIVGSQFCAGNWNSNLCNGDSGGPLGALIPFKNSKRFVQIGIASFTNRQCKYASVYTDVMSHIDFILKVWRNFGSGHKKTVSNRPQVRPSTRPPTRPTTRPPSPPITRPPAPPTIPPTPNPPSMPPFISPIPEPNFKDTMTAHWDNNYDSSWDSHEGHYGKVDYDWYGDYSSEGDSHEYFYEHRYPEHFPMIMF

SEQ ID NO: 37894 - DNA, 2529 bp, DROSOPHILA
tatacatacgtataattatgttatgtctttgaattttagcgcttaacaggttagaccactatagtcgcattcctcgattatcagatacccatttcttagctaatagaagaactaagatatttacaagacaagactagatgaaatcaatgaagaatctagagtgttgttggcacaggttctgaaagaattggaactatttagaggtctgaatctcattcagttcatacagacaggcttacagacagatggccaaacgaatacggctagatagactccgctggtgatgctggtgaagaatatatatattctgtataggtaaaggttcggcaacgccttcttcgaactcccacagactttttaaagaatttggtatactcaattactccacaagtaccgtctataaaaacatagaaattatgtgtcttaaaaaattgtatttattaaactaataagactagtttatttctttacatccttttttttaaagaaatattatttgtattttttttcgctgtgtttggttacattcaaaaacatttaaaattttccaaaccaattgtactttttttgagagcaaattcagcctaaaagaatactgttaagcttgtgaatttaaatgcagcgctaaaaagtcttcgccgtttcttatactttttttttagtggcaattgaaaagcttttaatcggtatatagctaatcagctccaaaataagcaaaacaaattaacaagaagaaagatcaggctaaaggtcctcaacccctgatcagaaatcagctctgttaatgcagtgctagaattttgctacctcatcgcagacgcttaatctaataatcacagcttggggtatatagatttcgataggaaataataagcaaaaaataagaaaattttgtttttattactttgttttggtgcaaatcgctccattcggcttccacctgctataaaagccctgccatttacatagaattagttagaacgctttcgacagtgtaaacaatcaatctaccaaaatgaaattcttcgtaagctctgcaaattcctttcaaggattttggtgggctcggaattaaacattgttttatttctcttcttttagattgttttcttcgccttgatcgctgtggtctttgccgctggctatggacaacagggtggacacggccagggtggacgtggtcagcaaggattcggacaaggtggaaatggccaacaaggattcggacagggtggacacggccagcaaggattcggacagggtggacacggccagcaaggattcggcggacaaggaggacatggccagcaaggattcggacacggtggacgttactaaaatacagccttaataaaataatattttccaaatttaaaaacccttaaattagttaagtttttaatgtcgcaacacaaaatgtacagaaattactatttacaatagctaaaaagccgatgtattttcttctttcacgtaaattcttgtaagtttagtaaagcaacagttagagttgttaaaattttacacaagcagcggagtttttcgtttcctattatattatattattatattataatatattatattattgtatttgttatatagccacgaaatttttggcagtttgtgggcgtgtctacaacaaataacaaacgtgcgctgcgtctatgcccctggaatctgtatgcctaagctcaactttttagcttttatagttcctctaatctcgacggacggacaggcaggcggacgaacgtggacagatcgaacgagaaccttctcatgttcaataagagcagtgttctctgtcattcaattaggtctgggaattcatcgatgcatcagcaaattctcttgaagaaacattgcaaggctgcaaatatcaacttctagtgaatactgatgatagggaaatgtaattactctcaacaaaatttcgagtacgaccatttttacgatctatttagaaatataaaaaaacatgcatatacgtttgaggtgaggtcctaagtaaaaatatgtgtaccttaaatggttataataagtattttaaatgattgtatttggtagggtatttaatgataaggtgtaagctcctttaaattttcgctatataagtggaagtttgcaatagagagcttcatcacatagaatatggagtttatggtaagtggagtgaaatgggctaatataagttgttgataaaaaaataataatagtttcagcttgtactagtcagtttcatggtcgttgctttagctgccagcaacttaggatcatcttaccggtatgcctgtaatttaaatacaggggaatataaatgcacttacaagttttgcacaaatactttggatggtacacaaaattgcactactagtgatttcattcctaaaaatatagctggccagagaagagcatcttcctacaggtattcttgtgcttggaatactggagtatataaatgcactcatatacgatgcacccaatatttcggcggtcataaaaattgtaccacaagcgttactacca

SEQ ID NO: 37895 - DNA, 529 bp, DROSOPHILA
aatcaatctaccaaaatgaaattcttcgtaagctctgcaaattcctttcaaggattttggtgggctcggaattaaacattgttttatttctcttcttttagattgttttcttcgccttgatcgctgtggtctttgccgctggctatggacaacagggtggacacggccagggtggacgtggtcagcaaggattcggacaaggtggaaatggccaacaaggattcggacagggtggacacggccagcaaggattcggacagggtggacacggccagcaaggattcggcggacaaggaggacatggccagcaaggattcggacacggtggacgttactaaaatacagccttaataaaataatattttccaaatttaaaaacccttaaattagttaagtttttaatgtcgcaacacaaaatgtacagaaattactatttacaatagctaaaaagccgatgtattttcttctttcacgtaaattcttgtaagtttagtaaagcaacagttagagttgttaaaattttacacaa

SEQ ID NO: 37896 - protein, 68 aa, DROSOPHILA
MDNRVDTARVDVVSKDSDKVEMANKDSDRVDTASKDSDRVDTASKDSADKEDMASKDSDTVDVTKIQP

SEQ ID NO: 37897 - DNA, 6041 bp, DROSOPHILA
attattctcatagagacaaactattcaagacccaagccaccgcaacttaaaacatttataatgcccagtaacgttatgaaaatgcatttttcgactgtccccacgacaatgagaaacgagaacaacagaagcgaagaaaaaaactcccccgacttctggcataaaatatcacacgttggaaacgtttttcgcagcatttgtgtggcatttaattaaatgcatttttattttattttttttttttaatttcacccaacgtcacataaaatatgcgaacaaaaaaataggtgtggaccacaagaaacaggtgcgaaggagagacagtgcaaaaaggtgttaatggtgactatgaaattccatttgcatacactctcaagttacaaaaaataataaacgaaaagcatagtttctaaaaaaagcgataatttttaatgcaattttacctttttatacgtgtgtgtatgtctgtgttttttgcccctttcggctaagtaatggtaattaggcgtggaaaaatccattagcccaagcccggtcggaaacagttgccagaacataaggcggagcccttcgagtgctaatttgaattatttaaatttcaaaattgccatcaaatgctccacacgttatacttaaaatgtaaatacagaaatcgaacagaatatatatagttttatacccgcaagaggcaaacataatattttaattggagcttttgatagatattagaaaatatatacgacttttaaaattagttcaaagttccgactgtgtgaatgcctaataatatacaatatgttttatttaatttatttattaatatgaacattcaataaagtacttgctttcttactatgtttgtggccataaccaacgtaaaatgataacttcgaataacacatgaatagctaaaccaattaaaaaagcgaaaaatcccagcataaccactaagtgaactttgagggaattatcaacgttttccctagtctcttcctgaatgctagataccgtgtgctttccgaagtacaaggttacaaacgccaatgtaatagccgttttgcagatccacacgcaagtgcgttcgaactgattcatgatgatgcccccgaccttactttgcgatggcccggttattgcattaatcaaataccaactgaaataaagctgctctgctcgactccggaaccgcttgcaccacgtatacttgggatatctactatagttgccatatgtaaagtacttggatcgcataaactgtatgtgactcccgccttcaatccagctctctacgaggaatagctgctgaactttcaacttcagatccaccactgttatggagcgacagtaccacgatggataccgtccattgggaacgagacgcaatgccaaacgggttggtatatagatatgtccacggggaaccattatcttaatggtgctatttctgagtaatttcggatgtcctggatcctgagtaatttgatacgatgtttgctgacgatgcggcgatttaaggtaaaactttacgtttgatgtagttccggcaaactcctgaccaccagttacaatcacgagtagaatctccgaaccactcacaaacgattgatccgactttccaactgacgcatcgcattgcaatcgaaattccggattcttcagataggcagaaataatgttgaggtgtaagagaaacttgaagacgagcagcagaaaaagcagagcgaaaaaaatcattaggatcatattgaacgtaaatatgggtacgggtatgtgctcgacaaacaattgcgatgaaattggaaaaatacgagaggatagggctcctaaggtatggcaggtgcactgaacagatgagccacgactgtgctcaaaggaggtggtgcaatgatcctcgctccagccgggatccaatgaacggttcttccagatgttgcactggtaaatttccaaaagtatcgagtagttcagaggtagaacctcctccactatgtcctcattgtcatagtcaataaagtccgctttttgtctcacctctggtgtctccgagccatcgtgcgtcctgttccccttcttccttccccgcgcacttaactgatccttgtcttcggttttatatcggatttcgcccggcttgtgtatggccacatatgccgggctccgttcacaggagttggctatccaaatgcgtttaccctgcatatcaggtgttatccgacaagcgtgctgccttatctgtccgagcgttggccatctgtgcaatcgcatcttaatatacattagctccgaacaatttacgattcgcactgccaacatggccttgtggtttagcatcacactgtatatgtggacttctgtactattctggatactattattggtcatgtactgattgaaggacgcgtcgttgaaatgcgtgatattcgtcttgtatactaaaggattagtcagctgaaactccttggcggatctaaaaaattgaacgggactgtaagcgtgaacgataagcacactggtcttcgaggggaatggatctggataccaccagtagatattgtggaagttctgctgcgagatgatctgtagcagaatagagctatggttcagtctgcgttgcagttcatagagcagctttgtcgataatttaataacgtgtatgtggtcgattgtcttcacctggatgtccttggtgttctctgtcacctcagtcacattaatctggttgtaaacatgcaaaaaattcagaaaatgttatcaataaagcaatccaattatatcaataagcaaagtgaaaatgacgtttcgtattcttaaatatataatgcgaaaatataatataatagttataaatatatatattgggatatcaaaaatcttgtgatgcattagattataaatttttcgaatacatgcctacctggtacgcaatgccgctcttgtggattgttaatgcgtcatcatacggatgatgtctttgagtggctatgacgccaagaaagtaaatgcacctgtacaagaaccatgtactcatcagccagctattgatccgcaccaaaatgagtggatcaaacttaatgacgaacggcttctccaaatcgattatttgcaaattcatgcacgcgggattatgtagactacacatggcgtttgaatggctttcggttttttttcctaaaatggacataaagaacatatgcatggccgtcaacgaatagtagccctcccgatgaagccattcatgctcctgaacgatcgccgagaagctgtcgcccaagtggctaaacatttctgccatgacggtggctccacgaaaatcgactggatgcagcctaataagcatgtgcgagctcagcgtggtaatctgctccatctgcgaccccgttgaggcgaccaagccagtcagataagagtagaattcatctccatcgattgacgtctctataaaagtgatggcagctattcccatgatataggccctattccaatgacctcgcttaaagaaattcggcacatagttcattacttctttttgccccgttagcatgcttttatctatcgacaatactttcacttctacacgtttttcgacgcacatgtcaatggcatcacatatcgagatcatgatagtctctgcagcgggtagggtgagcacaatccttgagtatggcacattcgaggccacaactccatatgacaccatatagcgataggttattggcgggaaaggcgactcaaatccggggcaatcgatctcgaacattgtgaagccctcgacgcccaaaaaaggatatattgtgcaactaccatgttgagggccattgttccggcgcagcgtgtagaacgcatctgcccacccttggcccttcacccacactcttagacggatctgaacgaggggctctagagtgtggagaatcagatatttatgagaggattccagagtgggctgtgattctgtgtccaacaaccaccactcatatcttttaaccgtacccggacagtcatcgcatttcgagatcaggtgtatgctgtccaacggcgcataaacacctagagcgcaatttcgacggcaaaggatttggggcgtgaaggttgttttagcgacgccttttattgtttgggttgtggtcattcgattccgcggatcgaagcgtgagatgacggttaagctgaagtcgtaaacggcattctccttaagagcatatgggggtaatctcaacgtggggcctaaaaaaaataattttgatataccctaaagtaggtaatgacttatttatgtaagatgtttcctatttgacagagtaaaatattgcgcttttatcaagataatttgaaaaaaattctattttacataacattttaatatctgtcaatagtatttccccaacgcacttttcaatatcaccgccattacaaatctagttttgttcatcatactcactcttggacatatactttttgcaataattgttaaatggatcgtctaagctgatacaagtccacaagaattgcttcgactttatagattcccttattttcaacctgtccttcgagctggatccgtcgataataatgggttttctgacgtcgaccagacgtcgctcattgcctttgataaggggttcgattgggggcggtttgtacttcatatagcactgaaataaagtttaaaccctgaggggttatacatttcttctagacttggtccactcacacgagctaccgtagttacgccgtttattacagctttacctcgcagcaaaaagactttccgcctatccggttcgtttaggatgtgcaccttgtagggcagtagcttcaccaccagtcctgtggcattttttagacgagcaataatttctgcggttagaatatatcaacatttattcacttgtttcaccatcgaaatttaaaaaaaattaatagaataaagaaaataaaacttactgttctctgtgatatcacataattgccatgttattttatcatactccactgtggagcatgcatcgctaatggacgcaaaaaattctagatgacccatgggagagaaatatactggcttttcgggatttttgcaaaattctaactccaaagctggtaggcacgacacatttggtggtttgcgtactttaattttgaaacgcactacatgtgccaatagctttcttctgtcgttcaaagaactaactttcgccacaatgtatttatgtttcgtattgtagaatcgggccgtacatcgatggaaataacaacgattgtatacgattcgcttacttcttatgccccattttcgcattaactttcgaagatttttggtgtatttccaatccgaatgtatctcatcaattaagtaatcattggtatctacagtcaggttgacagcaaagtttttctttcccaggctcggcatagttgtgaaaactgaatactcttctccataaactggatttcggttcatgaataggtacaccttcaatggacctttttggccaagcaattgttggttttttacagaacttgttctgccattaacattcggtgcaaggcaaggtactgcgaaattataatcattgacagtttgattttgatactctgtagagctgttatttatgcaggttgagctttgattatagatgggatactcatcaactagggggaaatcagctaagctgaatgagacatttccattttgggacttgcttccttcgattccgttttcatacgtttggttttcgtatccataacttatttcggtattgactgaactccacgaatagtcttcatcattaaagaggtgagttgaattctcacctggtttttgctcggaaatattcttataagtacgtgcagcatcttccaaaccaaacttttcacttggtatagtgggatatgtcttagtagtcgtattatattcctcaaagctagaaaagtcgtagcttttattaagaacgggatcccacaatctctcaattcttctctcctcctcttcgggaatcgttcgacgtattattttatgacgcttacgacttaacattttagta

SEQ ID NO: 37898 - DNA, 3129 bp, DROSOPHILA
atgggtcatctagaattttttgcgtccattagcgatgcatgctccacagtggagtatgataaaataacatggcaattatgtgatatcacagagaacaaaattattgctcgtctaaaaaatgccacaggactggtggtgaagctactgccctacaaggtgcacatcctaaacgaaccggataggcggaaagtctttttgctgcgaggccccacgttgagattacccccatatgctcttaaggagaatgccgtttacgacttcagcttaaccgtcatctcacgcttcgatccgcggaatcgaatgaccacaacccaaacaataaaaggcgtcgctaaaacaaccttcacgccccaaatcctttgccgtcgaaattgcgctctaggtgtttatgcgccgttggacagcatacacctgatctcgaaatgcgatgactgtccgggtacggttaaaagatatgagtggtggttgttggacacagaatcacagcccactctggaatcctctcataaatatctgattctccacactctagagcccctcgttcagatccgtctaagagtgtgggtgaagggccaagggtgggcagatgcgttctacacgctgcgccggaacaatggccctcaacatggtagttgcacaatatatccttttttgggcgtcgagggcttcacaatgttcgagatcgattgccccggatttgagtcgcctttcccgccaataacctatcgctatatggtgtcatatggagttgtggcctcgaatgtgccatactcaaggattgtgctcaccctacccgctgcagagactatcatgatctcgatatgtgatgccattgacatgtgcgtcgaaaaacgtgtagaagtgaaagtattgtcgatagataaaagcatgctaacggggcaaaaagaagtaatgaactatgtgccgaatttctttaagcgaggtcattggaatagggcctatatcatgggaatagctgccatcacttttatagagacgtcaatcgatggagatgaattctactcttatctgactggcttggtcgcctcaacggggtcgcagatggagcagattaccacgctgagctcgcacatgcttattaggctgcatccagtcgattttcgtggagccaccgtcatggcagaaatgtttagccacttgggcgacagcttctcggcgatcgttcaggagcatgaatggcttcatcgggagggctactattcgttgacggccatgcatatgttctttatgtccattttaggaaaaaaaaccgaaagccattcaaacgccatgtgtagtctacataatcccgcgtgcatgaatttgcaaataatcgatttggagaagccgttcgtcattaagtttgatccactcattttggtgcggatcaatagctggctgatgagtacatggttcttgtacaggtgcatttactttcttggcgtcatagccactcaaagacatcatccgtatgatgacgcattaacaatccacaagagcggcattgcgtaccagattaatgtgactgaggtgacagagaacaccaaggacatccaggtgaagacaatcgaccacatacacgttattaaattatcgacaaagctgctctatgaactgcaacgcagactgaaccatagctctattctgctacagatcatctcgcagcagaacttccacaatatctactggtggtatccagatccattcccctcgaagaccagtgtgcttatcgttcacgcttacagtcccgttcaattttttagatccgccaaggagtttcagctgactaatcctttagtatacaagacgaatatcacgcatttcaacgacgcgtccttcaatcagtacatgaccaataatagtatccagaatagtacagaagtccacatatacagtgtgatgctaaaccacaaggccatgttggcagtgcgaatcgtaaattgttcggagctaatgtatattaagatgcgattgcacagatggccaacgctcggacagataaggcagcacgcttgtcggataacacctgatatgcagggtaaacgcatttggatagccaactcctgtgaacggagcccggcatatgtggccatacacaagccgggcgaaatccgatataaaaccgaagacaaggatcagttaagtgcgcggggaaggaagaaggggaacaggacgcacgatggctcggagacaccagaggtgagacaaaaagcggactttattgactatgacaatgaggacatagtggaggaggttctacctctgaactactcgatacttttggaaatttaccagtgcaacatctggaagaaccgttcattggatcccggctggagcgaggatcattgcaccacctcctttgagcacagtcgtggctcatctgttcagtgcacctgccataccttaggagccctatcctctcgtatttttccaatttcatcgcaattgtttgtcgagcacatacccgtacccatatttacgttcaatatgatcctaatgatttttttcgctctgctttttctgctgctcgtcttcaagtttctcttacacctcaacattatttctgcctatctgaagaatccggaatttcgattgcaatgcgatgcgtcagttggaaagtcggatcaatcgtttgtgagtggttcggagattctactcgtgattgtaactggtggtcaggagtttgccggaactacatcaaacgtaaagttttaccttaaatcgccgcatcgtcagcaaacatcgtatcaaattactcaggatccaggacatccgaaattactcagaaatagcaccattaagataatggttccccgtggacatatctatataccaacccgtttggcattgcgtctcgttcccaatggacggtatccatcgtggtactgtcgctccataacagtggtggatctgaagttgaaagttcagcagctattcctcgtagagagctggattgaaggcgggagtcacatacagtttatgcgatccaagtactttacatatggcaactatagtagatatcccaagtatacgtggtgcaagcggttccggagtcgagcagagcagctttatttcagttggtatttgattaatgcaataaccgggccatcgcaaacacacggtatctag

SEQ ID NO: 37899 - protein, 1042 aa, DROSOPHILA
MGHLEFFASISDACSTVEYDKITWQLCDITENKIIARLKNATGLVVKLLPYKVHILNEPDRRKVFLLRGPTLRLPPYALKENAVYDFSLTVISRFDPRNRMTTTQTIKGVAKTTFTPQILCRRNCALGVYAPLDSIHLISKCDDCPGTVKRYEWWLLDTESQPTLESSHKYLILHTLEPLVQIRLRVWVKGQGWADAFYTLRRNNGPQHGSCTIYPFLGVEGFTMFEIDCPGFESPFPPITYRYMVSYGVVASNVPYSRIVLTLPAAETIMISICDAIDMCVEKRVEVKVLSIDKSMLTGQKEVMNYVPNFFKRGHWNRAYIMGIAAITFIETSIDGDEFYSYLTGLVASTGSQMEQITTLSSHMLIRLHPVDFRGATVMAEMFSHLGDSFSAIVQEHEWLHREGYYSLTAMHMFFMSILGKKTESHSNAMCSLHNPACMNLQIIDLEKPFVIKFDPLILVRINSWLMSTWFLYRCIYFLGVIATQRHHPYDDALTIHKSGIAYQINVTEVTENTKDIQVKTIDHIHVIKLSTKLLYELQRRLNHSSILLQIISQQNFHNIYWWYPDPFPSKTSVLIVHAYSPVQFFRSAKEFQLTNPLVYKTNITHFNDASFNQYMTNNSIQNSTEVHIYSVMLNHKAMLAVRIVNCSELMYIKMRLHRWPTLGQIRQHACRITPDMQGKRIWIANSCERSPAYVAIHKPGEIRYKTEDKDQLSARGRKKGNRTHDGSETPEVRQKADFIDYDNEDIVEEVLPLNYSILLEIYQCNIWKNRSLDPGWSEDHCTTSFEHSRGSSVQCTCHTLGALSSRIFPISSQLFVEHIPVPIFTFNMILMIFFALLFLLLVFKFLLHLNIISAYLKNPEFRLQCDASVGKSDQSFVSGSEILLVIVTGGQEFAGTTSNVKFYLKSPHRQQTSYQITQDPGHPKLLRNSTIKIMVPRGHIYIPTRLALRLVPNGRYPSWYCRSITVVDLKLKVQQLFLVESWIEGGSHIQFMRSKYFTYGNYSRYPKYTWCKRFRSRAEQLYFSWYLINAITGPSQTHGI

SEQ ID NO: 37900 - DNA, 3340 bp, DROSOPHILA
ctccggtctccggtcgccagtattccccattcgctgcaggtgattccccatcgagacacttatctattgagtgagcttggttcgcttcgtttggaccgctcttgaagtgaacgccaacgaaataagaaaacaacaaagtttcttttgattatgtcaatggaatttgtttatctcaacgaaatgtaaccgaattgaaaaaaatatgttttttttacgctcatttgcatttacttttgcccggatataaatgtggcaattggaaggggtgatttgttcaaatgtccagctcagtaagattcaataattatatatacacgtaacacattaatgtgattctatggtaaacattagagtaaggaagcaaatttgttttgagaaccccagaaacaaaggcatcatcaacaacgtcaagtagcatcaacaacgtctagtttgggttcaatatattgattcttggaaacgtgcctctagaaactgaatagcttagtcataaattcagtaaaaatactatttaaatataaattggcaaactattaaaattcatatcaaaagccacgcacctggcgcctgttcccctaaaaaaaaatggaaaccggtcaataaccacaacaaattcaaaaccggattggaagagaaacgctggtcacctgtgaggaaagcccccacgtctggtccagtgtctgggacaagtttttatttcagtgcgggtaaagaacctccgaaattcaaacattatatgaattcaaaaaaatcgtataaatagagaaagacgtgacagaaagggcacagtatcgagtgcaacatcgaagcatcctcatcttctgggatattagtacaaattgaattcattttcaaattcaatatgaaattcttggtaagtttggccaccagagctacacctcgcagggattaaggactttataaaaataataaacggccattcaggtgatcgtttttgtggcccttatcgccgttgcttccgcgcttcctcaattcggatatggaggattcggtggattcggaggattcggtggccaacagcagcagcaagaaggattcggcggtttcggaggcttcggagaacagcaacagcagcaggaaagcttcggtggattcggcggatttggaggaatcgagcagcagcagcagcagcaacaaggaggcttcttctaaggctgttactttagttcctcgactaaaaattaaaataaattatttgaacgtattagtataacaaacacaaaacagtttttgtttttaaatactcatttacatgttttgacaatggcttattgtaggcctttagatcgacagagattttattaatgagtaaccttcatttatttcgcttgcttataaatacgtttgggtttatttttttggacataagcaacatcaagaaaaatgaattattaaattaaattaaaaatttgtgtttcaacataaaaaattgtttttatttagctaatcgaaaatcacttaatgggttaatgacatttttgtgctataacaacattaattgcaaacacttgaataattcgcaaatgatgttggcataaaaaccaaaggcagatactgactcatgcaaaattgtgaaataaccaaatgttctgacagcaataatttaacaaaaaacctaatttgattagcgaagagcatacgccaagaagagctgattgcaaacctgtatttttagtgggcccgtcaaccccagatacttgaacgttttcaacaacagaaaaaatcccctataaacacaaacgttcacaatgatttgaacagggaagtccgagcggcgatcgcaccgtgctcaaccagttttgaatgggcataaagcctaacaaaaattcagataaatactcatagccagcagccgaaactcaaacagttgattttagcattccggtgaaataagattgttcgcttgaggaatattttcaatattcaacatgaaattcacggtatttttcgctaaaaattggctaatatagacatctacgttattttttagttgaaactaaatgtattgtactgtatgtattatttttttagataatcgtttttgttgcgctcctcgcctttgcatcggcccagttcggtccgtttggtcaaattattaggggtattgaacgatttgaaggtggtctgcaacaacaacagcagcagcagcaaagcggctttggcggtggtcagcagcagcaacagcaggaggagggtgtcatcttcagaggtcctttcggcggcggagtggagttcttccaggagcaacagcagcagcagcaaggcggtggaggtcagcagcaacagcagcaggagaacctatttaacttcttcggctaaagctccttagtgagggaaactagacatagactgaccactatctatagaactcaaaagcaagccattaactaaagccatgatcgtagagataaacacacgataaataaatatttttaaaaacacacaattataaaccaagacataataatgcttttctataatcctagtttaaatatttaatactagttcatgcaaaaccaagctaattttagtttaataaagcaataacgctttgtcatataaaattacacgaaatcaaatacaaacaatttgtttacgaggccaaggagcagacaatttgcctgctatttggatgtgaattcagcaatgacttcgtgttttgtgtcaaaatcgcgatgatggccatggccaattgttatggccaaagttttaagccaaaaatcgcaaaactctaatgagtgctatcgttgaaatcagaggagagcaagtgggtgtggaagggtcggtggcatttttggttcctttatccgaaagcaccgaaacaccatcaaagtcattaagcggaaaacccttttggcttcttttccacgcattttcatttcgccttgtaatgacttcatcccggcttcagagtctttggggttttggttctggttttgttattggagacaatttcgaagccatcctgtagttgcctgtctgacaaaacaacgccagtcagctatacagccagcgccatccaccaagaaagccaagagcaccaacactcgtaactacaaaacaactttttaattgcaattaaatacgtaacaagtttttagttgtaagtgcgactacggagcacacagggaacttagccgtggcaatagtgcccattggtgccggaatattgttgttgtgggttacccttatctatcctttgctatctgctgaatatatatacaaagatatatatatatatagatatatatactatatacgtatctatgagattgccattgcagtgtttgcctcactcgcactctgtgtgtattgcaaa

SEQ ID NO: 37901 - DNA, 465 bp, DROSOPHILA
atggaggattcggtggattcggaggattcggtggccaacagcagcagcaagaaggattcggcggtttcggaggcttcggagaacagcaacagcagcaggaaagcttcggtggattcggcggatttggaggaatcgagcagcagcagcagcagcaacaaggaggcttcttctaaggctataatcgtttttgttgcgctcctcgcctttgcatcggcccagttcggtccgtttggtcaaattattaggggtattgaacgatttgaaggtggtctgcaacaacaacagcagcagcagcaaagcggctttggcggtggtcagcagcagcaacagcaggaggagggtgtcatcttcagaggtcctttcggcggcggagtggagttcttccaggagcaacagcagcagcagcaaggcggtggaggtcagcagcaacagcagcaggagaacctatttaacttcttcggctaa

SEQ ID NO: 37902 - protein, 154 aa, DROSOPHILA
MEDSVDSEDSVANSSSKKDSAVSEASENSNSSRKASVDSADLEESSSSSSSNKEASSKAIIVFVALLAFASAQFGPFGQIIRGIERFEGGLQQQQQQQQSGFGGGQQQQQQEEGVIFRGPFGGGVEFFQEQQQQQQGGGGQQQQQQENLFNFFG

SEQ ID NO: 37903 - DNA, 2276 bp, DROSOPHILA
cctggaatttatgcggaatttatctttgtttcgagcattttacgtgcttaatttgttggattgtgattgatctttggtttggcgttttgccgacgtcggcatttgattaaaggtgtaaatacgaggtgtgatgggattgacgaactgtgctgtattttccgaaacgacttactcgctgtatgtcattgaggtatgcaagaattttccatttttaaattacctaaacattgtcaattagctgagataaatgtagtagcctttggaaacatttcactaatttctatttgtgttaattaacaaatccagtttaaagcccaccaaaatgtcaacacggacaaagaggcaaagcaaaacagctgcaaatcttctttgaaaatttccaacaatgtttctaaaccacaaaaacgtttttcagggccttaagaaagaaatttatggcatttaaaaacccctttatgtgtcttcgtcaaacgcactatcgctacaaaattagaagcagacagcgaagacacacagaagtttttctattaaaaatcacgtaaactgtcgccttaatttcaaaggaatcgaaacatttcaaccgaagcccccaaaacagcactccaaataatttcagcttaggcacgattctttgcccctaaaacataaataatgggagtagaagattcggtcgcaactctctattctgagaaccccttttttttcgagaggcgaaagaaagggctatcaatttacttttgatggcagggccatccacaaatcctctcgatagaaaccacaaagaaatcacacaaagaaatttatgtaatgccttcgcagaagcagcactgctgggtatctgaattttactcatcttgatctggattccgtggctactgtagcgcacagttttcctcgcccatcggcagcgtaacaaattgtgagtgcttctgttgttaacacggttaataaatcacaattgtccaaacaaaaaggtgtcgaggtgaagatatgacttcgctcagaaatccgtgactcgtcccttgcgctcccagtcgccatagcgcgtgggttctggtcccgcttgtccaccgatttccccggtatacggattggtattattgggccacggtttaagtggctccttttcgtgggccggatgtggtgcacactcgggcagtggttctagcggcgcctccgatcgcagcttttcccggaacgcaagatagcgcttacttagtttttcctcgggattcggtggcagctcaaccctctgtctattcgctggtgtttccatttcttcgacatcatcttttttcaaattacttgctgcctttgcaagagaacatcgtcttaggtgtaatccgcactgggagatcagagctcgacaggatctaatcatttggggtctttatttttgggctggtaaaatgtgttacagatttgggattagctaaacaatttccaacgacgaaatatttttcaaatggagctgtcaagatttctttaaattcatatgattacttgtttttgtttaataaatcgttatggttattcttgttgattagtgtttaattatctgcgttgcaatcggaaaacccatttctttccatttagcaattagatactttaccattaagtcatgatccgtcacaagatcttttcccaaagggttagagcccgtctcatttcacattttatccattataggcggcattaccaacatgctgtccaaacaccgcttgacatgaatccgcctgacaggccagatcaaatgtctgtctccgctagggagcctcaaagtctcagctcgaagccttagcaaaacgctggctgagtgacaaggctgacggagtctaatgactttcaagcagctgccgctgctccgctgcaacggagataaacttccggaaacgagtagctgtccaaggcagttagccagtcgggctgtcaagtgagcgcgtgcactgaaagaaataattagtaaataagtcttatttgtgactaatgtggtatcaagatggagatgtgtatcaatttaagtttgtcctgtactttatttaaataaatgttttttttcttctgtacattgttttctaagtgtgtgcgaatagagttgccccttctgttaccgttcattaacaattaaaagtaggcagacagcatcagcatctgtatctgtatctggatcagcattagtcaggccgtcagattggcgggcttcatttgggaggcttcatctgggatcagagcatgctccgatcgtgtcaagcccgacatgagttgaaatcgcgctg

SEQ ID NO: 37904 - DNA, 276 bp, DROSOPHILA
atggaaacaccagcgaatagacagagggttgagctgccaccgaatcccgaggaaaaactaagtaagcgctatcttgcgttccgggaaaagctgcgatcggaggcgccgctagaaccactgcccgagtgtgcaccacatccggcccacgaaaaggagccacttaaaccgtggcccaataataccaatccgtataccggggaaatcggtggacaagcgggaccagaacccacgcgctatggcgactgggagcgcaagggacgagtcacggatttctga

SEQ ID NO: 37905 - protein, 91 aa, DROSOPHILA
METPANRQRVELPPNPEEKLSKRYLAFREKLRSEAPLEPLPECAPHPAHEKEPLKPWPNNTNPYTGEIGGQAGPEPTRYGDWERKGRVTDF

SEQ ID NO: 37906 - DNA, 2484 bp, DROSOPHILA
catgaaattataatgtagccccgaaccgagcgtgttccgttccaagccaagctccaatttacaattagtcgatgttgccccatctctggtggctttaatcaattcagctgggtactcgcatgtctaaaataaaatataataaaacaggaggaatagggaaaataatgatgaaaattaacaaccagaaagcggttttcatcttaagtgcagtttatgcttgattattatgtttgcgagacgagtttccgggtggttaggcatcatgtgccgcacagatgccaacataaatatggcaattgcgagtgcgccggaccctctgactaaatgagttaatttggtagccaggctgggccaaaaagtcaatatgctcgttgccatttccctggccattgcaaatgcctgtcagaggacgagtgatgtattccattttggttgcaatcaatttttggcctccagtgatatgtcaaacattttccgattcaggattgcattgcatatttttgggaaaatcaaagttcatgcattcatggagtatagcaagtgcctctcagcgaaatgtgtactgtattttcaatcaaacagatgtttgttagcctttggcttactgcatatcaatgtagcaaacaataatgcatgaaacaacagacactttaatcatgagcagctatcagtctaatgttgttattcaaacacacacgaagatccattttaagcataagttaaataagggcgaaaaagtggaaagttcaatatagaaactaattttgtattaatttaatttaatggttatattagaatagacattaaagatatatgtatttatttaactgaaaaagctgggactttcacttattcctttattaattcgaaatatttaagaatatacatgattttaagtaatggtacttttaatgtggggctcgttttgaaaatatatgaaacatatttcactctgcaactaaaacaaatggatgcaaatagcatagtttatgttgaggcattaacgtgtgaaatcgccacatttgaagcacttgcactcggtgggctcccgaagacgtatatccatgcttcccatttccggagaggtcaaacgggtgccgtccgggtcatagcaatgggttagagtgatgaccttttccttgaggaagctttcgcggcagcagtagcactcctggaaaacatggaaccttagagttcgctaactctatagaggcaggattcaaacttactttcagaaaccccgtgggcgttatcaccgatggttgcacctgactgttgcacaatccttcgcatttgttgacgatgacgtcggcattgcaggtcctctgcatccggcccagctcgtcgaactcctccttgatcaagtggatctccgacttgagagtctcgcagttctcgtcgccagtgccttggctatatcgcaatgccctcaggcattggggcactaggatcgcggccacaaagagcagttcctggacatgcatgctgacccactcccaacgcccaactgtttggaatcgcttcacccggaggctcttttatacggaagagggctggacctgattggattccatgatatatgtcaatgactggctgatggaatgtttgtgtcctgcccagcgggtgaaaattcggtcgcttaagttgcggtaggacatggcaatttacacatcacttttgtgctccgttaattggtaattaaatcaaacgacttgaccacaagtaacgatgtcgactgtatcgattcgattttttacacgttaaaccaaatcgataagtacggaataaaaatataaaatgattgcagaaaatttaataacttaatgccagattgcgttacacttagcttatactattggttatattacaataatttattggtgtgagcaataaagaggcaaatactttcagccttaatctatacaaggggctttcccgcaattttccggccacgtaaacaaaaaatgaaattgcaatctgtctgaagttttccacctctcgtgtctgttattgcctgcttttggccctgttggccctcccctgttggcatcgtctttgtctcgcccaatttcgcaataaccacattctctctcccagtatctgtagctgtatctgtatctgaatcccactgtgggctcgaccgcctttctccacttcactcctctgtgggccatggtcgatggttgcgctttagaatcatcgacgcaaacgcaaaaagtctcaatggcgcagtaaattatgttttattatgcaataaagtcaaccataaaaacgctgcaataaattaaattaactactaaaaatgctgattttatttttaccctccgtttgcgaaattgttgttcagtcagttccgtctctccatatatacatatgtatacacacacgagtatttgaatacataaacaaggatgcatgcttgtgtatctatcgtatggcgcaaagttttgttctgaatttttggtttactgtctggatttttgc

SEQ ID NO: 37907 - DNA, 426 bp, DROSOPHILA
atgcatgtccaggaactgctctttgtggccgcgatcctagtgccccaatgcctgagggcattgcgatatagccaaggcactggcgacgagaactgcgagactctcaagtcggagatccacttgatcaaggaggagttcgacgagctgggccggatgcagaggacctgcaatgccgacgtcatcgtcaacaaatgcgaaggattgtgcaacagtcaggtgcaaccatcggtgataacgcccacggggtttctgaaagagtgctactgctgccgcgaaagcttcctcaaggaaaaggtcatcactctaacccattgctatgacccggacggcacccgtttgacctctccggaaatgggaagcatggatatacgtcttcgggagcccaccgagtgcaagtgcttcaaatgtggcgatttcacacgttaa

SEQ ID NO: 37908 - protein, 141 aa, DROSOPHILA
MHVQELLFVAAILVPQCLRALRYSQGTGDENCETLKSEIHLIKEEFDELGRMQRTCNADVIVNKCEGLCNSQVQPSVITPTGFLKECYCCRESFLKEKVITLTHCYDPDGTRLTSPEMGSMDIRLREPTECKCFKCGDFTR

SEQ ID NO: 37909 - DNA, 2183 bp, DROSOPHILA
taaacataaatctgtcagcaagaagtgtcataaaaaaattgtgtcacaattaattatgtgtttttttattattgttttggtttggtcgtgggttttgtgtatatcgttataacattactgccatcgaataatgaaaattgttaaatatttttatgttacattatatacccctttatttttaaaaccagttgattgggcttgccattttttttttgctcataaaaaagcggatttgaatgctgagccatatattttgttaatttgaaaattaaaattaatgcgattaatgtgacaaaaccttgttcggagtacatttgaagttgtaaattgagagcaaatcctgttttaattaccgcgattaaaattacaaatttcagtaaataattgaaaacagaacgcaatcaataaaaaatgtacattattattgacggctaaggaaagaaggtctgtttgaaagccctataaatatttgctgctcattcaaagaataattagttttaatatgtattttggtgaataatgccagtcgattgcaccacaatttgttggcctattgagaaatacacaaaagaggaaaacggggaaatagaatttttgagaccatttcatgtttcgagacgacagatctgaaatgggccaagacgttgccatagccattagccgcccacaaatgtagtgcggatgaacacgcacgattaataaattaaattgaaagacacacaaagtgtgagaaggcgagaaatacgaattttccaaatgaatttgttaaacactgtcgactggctgcattattctaagcatgtgccttgaaatatgtcgcgacatgataataaaaatatttgttttctctacactccctgctagatttgtacattttttcgtagcgatggttcgcttgagttggttttattatacccgttactcttttagtaaaagggtatactcgaccctataaattatatagatatattcttgattaggatcaccaacaaatcagaagctatgaaagaaagtcctcagtgtccgtagtgtccgcaatatccgtaatgtccgcaatgtccgtaatgtccgtaatgtccgtattgtccgtaatgtccgtaatgtccgtaatgtccgcaatgtccgtaacgtccgtaatgtccgtaatgtccgtaatgttcgtagtgtgcatgttcatgttcattttctatcgatatgccaaaaacccgttcaaatatctcattcgctcccccacaacctaagtaacgggtatccgatagtcgaggaactcgagtaaagcgtttcctcttgtttttgtttattagccgcctgctaataaaaattaatttgaaaatactttttaaaacgccttcgagttgaatggctggctggcgggcatagcttaagatttttatttatttgtttttctaatttgtatttttcgcttcacattcatttctctacgttctgagtacgttgtagtttgtacgatttatttatgagctctatgattgtgtattgtgttattgtatcttggtctgtacgactcttttcggggttccaatgatatgattgcttgatgaaacccaattgtgttttgttccatttgatttatggttctgtgcgtgttaatatttttctattcatttgtcaaaataaaaagcaatgctaaattccgcaagggaatcctaatttcatacttaagtctgaaacgtctatagttgaataggaaagtataaggttaaaatttccacagtattcttcaagtcttgaaacataaaatggctccaaaacttgtgagttgttgcaaaaagcatggcaatttattagctaagactgcatttgatttatgccaacataatatttctaaatgtactgatgatatttgttgttccctcgcgacttccaatatgaatttattttcgtcacaagccataaacaacttaagtttgagggtcattaactaaaatccatccacttattttaaacacgaacagctgtgccaacaatttgtcaaccaagcagaccgaaatacacatcataaaattaatatacggaatgtttttacaattatcataaaatatacgaatatgaaattttcataattctcaaaagtaaacaaattgtgacagaaatacgaatttagagacttaacctatacgcataatgcagattcttgagtgacttttctcgaaggcaaaata

SEQ ID NO: 37910 - DNA, 183 bp, DROSOPHILA
atgaacatgaacatgcacactacgaacattacggacattacggacattacggacgttacggacattgcggacattacggacattacggacattacggacaatacggacattacggacattacggacattgcggacattacggatattgcggacactacggacactgaggactttctttcatag

SEQ ID NO: 37911 - protein, 60 aa, DROSOPHILA
MNMNMHTTNITDITDITDVTDIADITDITDITDNTDITDITDIADITDIADTTDTEDFLS

SEQ ID NO: 37912 - DNA, 3536 bp, DROSOPHILA
ttgtggcaagatgggattgggagtcttaaaaaaaatgaattccctccggcgaaagaaatttcgtttcgcagcattttcccctcttcttgtgcctctcaacttgtcacttttcacattttgtttatttttgatgcatctttcagtacttgagttagttcttttcggtctgttggcttgcgtttttagattggaaattttcccaggagatttgatatttatagaatgtgtacattcaactcgaaaagtacagcttaactcgagttttttttattcacaaattaaacattaacttacaaacttacgatatcatatttaacctgtcgactaaagttagcaaactaaagctaaactgaaggcttaggtcaaagtagcttaactaattcccaggacgacacacaaaaaagtcatacattagttccagggagcaatttatccaggtgcaggactacgtcagctaacttcattagttacttgccacaagcaatttgattcttgtcctctcactgccacccccttccaattcaacctccccgtgggccttcgcttgacccacgctgacccggaaaacttttcccccaacaatttcacaaattgtgtggaacatgaaagtttgttgcacaagcacaaaatatattcgaaacgagttcggctaacaccttaattgggcgactgagttggtttttaattaaaagactatttccatgacacgacggtgaccccagtccgctttgtatcttagctactaaagagaatcaaaactaaatgtagttccaaaatataacaagatttttaaagagtccttcctagacttacacaatttgtgtgcctctagtcggcttgtaaaaatcagtcgagccagccagctcgagttcgctaccagttgttagttaaactattttattggatgaagctcgttggggatttgttaacctaaagtgatcgccgggctattggcaatccgatcctggtgatccgatcctcaccaagcagacgcggaacaatgacgatgaatcgccacgagcgtatcgagtgcaaaggatgcggaaagcggtccctcaccttcaggtgctatcgctgcctgagctgccaggactttgatatttgcgaggagtgctatgacaatgacttcaccacatccacgcatccgtttgaccatccggtggtatgtgtcctcattccggcagatgtggaactgtactttggtggcgagtacatcagtaactatccgccgcagagctaccgctgtccgtactgcaagagatggggcttcaacgagtccaccttcctggagcatgtatcggcaatgcatccggatgccagtcccctgctggtctccaccatggtcggtctcttcgagcagcagcaggcggcacgtctctttctggagaatgagcagttggcctccattgccgtggccgccacatcgcgcaacgaactgatgcgtcgcccagagggctccatggccctctacttggagccgctaaatcgggatggaagctatcgcagggtggtggaacggaataacgaagatcgttcgcggcgcttgtctccggatggccgtgatcggcttcaggctctggtcagagagcggtactcccgtattgcacgccgaagtgctgccagagttggtaacatgacttccagaccgctgctagcgcctgctcccggtgacggctcccgcttgagtgggatacaggagagcatagaggcaggccagggaatacgtaatgtcattgtggaagagctaagcacctccaactacgatcctccattcaccatcaatgccagtgccagtgccatattggagcaacagcagcagcagcaggtgatgggaccaagcccaaatgccgccgctccacctatcgtaacacacccatcgctgatcgagatgatgcgcttctatgacgaggctggcttgcagccatttccagcttcatcccgtcgagtcatccgcaccaggcacgcaaacccagctcaaccggcggccaacatcggtaacaatacacggagcataaatgtttacggacccacatccgcttttacccaggcgtcgcacaatactcgatccttgaccgcccccgatctgttttcgcttgacgagcggtatcgtattagcaggatgcccatgttccaggcaaatcccggagcactacatcgccagggaaccgggacgcgcgctttggatacgcgcgccgtggaattcagtgaatttccgccggaagaaaccgaactgcccctcatcctgggcacttccacgatcgaggacccgtcgaagctgaccaagcagagggatcaggagcgcaggcgttttctctgctatcgcttcacaacacccaggtcatctaagcgtccccagaatcattttctattgcaacgcgccgaatttgtttcccaggtgctttactccgccttgtgcgatgaagatttccaggatatttcctttccgatcttgagaaacattccaaaactgaggaccattccggacaacgtcatctccggtgccggcgatgctgaaaagaatccatctaatccgtaatccatcagaaactgttttgtgtacaatttatagcagttcttataccctttgtattcgttaaatttcctgttcatatcgatggaacttttggtaacttggctaaaaggccagaaaattaataacgtgtttgcattcctttttaagatggatacagttttttttttgtttatttttatttagtttcgtttttattcaaattgaaaattcaaattgaaaatgctttaccatttcacttgtcaattggacagccagcagtcgttatttttcagcttttgaattagccaattcattttttgaggagccgttttcttgaccccattaaaaatgtgccagtgtagataaaaagaaagatgattgcaatctcaaagccttataatctgcaagatgaaattgcaactttttaattgaaaataattggataatggaaattgaaccgcatctgtgcgaagcttttcttgttgagtgacgtcaaatgaaaatccctttgagtgtcaaatagctcgacttttattctgtggcaatcatgagggattttggccaatttgcgcagtgcctttcatttatttgtatttattttaaagaaatatgattacaagcctggtaacttgagcagaattaataacctatctatacacatttgataaaaaatgaaaatgttataagttcattaatgacgcatttcgacccttcttctgtaattaagattttaaatgatttttgagggagcgcccagttttgtttgagctgtgtacaatgtttgccaaaggagcgttttgaaaagcactacattttttgtagatatatgataagaagacaaactgctcgtttgagtaatataatatttaagcaaaatttaaaaaaaaaatagcctgatattttggtttaatataaccaatgaaacaaacaaattgaaatcgaatcgatgaccgcttcctatgaatcaaaagatgattattgaggtttagatggctcatttaaatatcaggttcgttgggttgta

SEQ ID NO: 37913 - DNA, 1536 bp, DROSOPHILA
atgacgatgaatcgccacgagcgtatcgagtgcaaaggatgcggaaagcggtccctcaccttcaggtgctatcgctgcctgagctgccaggactttgatatttgcgaggagtgctatgacaatgacttcaccacatccacgcatccgtttgaccatccggtggtatgtgtcctcattccggcagatgtggaactgtactttggtggcgagtacatcagtaactatccgccgcagagctaccgctgtccgtactgcaagagatggggcttcaacgagtccaccttcctggagcatgtatcggcaatgcatccggatgccagtcccctgctggtctccaccatggtcggtctcttcgagcagcagcaggcggcacgtctctttctggagaatgagcagttggcctccattgccgtggccgccacatcgcgcaacgaactgatgcgtcgcccagagggctccatggccctctacttggagccgctaaatcgggatggaagctatcgcagggtggtggaacggaataacgaagatcgttcgcggcgcttgtctccggatggccgtgatcggcttcaggctctggtcagagagcggtactcccgtattgcacgccgaagtgctgccagagttggtaacatgacttccagaccgctgctagcgcctgctcccggtgacggctcccgcttgagtgggatacaggagagcatagaggcaggccagggaatacgtaatgtcattgtggaagagctaagcacctccaactacgatcctccattcaccatcaatgccagtgccagtgccatattggagcaacagcagcagcagcaggtgatgggaccaagcccaaatgccgccgctccacctatcgtaacacacccatcgctgatcgagatgatgcgcttctatgacgaggctggcttgcagccatttccagcttcatcccgtcgagtcatccgcaccaggcacgcaaacccagctcaaccggcggccaacatcggtaacaatacacggagcataaatgtttacggacccacatccgcttttacccaggcgtcgcacaatactcgatccttgaccgcccccgatctgttttcgcttgacgagcggtatcgtattagcaggatgcccatgttccaggcaaatcccggagcactacatcgccagggaaccgggacgcgcgctttggatacgcgcgccgtggaattcagtgaatttccgccggaagaaaccgaactgcccctcatcctgggcacttccacgatcgaggacccgtcgaagctgaccaagcagagggatcaggagcgcaggcgttttctctgctatcgcttcacaacacccaggtcatctaagcgtccccagaatcattttctattgcaacgcgccgaatttgtttcccaggtgctttactccgccttgtgcgatgaagatttccaggatatttcctttccgatcttgagaaacattccaaaactgaggaccattccggacaacgtcatctccggtgccggcgatgctgaaaagaatccatctaatccgtaa

SEQ ID NO: 37914 - protein, 511 aa, DROSOPHILA
MTMNRHERIECKGCGKRSLTFRCYRCLSCQDFDICEECYDNDFTTSTHPFDHPVVCVLIPADVELYFGGEYISNYPPQSYRCPYCKRWGFNESTFLEHVSAMHPDASPLLVSTMVGLFEQQQAARLFLENEQLASIAVAATSRNELMRRPEGSMALYLEPLNRDGSYRRVVERNNEDRSRRLSPDGRDRLQALVRERYSRIARRSAARVGNMTSRPLLAPAPGDGSRLSGIQESIEAGQGIRNVIVEELSTSNYDPPFTINASASAILEQQQQQQVMGPSPNAAAPPIVTHPSLIEMMRFYDEAGLQPFPASSRRVIRTRHANPAQPAANIGNNTRSINVYGPTSAFTQASHNTRSLTAPDLFSLDERYRISRMPMFQANPGALHRQGTGTRALDTRAVEFSEFPPEETELPLILGTSTIEDPSKLTKQRDQERRRFLCYRFTTPRSSKRPQNHFLLQRAEFVSQVLYSALCDEDFQDISFPILRNIPKLRTIPDNVISGAGDAEKNPSNP

SEQ ID NO: 37915 - DNA, 10684 bp, DROSOPHILA
aatcaggggaatgctggaaaggtgcaaacccgatccccgctctatattggcggtttgccaggtgggtcagctgctttatgaagataatttcatttatttaacccttttctcaactattttcctggcagagagtgctcccagtggttcactgatatcgcgggagaacttcaagggctgcatccggcacgtgtccatacggaacgagagacgcgactggatcgagatggaggacctgaggaacgtgctgctcagcgagtgcctcgtgtccagcgatgagagctgaagatcgatgtccgaattccggacagctttccgggcgcatctggttcctgttgacgccacaccaaaactttttccaaatgtattgtgatcaataacgagtttagagccacctatttatagcccttcactgccatataagttaggttactgtaggattagctttgaatgtttatatataattaactacgacttctattgccagtgactgcattttgtactttgcaatctgattcataatttattttcgtatttatacattactttcattatttattttatgtttttaaagaggctttaagtttgtatttcatttggcatacggcttatcaaaaattgtgtttatcgaatctccagtttgtacagtgcgcaacgaaatttacttaagtagctataactcatcattattttcatttgtaaatagaactgccatttagcttgtattcattgtagcacctatgcttatgtaatatttccagactaataaaataaaataaaaacctattatctaaatgaaacgtatggaaaaattatttaaattaaattaattttataaacaaatagcttgaaaaacaccttaccaatttctgaaccgattacttcgcgattttttacttggattttagctttgaatttattctgggagttaactttcattagctgaatgataagtttgtaactctccattcagccattacttacatattttttaacgcacacgatgagtataaacaaatccattcgtggcagccgaaggactcgaagatccctagcttcgggtggtggtgatctcattggcccctatatctattgcatcaacttctatgataatggattgagtgcggtgcgggatgagtttgtgaagcggcttgaaagtgggctacgacgtgccatgttcgtcatcgacttggataaggaagttgcggaggccaattatcagttccaacgaaagtcgaggaccaagaaagctggtgagttgtatggcatacaactgtttggggaaggttttcaaaatgttgctttctaggatctctggacatgaagtccttagatccattgaacattgtcctgcaatgcattcagaactgtgtggaagagtttgacagaataacgaagcagattgagtcagaggcgaatttcgacctgtactcctactggcaacgaaatatccctgcacagctcaagaacctattggcgcctaaaaaaaagggtgctccagatacgaagcgtgacctaaatacagctagatccaaaacgggcaagacatcgagcgacaagatgcgcctggagaagatcaagtgctcgtccgttacagccaaggagcaccacaaagttggcaagggagcgccggtgtccaagcgagaagtaagattcttttatttttttttaggaaatataccctttgaacctttctgactttcagtacattcgagacaatccgacgttcacgaaaatgctgatcctgatcgtggggcaaatggataacgacttctacaaattgctattggcctacgaacaaccgctgcgagctattattaactttatgccggaggagagtgcctacgatattttagtgccccgaccgcgacgggaacagcagctccaggaagcgttggctgccatccagaaggacatccattcgctgcgaaagaggactcccacaaaaccggttggcatctttcagcagcggcttccccagatgtccgcttgtatggcagccaaattcacggacgatatctttgaccagctaagttggtacatgtacgacgtggaaaccctgagggagtggtatcgatcctactacgtggatccgtacaaggagacaaatattaaaatggatccctcgatgtcgttggtggaagcattccacattgtcgaatcgctgagcattcaggggcactatctcaagacgcaaatgccggcttcccgtaatgataatggtaccgtttacctatatctggagtcgctaatgagcacgtttggtaatccaaaggaactgatgaccgaaacggaggtcctgcttctggcaaatcccacgccatcggttcaaactcgagttttggacaaagttaaggtatacgccaattcgtttaagagcatcgtaaagatgcacaaaaacgaccgaatttttgtggaggaggccaatggactgctgtccaatctgatttcatatatggatcagagtctcatgcgaaatgtctaccacggctgtctggagtataatcttttgcgacgatactttacatccgggtatatcaacagctcactgaagtgtcagccctacaatggtgatgtggaaccgatctatctgcccaagtttgccgaactctatctcacggatgactcggttatgcaacgaattatcgagctggtcaaggactacgatgacttcagcctggaggaggtgcagcccaatgtccatctctatacttttcgaaggtcactaaacgaggtattcgaacaggaaaatcaaacagtcatcccaacacggctctgcttcagggattttacactgtacgaaatggagagtaagtataagataattgatataacgaacttgcacatcatttatatcatttgttctatatagattttctaaaggacttggtcaccccacaaaggttcaacgaggtgaccgaaagttatttgtcacgacaaacggagagcgctgataatattgcgacccaagatccattcatagtgaggtgcaacgaggagaacgatagtgtacccatcgatccaaaagtgtttgtccggcgaaaatcgattaaggagcagctagccaagaagaaggaaaaagagaggaaggagcaagaggaatcgaggactgccagccgaaaggtgtctgtagctcaagatggtctattgtccagtagaacctttaggcagtcccaggcgcgtgctacgatagcttccattctgcaggcaaaagattcaaccgccgactccaagcacgcattctttgtgggtcttggacgcaaccatcccttgctggaggggtataatctggatgacacacggcaaaccattaagtgcaagacctcgaagtacttcttcgaagagggaagaattgtgttgtatgaggagaggtggaactttcgccagatgaacaagtgtcttgccctcgagattggtggccaggaggtacattttcggagtgccgacaacccgctgggagtcactgccgccgattccagtgttaggatcgagtcgaagaacggcataagtctacgggtcttggccacgcagaccgaatgcgccaaggcggtactgaactttcccaatggcctgagtacctactgccacgacacccacacggaacacgtgtggcaatatcaggtaagatggttatatgctagccagatcccaggagttacttactctactattccaaacaccaggagaacgtgctggacgagagtcggcgtgtgtgcacaccttatggttgtgtgatctcattctatcagagcaccgacaccattgtgattatgcggtataatggtgaggtgtaccaactgttcaccttcacggaggccgacaacgaggaggaggaggacctcaactcggagtttataaatgcctgctccacgcagtccacctactccagttaccagcccattcgcgattcgaagaaaaagcagaggagctgtgagaattcgttgaagaaaacctccactactcgcagtgtgggcggattggactccatcatacgtccgtccatgttcagtgttgactccaagaagagtcagagttccaaaaaatcaattgggggtaagagaaaaagccagctgcttaaggaacaacaggctgcagcattgttcgaaagcatcaagttcgagttaaactatctcaatttcattatggcactctacaagctaagctatcgacacctcaagctgaccacgtcgctgggcagcgtggttcatgtgcaacgcgatggaaagatctggtgcgggaaaccctaccggaacaccgagtggcacgactattatgccaacgagtcatattcgatgcgagacgatggtgtcaagatggtctggacgttgggagagctgcggtgctatcacaacgatggcactgtcattacttccgaaaccgccgaaggctgggatcccggcacggatgtcgacgaaattgacatggaaatcagttcgagcagctcacatgcgaatgtagaaatccaaccaagccacatattccgaaaggtatggtatattctccaacatattcttgcccagcctttctgccactgaaatcaccggaactgtagctgcatttcttggtatattgactttttgttttatacattttatttgtcaggagaccatttttatcaacgatccggaaggtttgccatttaaagatgtcagcataagtagttcacagggtgtagtttctcaaagaatgagtttgagaagtaaagaaatctcttccagtagtgatgtcatgccagaggaggaggagggagaggtggatctggaaaaaagctacataaccttccttccaaacagttacttcattgcccacaaagtctatgccggtatccgcttcacattcagccacatcacaaatgtggatctacatctggacacctcgatctttacctgcgacaatctgaaggttcgtgtctttagagctcctttgacagcaggtgtgcagtattctgagcccgttgaaaacccgtcatctgcggccgatccggatgaatggacaaagcccgaagttcgcccatcaactaaaagtcagcgatcagatcgatcttttgaagaaactacctccagcgaggagcagtcggcggaagacatggatctcgatgttgcatgtgtggaggtcgagtgcagcaatttggcattaactttgtttggtgatcgggtcatcatacagacccacctgcgaaagtttggatgtgacgagaacgcaaagtgcgatttgcaagtgcggtaagtggagtagttttcccaaaatccaaaacaccattaagaagtcatcatatatttgatattttttattgaaagtgacgatatcgagttgaaagtgaactttggtgaaagtctgttgaccacttttcgaaattgggtggacgaactaaccagttttatcaattgtttctgtcccaagaggcgcacattgtactttctggaaacccaaaacagatcttgccaaagaaaaggtagtttgacattaagattatacttcgattgatcataattttgagacatatatattctaggatttgagttgcataaatcggtgccgcctctcggaaaatacaacttatgtgctggcaactattttatcgatgtaaacgagctgacatctgtaaatagcaaaatgcaaaaccgacacgattggtacgagcaggatatgcaaaagtttccgcgctttcaaactcgcaagaaaccagtgaaacccgattttccaatggttctgaattccaggtaacacaaaggtatctaaaggtatcctgaccatatttattcgggcgtattcccatagaatttacgtggagattcctgcacaactggccaacacggatcggatacaccagttcgtttctgaatttgattcgatcaagtacagaaagcagcggtatcgttttaatgagtgagttacaagtataagttttattgtagatatatcggaaaaactattattctctttcagagctattatgtttcatctctatccgcgactgcagcttttggttcagcaggagataagcaagcgcagttggaagaatcatcatgaagaaaatcgccggcgcatgtttatagaacaacagcgctttagcctctatatggccatgctgaagcacaaggtgtatcccagctactttcagttcaaggaccagttcaactcgcatgtgcgtaacatcgagttcttccagttcatgacatccaagtgcaacgagaagacgcatcccgatgatattatcaccgatcccgccgaggagcccagtccgtcaatcaagcccaaattcaagaagaacaaatgtgtttgtcccaagtacctcaagtctttagattagtcacgttttgtaacgcataaaatgggaattaaagattttaggctttaaggcttaacaatctgaataaattttccaaataacatgtatagcaaggcagcaaagttattttaaaaatttgttgctcattttcttaacattttaatatacagttgttggcaaatatcaaggttttttaatcataatattttaatcaattaaattaaatgattaatttaattattaattattttaatcatatatttttcaaaaatttgcaccttttcaccacgaacttaaacttggcgcccgagttcctttttttccccacgctatcgattggtctatcccccatttcatttgtttggcattttggtgtcgtccccactcggtcataccgattggcttagttgttgttgttttttcggctgctctggtcgcgcgttcgtgctgctctcgaaataaatcagatataggcgaaatatgaattaaaaacttaccgaataatacagaatagtttccgcaccgaacacgcgatcatcgaaaacgaaacctcgaaatggcggaacctttagcagtggaaaccaagccgctgagcaacggaaatgccaatggaaacgcagtgggaatcgccgaatccgccagcgctgtcttccaggagaagttgaagctccagcagcaggaggagtccaacgagatcgcggcagtgccgaagtacggactcaagctgaagttcgaccatgtgtggccggaaaagaggatccagaatgtgcgggcctccatcaggcaaacgctgcccatggtgccactcgtctgcaggttagttatccaaaaggggaactataaacaaatatagaccaacgaccacacagagtttccaaaattccaaatatttcggtaacaccaaacatcatcaaatactgaggcaaacaaagagtagcatttgacatttacggttatctttatgggaaaacatgacagttgtgttatttacttctttaggtaaaaggacttattatatcgtattaaaatgctggggttaaacatttaacatttaacaaaaatatccggtttatatattagaaccatattggcagagccatgttgtaagaccttaaggtaaagtgcatataatatagtttccagtgtattcagtgtatgatgctggggtacggtcaccatatccataattaattaaggcacaataatggtaaatcaatatctgggcctaataatacctcaacaggagtgacatcgagcctgtctctttagcccctgccccctgaccccaccatcgctttccgtatctcttgtgcgtgccaaatatagcgtcaggtcctggccaacacacacacacacacatacaaacacacacacttacacacacagacacacccgtgtaggctcaactcataaattgaattcttttgtggtccccgttgccaactaaatgacattaaaaacgctagctccaaggctcaaaaggataccaacacgcgaggatttagaacaggatgtgagtgaaaaatggcttaggcgcccgataataacagaactttaaaagctatattagaatataattaatattaagttaattgggatgatgattagcatatgaagtctttgctattgctatagattaattgctaaaatatgaaagaaccttgatacctagtatacttaatgatcctattcaacatgaccgcagtcctgtaattatccctaaataaccttttgaactgggtgctcttctttttgtagcgcttaaagcccagataagcataattcgtgccttctttctgtctctgcgaaaccaaaaaacccgcaattcctggcgccacaatgttaccattgtaaccaccaccctgctccaatcctgtctgcccgcattggcgccacgttgggcgtcctgtttgcgtgtcctggccacattttcggagctacaagcgaaaggactcatacacacactcgcacaatagttcgttttccaggcagctggagtttcctagttgccggttctttgggcaaaagtcgagctgagcccgcacattctgattgtagttgtccgaagtcacagcatttactgacctaccaaatgacccatattacaaaatgttcacagtgcaacgaacttgtgcttcacttattcactcactgcttcaatttctcaattcaaatgaaaatttggcaagcgaaaatatgactaacttctctagcaattcgtacatatgacgtgtgcagacaggttttccttagtcgccctgataaggctaatacatattttttatgaaatctttttataaacgcttatcagtttagttgaacaggtgccttttttggttctaagtgataactcttaaaaatactaaagttcgtaagaatgggaatccaaaaaacatacatatgttatcagcttagttgattagagctcatttcagatcttctacaataaataaataaataaataaaataaactatgaggaattgatgattcgatttttatgaagtgattatgagtcacacttttaaaaatgcgttattgaaacatattttttttaattatcaattatgattctttgacgtttatctgtgcatatttaccccaatctaaggctaccgagtataaaagtatcataaaatattttagcggttactaacaatatctgaaagttagccttatcatagccgaaatgttatgtcatggcgacacactgatagtgttttagctttaaccttttttttttttgtccatttccatgcgaccttatcaaaattcgacacaaattgtgcttagatcgcttataatgattattcctttcgacacaactaacctatctccagttattaaatatcgcacttatacaatgctaagtgaaatgcttttgtttgtcgcttcagctgcgtaaacatttacagattatatagcttgatttaattttttattgtacaactagtatacaccgctagtagagattagaacacccacatcaaggttgacgactaagcgattttccagcctcagaaagttctcattgagggctgatattccaacctcgcaatgagttattattgcgcaacaatattattacttcataaaataaaatatatgtcaattgggtttcttccttgattgactttccttaacagttccagttcaatgtatctttgatgacacagttccggtcattttccctcttctgattaccaactatttttcacccaatttcaatccaagccagcaggaaaacgtcaccagtcaggaagagcttacttctatacacagcagcacacccgattcccttttcctggagcacccccatccacatcgaatccttttggcaaacttccagggcgagtgcagcatgtgctccttgatactctgtgagcgaagccagaaataaggggtctacatatccttagagcatctccaggatgcctcggcaagtggaggatgccttctagtggatttgggagtaaaaaaaaatctttgaatagccccggtcttctggtagacatgtgcattcgtaaatggataataacatagttcgttttattttccttttactccactctcatcgcgcactcaaatcatatgcccgtcgaggcgaagcacttttccttattgttttcccatgtcacaactggaattttgtggcaagatgggattgggagtcttaaaaaaaatgaattccctccggcgaaagaaatttcgtttcgcagcattttcccctcttcttgtgcctctcaacttgtcacttttcacattttgtttatttttgatgcatctttcagtacttgagttagttcttttcggtctgttggcttgcgtttttagattggaaattttcccaggagatttgatatttatagaatgtgtacattcaactcgaaaagtacagcttaactcgagttttttttattcacaaattaaacattaacttacaaacttacgatatcatatttaacctgtcgactaaagttagcaaactaaagctaaactgaaggcttaggtcaaagtagcttaactaattcccaggacgacacacaaaaaagtcatacattagttccagggagcaatttatccaggtgcaggactacgtcagctaacttcattagttacttgccacaagcaatttgattcttgtcctctcactgccacccccttccaattcaacctccccgtgggccttcgcttgacccacgctgacccggaaaacttttcccccaacaatttcacaaattgtgtggaacatgaaagtttgttgcacaagcacaaaatatattcgaaacgagttcggctaacaccttaattgggcgactgagttggtttttaattaaaagactatttccatgacacgacggtgaccccagtccgctttgtatcttagctactaaagagaa

SEQ ID NO: 37916 - DNA, 4818 bp, DROSOPHILA
atgagtataaacaaatccattcgtggcagccgaaggactcgaagatccctagcttcgggtggtggtgatctcattggcccctatatctattgcatcaacttctatgataatggattgagtgcggtgcgggatgagtttgtgaagcggcttgaaagtgggctacgacgtgccatgttcgtcatcgacttggataaggaagttgcggaggccaattatcagttccaacgaaagtcgaggaccaagaaagctggatctctggacatgaagtccttagatccattgaacattgtcctgcaatgcattcagaactgtgtggaagagtttgacagaataacgaagcagattgagtcagaggcgaatttcgacctgtactcctactggcaacgaaatatccctgcacagctcaagaacctattggcgcctaaaaaaaagggtgctccagatacgaagcgtgacctaaatacagctagatccaaaacgggcaagacatcgagcgacaagatgcgcctggagaagatcaagtgctcgtccgttacagccaaggagcaccacaaagttggcaagggagcgccggtgtccaagcgagaatacattcgagacaatccgacgttcacgaaaatgctgatcctgatcgtggggcaaatggataacgacttctacaaattgctattggcctacgaacaaccgctgcgagctattattaactttatgccggaggagagtgcctacgatattttagtgccccgaccgcgacgggaacagcagctccaggaagcgttggctgccatccagaaggacatccattcgctgcgaaagaggactcccacaaaaccggttggcatctttcagcagcggcttccccagatgtccgcttgtatggcagccaaattcacggacgatatctttgaccagctaagttggtacatgtacgacgtggaaaccctgagggagtggtatcgatcctactacgtggatccgtacaaggagacaaatattaaaatggatccctcgatgtcgttggtggaagcattccacattgtcgaatcgctgagcattcaggggcactatctcaagacgcaaatgccggcttcccgtaatgataatggtaccgtttacctatatctggagtcgctaatgagcacgtttggtaatccaaaggaactgatgaccgaaacggaggtcctgcttctggcaaatcccacgccatcggttcaaactcgagttttggacaaagttaaggtatacgccaattcgtttaagagcatcgtaaagatgcacaaaaacgaccgaatttttgtggaggaggccaatggactgctgtccaatctgatttcatatatggatcagagtctcatgcgaaatgtctaccacggctgtctggagtataatcttttgcgacgatactttacatccgggtatatcaacagctcactgaagtgtcagccctacaatggtgatgtggaaccgatctatctgcccaagtttgccgaactctatctcacggatgactcggttatgcaacgaattatcgagctggtcaaggactacgatgacttcagcctggaggaggtgcagcccaatgtccatctctatacttttcgaaggtcactaaacgaggtattcgaacaggaaaatcaaacagtcatcccaacacggctctgcttcagggattttacactgtacgaaatggagaattttctaaaggacttggtcaccccacaaaggttcaacgaggtgaccgaaagttatttgtcacgacaaacggagagcgctgataatattgcgacccaagatccattcatagtgaggtgcaacgaggagaacgatagtgtacccatcgatccaaaagtgtttgtccggcgaaaatcgattaaggagcagctagccaagaagaaggaaaaagagaggaaggagcaagaggaatcgaggactgccagccgaaaggtgtctgtagctcaagatggtctattgtccagtagaacctttaggcagtcccaggcgcgtgctacgatagcttccattctgcaggcaaaagattcaaccgccgactccaagcacgcattctttgtgggtcttggacgcaaccatcccttgctggaggggtataatctggatgacacacggcaaaccattaagtgcaagacctcgaagtacttcttcgaagagggaagaattgtgttgtatgaggagaggtggaactttcgccagatgaacaagtgtcttgccctcgagattggtggccaggaggtacattttcggagtgccgacaacccgctgggagtcactgccgccgattccagtgttaggatcgagtcgaagaacggcataagtctacgggtcttggccacgcagaccgaatgcgccaaggcggtactgaactttcccaatggcctgagtacctactgccacgacacccacacggaacacgtgtggcaatatcaggagaacgtgctggacgagagtcggcgtgtgtgcacaccttatggttgtgtgatctcattctatcagagcaccgacaccattgtgattatgcggtataatggtgaggtgtaccaactgttcaccttcacggaggccgacaacgaggaggaggaggacctcaactcggagtttataaatgcctgctccacgcagtccacctactccagttaccagcccattcgcgattcgaagaaaaagcagaggagctgtgagaattcgttgaagaaaacctccactactcgcagtgtgggcggattggactccatcatacgtccgtccatgttcagtgttgactccaagaagagtcagagttccaaaaaatcaattgggggtaagagaaaaagccagctgcttaaggaacaacaggctgcagcattgttcgaaagcatcaagttcgagttaaactatctcaatttcattatggcactctacaagctaagctatcgacacctcaagctgaccacgtcgctgggcagcgtggttcatgtgcaacgcgatggaaagatctggtgcgggaaaccctaccggaacaccgagtggcacgactattatgccaacgagtcatattcgatgcgagacgatggtgtcaagatggtctggacgttgggagagctgcggtgctatcacaacgatggcactgtcattacttccgaaaccgccgaaggctgggatcccggcacggatgtcgacgaaattgacatggaaatcagttcgagcagctcacatgcgaatgtagaaatccaaccaagccacatattccgaaaggagaccatttttatcaacgatccggaaggtttgccatttaaagatgtcagcataagtagttcacagggtgtagtttctcaaagaatgagtttgagaagtaaagaaatctcttccagtagtgatgtcatgccagaggaggaggagggagaggtggatctggaaaaaagctacataaccttccttccaaacagttacttcattgcccacaaagtctatgccggtatccgcttcacattcagccacatcacaaatgtggatctacatctggacacctcgatctttacctgcgacaatctgaaggttcgtgtctttagagctcctttgacagcaggtgtgcagtattctgagcccgttgaaaacccgtcatctgcggccgatccggatgaatggacaaagcccgaagttcgcccatcaactaaaagtcagcgatcagatcgatcttttgaagaaactacctccagcgaggagcagtcggcggaagacatggatctcgatgttgcatgtgtggaggtcgagtgcagcaatttggcattaactttgtttggtgatcgggtcatcatacagacccacctgcgaaagtttggatgtgacgagaacgcaaagtgcgatttgcaagtgcgaatttacgtggagattcctgcacaactggccaacacggatcggatacaccagttcgtttctgaatttgattcgatcaagtacagaaagcagcggtatcgttttaatgaagctattatgtttcatctctatccgcgactgcagcttttggttcagcaggagataagcaagcgcagttggaagaatcatcatgaagaaaatcgccggcgcatgtttatagaacaacagcgctttagcctctatatggccatgctgaagcacaaggtgtatcccagctactttcagttcaaggaccagttcaactcgcatgtgcgtaacatcgagttcttccagttcatgacatccaagtgcaacgagaagacgcatcccgatgatattatcaccgatcccgccgaggagcccagtccgtcaatcaagcccaaattcaagaagaacaaatcagtggaaaccaagccgctgagcaacggaaatgccaatggaaacgcagtgggaatcgccgaatccgccagcgctgtcttccaggagaagttgaagctccagcagcaggaggagtccaacgagatcgcggcagtgccgaagtacggactcaagctgaagttcgaccatgtgtggccggaaaagaggatccagaatgtgcgggcctccatcaggcaaacgctgcccatggtgccactcgtctgcagctccaaggctcaaaaggataccaacacgcgaggatttagaacaggatttccggtcattttccctcttctgattaccaactatttttcacccaatttcaatccaagccagcaggaaaacgtcaccagtcaggaagagcttacttctatacacagcagcacacccgattcccttttcctggagcacccccatccacatcgaatccttttggcaaacttccagggcgagtgcagcatgtgctccttgatactctgtgagcgaagccagaaataa

SEQ ID NO: 37917 - protein, 1605 aa, DROSOPHILA
MSINKSIRGSRRTRRSLASGGGDLIGPYIYCINFYDNGLSAVRDEFVKRLESGLRRAMFVIDLDKEVAEANYQFQRKSRTKKAGSLDMKSLDPLNIVLQCIQNCVEEFDRITKQIESEANFDLYSYWQRNIPAQLKNLLAPKKKGAPDTKRDLNTARSKTGKTSSDKMRLEKIKCSSVTAKEHHKVGKGAPVSKREYIRDNPTFTKMLILIVGQMDNDFYKLLLAYEQPLRAIINFMPEESAYDILVPRPRREQQLQEALAAIQKDIHSLRKRTPTKPVGIFQQRLPQMSACMAAKFTDDIFDQLSWYMYDVETLREWYRSYYVDPYKETNIKMDPSMSLVEAFHIVESLSIQGHYLKTQMPASRNDNGTVYLYLESLMSTFGNPKELMTETEVLLLANPTPSVQTRVLDKVKVYANSFKSIVKMHKNDRIFVEEANGLLSNLISYMDQSLMRNVYHGCLEYNLLRRYFTSGYINSSLKCQPYNGDVEPIYLPKFAELYLTDDSVMQRIIELVKDYDDFSLEEVQPNVHLYTFRRSLNEVFEQENQTVIPTRLCFRDFTLYEMENFLKDLVTPQRFNEVTESYLSRQTESADNIATQDPFIVRCNEENDSVPIDPKVFVRRKSIKEQLAKKKEKERKEQEESRTASRKVSVAQDGLLSSRTFRQSQARATIASILQAKDSTADSKHAFFVGLGRNHPLLEGYNLDDTRQTIKCKTSKYFFEEGRIVLYEERWNFRQMNKCLALEIGGQEVHFRSADNPLGVTAADSSVRIESKNGISLRVLATQTECAKAVLNFPNGLSTYCHDTHTEHVWQYQENVLDESRRVCTPYGCVISFYQSTDTIVIMRYNGEVYQLFTFTEADNEEEEDLNSEFINACSTQSTYSSYQPIRDSKKKQRSCENSLKKTSTTRSVGGLDSIIRPSMFSVDSKKSQSSKKSIGGKRKSQLLKEQQAAALFESIKFELNYLNFIMALYKLSYRHLKLTTSLGSVVHVQRDGKIWCGKPYRNTEWHDYYANESYSMRDDGVKMVWTLGELRCYHNDGTVITSETAEGWDPGTDVDEIDMEISSSSSHANVEIQPSHIFRKETIFINDPEGLPFKDVSISSSQGVVSQRMSLRSKEISSSSDVMPEEEEGEVDLEKSYITFLPNSYFIAHKVYAGIRFTFSHITNVDLHLDTSIFTCDNLKVRVFRAPLTAGVQYSEPVENPSSAADPDEWTKPEVRPSTKSQRSDRSFEETTSSEEQSAEDMDLDVACVEVECSNLALTLFGDRVIIQTHLRKFGCDENAKCDLQVRIYVEIPAQLANTDRIHQFVSEFDSIKYRKQRYRFNEAIMFHLYPRLQLLVQQEISKRSWKNHHEENRRRMFIEQQRFSLYMAMLKHKVYPSYFQFKDQFNSHVRNIEFFQFMTSKCNEKTHPDDIITDPAEEPSPSIKPKFKKNKSVETKPLSNGNANGNAVGIAESASAVFQEKLKLQQQEESNEIAAVPKYGLKLKFDHVWPEKRIQNVRASIRQTLPMVPLVCSSKAQKDTNTRGFRTGFPVIFPLLITNYFSPNFNPSQQENVTSQEELTSIHSSTPDSLFLEHPHPHRILLANFQGECSMCSLILCERSQK

SEQ ID NO: 37918 - DNA, 66743 bp, DROSOPHILA
gtttgtataaaaattcctttaaatttatgctttagattaagataaacaaattaaatactgttttcagtttaaattgacaaattctagactcagttttggaggtatcctaagatcataacacttatccctaattattcacagtgtaaactctcctcgggcaaaggtcatgcagtttattatcggccaagatcaataaagcatgtacctaattagaaaccataacccattcctaggtgttagatttcccagaaggccaatgccacttcctcttggctctgcactcttgtttcatttatgtcttcaatgtgcaaactcaaacattattaataatatcattcctgtaaatatacattttttgtatatgtaagttttcatcatagaaaaggaatagctttccatctttagaaacatctgaacgaagtgctgcaaaaggaacaagccgccgaatgcgatccacaaggtccacactctcacggatctggtctgaagtgcagcgcttgcgatcagttcgtgtttgacggtcgtttgcgtaggaagcaagacacgcgacgggtctcgagtgctgtgctttgcctgtgcgatggctggattctagatgatagtgcgttcgaatagtgcggccgctgctctggcgatttatttatgtgtcataaaattaaacggcaattatgcgataagccactgctaataaataagtgaatgcaaaattctgtatgccatttccgagtttccctgcaacgcaagatcgatttttgttcactttttacacttcacgtcgaggatacgaaaatacgaaaatagctggcgagaaaaatgtttgcttgtcgctgagcaggaaagtgggaaatgtgtctgaaacaaaaataaaattaaatagcgcaaaaatcttgaagtagcaaagttgcaagaagtctacgcaaaatcgagcaaataaagtgaaagattcgcaagagcaaatgcgtaaaaaagtggagaaaaaattcgagcggaaatcgtaaatgatttgaaaaagaaataatacaaaaaaaaagaacaatctgtgcagtgaaaataaaaaatattatgaatgaaaataccaaggaataagtgcctgcatctcaagtggttttattaaaagagcacagaaaatatatccaagttcaaagtcgaacggaatataatgtgtcattagtgatcgtagtgcattcagttcgtccagcatgcaaatcggaaattttatcaaatggccactgggcctgatcctcatcctgctggtcacccactgtcaggccaaaaggcagcggaaacggttgcgtggattctccactgccaaggacctacaggattatagcatgccgctcaacgacaactccacggaactccagcagaacattgtgtcctggacaggagctcgaattgcgtcgagtcccgataagaagaagaagtcaccgcaatcatcgagacgtcacaaaaccaaaagtggcctgatcattgaaagtaacattgccgactcggaatcgatgttggctattgcctcctcggaatccgtcaccaagaagaagccgccgcagcgtcgtcgcaacggaaaattacagaaatccggaggaggagcaggaggtggaggtaaatgtctataactatggataggctcttctaaatatggttccctgatcgattgtgcagcaccagaagttgctcgcattgctcgccatcagtttcctggtcgctggtcgtgtttctgccatatttggccgctcaagttgaaagaactttcatgtgaaagttgtgacaggaggaagagattctttaattttcctgagctgctctttatttggattttttttttttttttttttttttttgaaattctatacgttattacgtgagaggtccagttatggtccggctatgctgcagtggttgtcgccaggtctttggtcgttggcacatagttgccctggccttgtgttgcctttgttgtcgttagttggaaaaaaaaaacttggctttttgttatgtgaactttgcctattaggaatatgaatcgcctcgtcggcttcgaccaactgtgagatgatagatctctggttatggcagtgtgaactctggttagttggcgaaaacaaagtttacgatgaatgtgtacttagacttcttgaatagctgacaacgtaataaacacaaagttctgaaattatataaattcaatgagttcacaataattgtaatacaaaacatgatcttgataagggtaataactactaggaataagtaatatataagaacatgcgcatttcaacgaccaatattatatgttaaaattcccagactggttccaaatgatcatgatggtattaacccctggttatgcccattaaaattaatcaaaacataaatttttaaacaaattatagtcttacctttgcacaacaattggcagggcaattgaaccgataaacattgcgaacaaaggcgatcagcagagatgaatagaaacacaatatggacatgtttatgtgtggctatatcttctatatgttctttgtaacccctggagattgtcctcgagcgtgtgtgtgggtccctgggcacttgagggtatttgtttgccgaacacatgaccccgaaccgctgcgagggaacagtttgaggattgaggacaacaatagcgccagggtctctggctctgatggtcctggtccctgtaattgtggtcgatttctggagaggcagtggatgtggaagtgcacaagatgccgtaactaggcagcagcaacaatggtcgattgttaggcaggtcgtcttttccccggagaggataattgatggaggcatgcgtagcgtatcgccttatggaatgcctcacgcgctaatagcaacatatgtttcacaaaaagaacccagaacccacacacatggccatagaaaagggtttattaaaatatctacgcgactgccatggttataaaacttaagtggcttactgtgtccacttcgttcacagtttttgtcgttaaaatttgttacggaatacaacaaagccaacaaaaattggccatgcttccaagttgtttgtggaaacatttggatacatttcattccaaagctgttttatgataatcacttcttaatgccatagtgtggttaataaaaactgctgatgattagcctagaaaaataagaactaatattatgtgagaatcaaatggggaaaggcaaagatacaaacgattagcatgtagaatattgtaatatttaattagaaaaaaaatactttttaattttctctttgtaaaatggttaaacaattatttggcgatttagtattattttttaaatacgaatatttcagaaaatgattacacaggcggaacaacatttgctgacctgaaagcgttgagcaacttttcaatgtgtaaattggtttcctgatgccataatgactgcaaatcaattctaaatcattcaattgttaatcaattcaatgaaacacatttcaacgacaaagccttgaagacataaatgcgaattgatcgcgcaaattattgcccggttaagtcgtatttataacgcccgtttgattcgattggcattaattgattgattggctgtttggattagagaaaacgaaagtttcctaatggcgaaatgggtcacaaatacagatacagatacagatactcgaccagatcaaaacgatacgaacggattgtgggattgtcgggttgttttccaatcaaccagccagatacttggacaaacacgcacactttatcagctcattaagtatcttacggatacattcgatatacgggtatctataagtcatgaccaactcatatgtagctgctgtttgcttttcgctggcgatcgaaaagtgtttggaaaaatgcattcttcattggttttttttttaaatctttttacgtttagcttcgtttcgttttgccttgctttatttttgtttgtttcttgttaactgcattacacaatgcttacagatgaaaagcgcacttcagttctcttcgcctgcttctggaaatttagattggtgggaaaatgtttagagtggtcggctgctgccggttgtcattgagttttatttgtttttaattttttattgacatgtgaagtttgtaaaagttgagtgaactttgcttttctattgccggcaacccatgcgggaaagcaaaagtattgaacttgaagaggttcaaacgagttggtcaagcgtttttgtggtgaaaaatatacatttatgatgaaactaatgcactttaatggtgaggtggggacgacagagtatctcagttaatgatgtgctaaggtaaagaaatactcttccgaatttattggagcctaaaaaaatcatgaaagaatttttttaagcattctttcgagtattttctatatcttcgagaacgaggtataccctttgtaactcagacttgtttatcgtttataaatctctcattctcacctgcattcatttctggtccctctttgttcttcacactgccctttgttgtgataatttatttaaatgcactttatagatcgtccaagtaacacctggtcgggccaataatttgcgctgccttaacggaaatgcacaaaatgatggatgcataaggcagctggccagctaagaaaagatagttcagcctacactcaaagaaaactccacatactcccatcaacacatgtcaaaactgagccaaaacaaagggtagagcgatgggaaaacaattgttgaactcatttaaaccgaacaatggaccgtggagcattgttcttgctcttcgggtaattcgatattgaaacttaatatatctttcaaataattctgccccagtcttttgaagtaatcgagcactcccggcagcattaaactagagttgaagaccattaaaatagttttatagaccacaaaacggaacatacaaactaggaacgccagaaactttgcgtgtaaacaacacgaatagggaaaaccggggggcgtttgtaaacaaatagttctgtggaccaaataaagggaagtttaacaccaaacttggctgaccagcagacgccacaaatgatctatggaaatccacctaacaaactcctatatcaacatgagcgaatcaaaacgatttggagtttacacaagtgtggagcattactcttctggaacttaattgttggtccgagattttcgatcttagcccatgggagagtaccagaaaggcagaaaagaaaaactcaggtcactttgaagtggtctaccccaaaaactcgcctatgtttgcattggccataaattaatgttatagaccaagttttgataagacattgacgccgtctgcgagtcggcgacgtcgaccaaagcccggcattaaactaacaaccacagagggaacagaacagaatgatgacggccaccggaacatttaacgggtcagcggctattgatgtgcagtcacacgttggtgggtcagaaaacgccagatagtaggatggtcatgggaatggttggggagttgggagttgggagctaggagttaggagtgggcacccagggtctatattcagaggccttccacggagtgtataacaaattcgaggctcgttagtgcagacacttgagataaggagacgaagatgggcgagcgaataaattctttctagttttcagattgttttcttctcgagaaaatgtgggtcagctcgaaagggaattgtgaggggagagcagctgcagcttgttgagtaactaaattaaaaagaaacgcaaaaatggttatggttccctaactagtgaataaatcaatcttaaatactagataaggaaaattatggtgaacttatagaggtctaaccggaaactatttttacgagtattattatctatattttcgaaaagacccgatcaattttaacatcttgattttaatttagaaaccaatgacccttttcttacatataattgagcagtcttactatcttatttgtattatttatagcgaaaagcctttaacaacattttgaaatacgaaaagttattttcttcttcaaattgagactttacaatatcaaaagattacccattaaatgccgacaatgttcactatcgttcacgaataaaatccttacccatctcaacagtatcgaagtgtcaaccattggcatatatccccaaatgatctacaggttgaatggaacattttcatgtttcgttttgtgagataacttgtaaactccgttgagagggacccggtgtttttatcaggctgtttgtcaatactttcgagactgataaacgatcgttgatcgaatgccacggcaactgtcattgaacttcattgataaatgcccttaggcagacaggtgaggaggctccgcagactggaacagagtatcggtttgcgatgcaagtgataagctaaacacatattcgacatctcccaaagttagccgtatcggtttccatttctacctgtttttatgtagcctcctccaggcgtcgaacctaatgaccctatatcatggcaaatatatcaatatcatgcctctgcttgtcaacacattcgacttcctccccctcacataaaacacccattcacactcctcagaactttggcagagatgaaacgcttttcgtttctgggaagggaaatccctgctttcttttgccggaatctcttccaaacggaactgcggggcaaacacttgaaagtgttgtgtaaatattatagggtttaaatcggggaagctgtctgttcagtggactaattatgctttatgttcgcgttaaaagaagtttctctcccatatgtggaagtaaatcttcgaaaatggctttctttgaggtgatttttgtgttgcccttaagtaatctttccgatgaaagcttcattaaaagctagctgtctctgcccgatcttcaaagagtgcgtgccatttatagagaaatttaacgggatgtagttttcacttatctagataggaccacccaatcgaatcgataaggtcaagaacccattaataactttagttcattaatctaagaatcacccagacgacatacccgagtatcttttgttgcatctttagtgtcacttgtctgcatctaatgcgcatttatacatgtgcggacaagttttcgccaatctattttgaatgtggtagacgatggacgactgaaggcgcaacggaggctcatccatcagcggactgggtttagaccctggagaaaattggcttatttgaaggggggaaccaactgacagacagacagctgccgaaacgtgcctccgcacatgagtcacgcgtagagtgtgaaaatcttgtggtatccacctgaaaattgcggtaacgcccactcgcattttccacaaaacgcttgagtaatggccaaaagagctgcctggaaaatacgttttccacacacatttaaatgccaaaatcaagttgcagtctgagaaactaatgaaacgacaaaacaaattgtctgcagacacgcgtttccaacacacgctgaaagctggaatcctagaagatcaggttcaggtttgaagtcggaatcagattggtgttgcggttggggtccaggttcaagatcccggctgcgactgtcgactgccgttggcggcttgtctttctggcttacagactctgacagctcgagagaattgaaacattttggcattgccattgattagtgttctaaatacagatggccaaggccagtcaatgagaaattgacgcgttgcatgcaaagtggccgcgagaattcgattcgattcaatggagatattggagccttttggggattgggatcagaaaagttaaccgactcgtcgcgacacgctgcctgacaaattgcttaattaatgcgaattgaaggctatttgtggccgaaaccagttattggcatttcttaaatgagcattcgagtttactttaaatttatttcaactgcggtcggtatgtcataattgcgttgcggttttttgaatcctcgaaataatatactcgcaatattagttgtctgccaaaatgtatgtagtttgcaaattacttttgtggccaattaatatttttaaacctaaaattagtcaattttattccacaaatatttgttaaattttaaaagagacaaaagtattagtttaactggttttaagattaacatatcaaagtcattaagtctgcattaaatttttgtatttccctcaaagttttctaattttccaatcactcgcaatcgtaaccataatgcattcgcagtttgcttaaccaaaattgttcgttttatatcaacgtcgaattggcttaacagtaactccaatcaatttggcttgaaaatttcccaaccattttcgcattcaacttaggagataattccacggcagcttgttcaataaaatcgttaattgccactcaaatagcaacattttttgtgacgctgacgcgacaggataaaggcttatcaaatggcaataacacaaaacaacaagccggcgaaataggaagaaactgatgcgaaactggttagatgagtaagtcgacgacaaggcgataaaaatttgtagtcaaaatgagagatacgaatcatcaacatcagcgtcggacgacatgcaacgtaaacaagcgaaattaatgcaatttcttcaatgtatgaacaattaaccagcgctccttggatggaaacgaaaggggtttcgaaggcgggcctaacaattggccaactttagttggtggccaaaacggcggcggcgccatcaaatggctcaaatggcgcctgcagcgagatcgtgggttgacttcccagtgatttgaacactcggtcggcgcctttttacaaccaaaactaacacgcttacgtaccatgtgctaattaaatagtttacaagtcaactgtgattgccaggaaggttggcagctaacctgatttggtcgcagccgaaaaaaaaagcagcgccagagatttattgaagtttgtccaaaacatcgattcggggcgtttcgtttcttttttaataattttttttttactttaaaaacccgaatgcgacagctctcttgtggctaaatgatttgtttattgccgatcgcgtacagcgtgtgccattaatggctgccaattcgaattaatagcactcaaagcctgcggatgaccggacgacccagttaatgtttgatttaacggccggttaagtcgttaaaacagacatcgtgccacttaacgtgcagtaataaagttaggagttgtcttataaaattagttgaagcattttcacaacttgtacagccatttaacattaacaaagttatctaaatagcttttgaaccatttcgtttattgtgcaattttattaatatacaattttatgttaatatgaataaaatcccacaaaaacaaagctcaagtttaaaaagctgaaattgtaaatcattccttgaaaacaagcttcttaaatattagtgttttttttttagatttccataatgtataatgtgttctccttttctcagcaaactgaagtacagaaccgcatgaagtcatccattccattccattcatattccttttttttctttttctgtgcacccaaagaatgccacaactccacctcgacttcctatagtttccctttttttgcatttggcttttcctgtggctatagtccgatgggacagtcataatctcagtttgtctagacagacgacaatgtcggcgacacaacttgtcagtagtaccagtccgtttgtggggaagatgagtcagactttataaatttaattatgacattacttattatgcgactcgcgccttttgcctgggcacagaaaacgaaaatttaaaacaagcggagttattaataaaatctgacagctgatgacaaattaacagtgcaccaaaaatctgaaagtgattccaaggaaacctaccgaggagaagtgtgggcgactcgtgtctcctcgcgggtctttgccagagatattgaatatcacaaagctcacgcaaaacccactcaggcgtaactaatgagtgcgatatgagaggagaccccataagccccaaaaccaaaatacaaaaaaaaaccgatctcgagatctcgtttgcgcatgtgcagcattcggagcagtgttggttaacagcaacgcggggcaaacattgacttggaaaacgatgctgaaaatgcatttcgagtgattggcaaacacgatggagccatttgtccacctttcccatctaatggcctcaatgcattttggctaatggctgaatgggcctttcgacgccttttcgtgcaatgattgcaagtggtagataagagcttttgactcataaatcgtgataattatctcagcacaagtgcagagaaggagagctcgccttaaagacttgaacattttcatgatttcgtggggcttattaaattattaagtgaaccgctacatgaaaatattttgccagtggcttacacaactctgattcgcgattagataagtgataaaacaagtcgcttaattaagagctcttaattaatgagcttaatggttgtccgggaatttcctgatctttttaggcggcaaagtgtcgctataactaaacactctttccagagaacaatgtcaatgccaaaaagtcatggtttttaaaacaattttttcaactgagtagattttcagatatcgttttttcttgggccctttccaaatgagaacacaatctgctattatttcaacctaccaaacgagcactgttattgtgatattcttaaaaattagatcagacccgaatgtgtcaacacttcatggggaatttcacacattcaaagttttctggtaaacaatttcctttcaaaagttcaaatcaaacatccgcaaagatgaaaggggaatgaaatggaactgcagcagcgcttcagaacttttcagctcgtgtgtgtgtgtgtgacaggtgacaattttagccaaacttttacgaccctcgatgggcgggttctatgtgtgtaaaccgaaccttttcgtggtgagaaggggatgttactggtttcgagtacttgaaaaattaatgtacccggtcggtgttggcagccaaacgcttgacttgtcctccgaggttcaggaaaaatgcatagacaaatgtcaaatatttattgaaaataaacaaaactggctaacaaaccaacgactgacaaacatgacgatggacacacggggttgtctcgtcgagctgcgtcaacagatttccaagaaaagaaataaaatgaacggtgtgagggggagcacggagctccaaactgaccagaactgaagatgtttggtcatgcatcagtgcagcgctgcgttaaaagccgggaaacagtgggaaccaaacgaacgggttaagattggatggcttggacatggactcacggatggatggatggttggatggttagatggttggattacttgggtgccagacgcatgctgcggagctgagttcttgttgggtcccgtcagtgggtgcttcaaaagctgctgaccgatggtggtgagaagaacacatgctctgtctgtctgtctgactgtctgtccaaccaaccaaccgaccagctctttctctaccggctactggcttttcctgacgtcttcaagaggcgcatccagtccgagttctcggatccatgttcgagttgtgttttggaaaaatatttatccaggccccggtctggtctggtctgcccgccgatcgcaatgatgatgttcatcatgatgggtatgggacaatgtggtcgatgactccaatgggttatgcaagtaatgcttgatttggtattgaagactggtagctgccactcaatggagtccgttgttgtttgcatgactcacagcaacaacaagcgcgatgtgtgggtgatgcaattagggggaaatgcagtttgaggcggctgtgtgtgacgttttctattttggcgtgaaaatacttgcagacgtttatgaattttcttcacttgagtagagtttattaaatgaaaattaagtgattcattaaaataataataaaacgatagttaaaaagaaagtggctttaaccaacatgtgaaaccttacctaattttataaaaatcaattatgagaaaagacacatcatatacatccatttcttatatttctaataagataaacatttaatattcgattaataatttatttatgtatgtatgaaagtccgcatgtcttttagtcatcgatacataaccgataagttattataactttccaaccctataagaaaatgcaagtatgtatatcgatactgcaaagttccagccctatttgtccttacttgcaattcattttcgaaagaatcaagttggttgcttttattgaaagtctgcagtctgaaattaattgaagtgaagaatataaaggccttgcttactcttgaccaatctcaggtaagtataaaccattatagacggactaagaaaaggcaaagaatctgtaggtgaattcttgaatccacgtgcttctagaatctaaaagcatttttctgtttggcgtttcattcatatcgacatggcgcacgcggtacagaaatattttcactattttcggacaggcggctggggatttggctatctttgccccatggggtcccggtttcttccagccgttcttatgcacacaattatgcacacaaaccgacagctggaggcaaaaattacagaggcacagaatggggcaactccatctcctcgttctccagctgcttattaagccgttgcaattgcaatccaacttcaaagatggcaatggaaattaaccaattgctgggatagacaagctggctgttaaggtaatcttcagttagttggcaactggagtgcttcctgtccgatggactttattcgcctgtccaattaattctgcaagtgttttgcataaccaaactgccatcaacttgcatacaaataatgattttcggtagatgaaaaatattttataaagagtaaaccgaaaaagacagcgaaaagaagcaaattttaaaaaatttgacaacatgatggcgaaaaagactaaaaatggtcttataactcgatgaatggtcggggaagtaatcagaattttggccatagaaaggctactgccagagaatatataacaaagaaagcaggatatgctcttaaaattaaggaatacatatttacatttttattaaagaaaacacgaaaatgtatgaaaataattggattttgatcaacttttattaacgaaggtaaaggcactaaagaagtcaaatgaacgagccaatgaaaattataaattcattattttgtataaggaaatttatatccagtttaatcaaattaataaccggcaataaatcaaacaaaaactccgctttagtgaccacaaagtatttcccaattacttattcctaagtcatcaataattgacaccaaacatgccagccaataatagtctgaaatgtagctgtgagactatcactttcactttgtgaaaaactgagaaaactaggcttacctaaaaaattgatttaaagcgatccgaacaaatgtcttgaagtcaaagcaaaaagcaggaaaaactgctctgggcaaagttcaagcgtaaagtgttaaaagcgtgaaagaaaaacttatcgacagctgtcaaaatcgcccaactcaagaggaaaccggcaaatggcatttaaatgttttgacaaatgacaaatttgcggtagccaaaagcattaaaaaggcaaagaagttaaataactggagacttgaggctggaggtggccttttcaatggctattgcgagccatgtctaggcctctttagcttccaactccccgtccctctaaacacaaataacccctctaaaatgtattcacgttttccaccgctgacagcttaagtgagaaaactattgctgattaaatgttttgacaaattgaacgcgctacaaaaaatgaaaatatttatacaccattaaaaatttttgaaaaacttagattggcaaagaaaaattttgtcttttaggttcaaaagaagtcactggaaaaaattttaattacttaacttttctacgatttctaaactatctatttgtatgtataatcttttaggtagtcaaatttcttgcaaagattcattgcttttcgttcttcacttaacccattgaaacttcaaattattcaagttcccaggctaaaaacttatctcattcgccccaaagtttgctgttgatccttccctataacttatatgccattttcctgcaattacgtcaacaattttgttttgtttgcaaaagttttatgttgacaattgccaaaaaagctgggcagccgaaaggaaacaactgcaaacggcagcagactgcaatttggagctaccaaaacatgcaaatggcataccaggtcaacatctgggccccaaactaccaactacaactgccgtttgttggtcagcgataaagtttatctcgaaagttgcccagcttttggttgagatacttgtacatttttcatgcaatccagctacagccagccagccaagtcaaccaatcaataattctcatggcacaaagttcacagcaatccagagcagctgccccagtaggtgatttattggcaatgttgtcttgagggcttgttctcgacttgttcgatttgagcaatttaattgattggcctgggaaaaactgtccgaatttgaataatgaagcgtcaagctgatttgggcagcatagattgaaagttaacctctttgattcgttgcagtcttattaatcgtttattgatttatttaattttcagtggaattcaagattctatagagttaaataattaagtggctttgaattcaaaggagtcgaggacttcaagagcacggtcgaattttaaggtttctaaaagcatatctctgtacatatattcttgtttaaaaaagaaaattttttaagtagaagagaaggggcgaaaacatgtctgactcgaaggacgaggccctgctaaaatcctttaaaacgcagctaaaggataacgtcctaagcatgttgctcaactttgaggagctccttaaattagtttccccgaggactccgggccaaatcacaaatgatacagaacaagaattgaatgcttttgaaatgcaggtgcgtgctggcaatttcgttcgcgcaggagaagctctaattaagctagtccatgatgtcaaggagtatcagattatttacgattattccaacatcgaagaggaaatggatagacaatcggaggcaatgcatgccaaggtgaccgagtatgaccaaacacttatcaaaatggttaaggatttggaagaggagctgtccgaactggagtacgagtactacgaaaagagcggtggacctgacttggattcaaaggatttacttgtttaattataaatgatatattttttatccattcgtaaaggataaccactgtaaacaaaaaaacgataaataaacaatttttgccccagtgaagacaaaagaaactgatttacgttaggcaagaagggtaaaatgtcttggaatcatacggcagttgatgataactagcttcctctgtattcagataagtaataaattattaagcagaaaaaaatgtatttacttggcaatgctgtttacattttactagcttaaataaagtaaattgaaacattcaatattactaacgatatcacttcacttgcagcccttcgattgctcaaaacggaggacgtgtactcatccagtttctccggcggcctctatccgccgctcttcaatgtggttccacgggctcagatctcggtgaatgccacttgtggccagaacggtgccgaggagtactgcaaacaggtcggcgccaagccgtgtggcatctgcaatgcccattcctcggatcgagccaaacagcgctccatacagtcgctgatatcgtcgggatcgggatcgggatcgggatcgggatttgaagaaggctggtggcaatcaccaacgctgcagggtggccggcaatttgagtatgtgaccatactattggatctgaagcaggtaagtcaaacttatcccgaatggagtcccaactcgcggtgctgtcatctaagccatccaaaattgtcggggctaagctcttgcgacagacgagctgtgatccagtttgtaattaagccgctgagttgtcactcatttacaagcgatttaacgccagctccatgatccatcgttgtacatgctgtggtctgtctaattggaacttggaaatgtgatcatctcgccgttgagactggaatcgaaaccagtttgtagcctatgcagttctaatgctcaaaatggccaacataaattcgttttgatggcgttttgattaagtcatattggcttacatgggtgatattttcgtagcaactttctttgtcagggaaatagaaaatatgttttcatttccgttagttcttagccagaagataacatgcaaagataacaatattaaaatatcaatgcattttaacaactggaaattggaatgtttataaatacactctgctatacaaacttttaaatgtttttaatgtaatttgtttagtcacaaaacattacataaacatttcttccaaagacgattctaacacacaaacttaaaacagtggcccaattaaaatggcgtagacctcccagaaggcgtctgttacgatatttaatttcacacttgccgcggatcctcaaatctcgattgggtgctaatcgtccgtcgatagtgctaattggaatttcaaagtgcatccgaccacggaaagccatcgcatgcgcacatccccaatccaatcaattggctaataatgtgctaaacccaagacgaaaaaaacgaaacgggaaatgtgtatcatctgttttgcatcagccgacgcaaagttgacattcaagtgcggcttgcactcgaatcttccagtagatatatcaatgttttgatataattcccctcattgccatataccatattgcccctggagcaaccaacccaacccttccgggcacacaaagaggaaagaaaatgctggcccagacccagaccaaggcagcagtaaaggcaaaggcaaaggcaaaggcattgagtgtgcacttaattaaaacgagaagcagccaagaaggaggaggaatatccacagactggaagtgatttaaaattaaaaacattgtttttgcatatgcctcaaagtatgaaagatttatgacagccatgcgttgctctcggagtttattaataaattcctgcacgtctctttcgcaaaaggggcaactttatacagaagtatttaaattggtctcttcacttaattaatgctgacaatacttatttctagttgccaaactgagtccaaatataaatggcaaaccttttatggccttcctctatgcatgtatgtgcatgtatgtatctatgtgtcgaacgattgacacttttttaaagcaattgtgccatgtactacatttttggtcagacaacgaacgagcacaatatgtataggttcccatgatttttcagatatggacatagcggatgccgaggaaacgaagtcaaatgaggggcatgtgtcaaaatttacacgctctcattccgttgatttgcttgagtgacaaagaatattcacagcttgtcaggaatttttcaaaaaataattccttctacgctgcttttatgttatgaaacatttaatggaattttatactaattttttgtttttttttttttaaggcttattaaatttgaaatacactttcatttactcattcctgtgtaatgattcttttcccaggcatttctaacagctgctgactgtgccattcaataaacatcgacgaattagatgctcccctaacaagtttactaattagctatctccataattaagtgtgttgtgtgatttggctgtgaaaatatcttgtgcatttgtcacaactatttagaaacacattagagagatgtctccctctgttgctttgaatcccaatgccaagccaaccgaaacctaacacaatttatgaccttagacgaaacttgacattgacgttggtgtgtcgccatgttcatgggcgacaaaatcttctgggacttccaggcttcgacggattctcccccgttcccggcgtggattttaacaattagactaatcgagtgatttacaacggcaacaacgggcactggaacaagatagaaacgacaggcgtgtgtcaacgatttgacagcttaaaatatttctttccgcgctgggaaaaaggcgacagacttcgggcagtcctcgcagactggtcagaatcatggccaaagattgtccgtctatacatacatatgtctctttgccagtcaggcagtcagtcagtcaggcattcagccatccagtctgtcagtttgccagtaagcagtctgtcagcctgtctgttcgtacaacaatgtctagatttatgcttgaatggctttggggcgcgcgtgactaattgaaagtctagcgagaattctacggacaactcggccagtggctttaaaactgcggttctgggatacttcaaatattctgaaaaggaaagcaacatctgttgcaagcaatttatgggttgcaatacactgggctcgatacataggtagatggaatggtaggaatgcgtttgaaaaagtattctctagtttttaaagattgcttttgtttaatttttcttagcacagcatcaattttgaatgttaattatattttttaaataaatgtttagcttaaattaatgtcaatcgttattattccttaattctttgcttgggccataaaatcctagccatcaaagcattttaagtattgccagcaatctttcgaccagtttggcaaatacgagtattaccaatttgaaatgtttaatgtttgtttgtttgtgtatgacttttctatacagacatttaattgcttcattaaatttagccaaatttggccaatgaaaaaacaaactaaataaagcgcgaggggccggtcacttggcatcggctattggtttcgtaactgtaattcaaatgtttgacaagttgttgcaacatttgcagcgccaacagaagcaacaacatctgacggttgcaacaaacaaatgcaacaaccacgagcaaagcgtgctacaagccacgtacgagacgcattttaggcacagcaattattttaatggtcaatttatttatttgtttggcctgtggcgtttttcgtttttcccccgacattttccccgaatttgccttttaaagaatgcttcctcagttgcttgcatttgcatgaatttccagggattcttttttgtttttgttttggggtcttaacgtgattgaagctgcgcttgaatggttttcatgtcatttacgaggaagcggattttatttttaatggccaaaaaagctcagggcgtgcaaaagtaaaaaacgttttcgttaacgatgaaacaacgaattaacacaacttctctgagttatttaaaaaccaaataattttttacttttaagattatttattctaaaagagtaattataattgagctgatttcagtgacatgtgtacaaacatttgaggtgcagcaccattgaaaaccacattccattagcattcatttagagcattaagcacttgatttagtataccccacactacaagtgctacttgtacgattcgaataattctgttttacttcttaaagtccaaacgagttattgaaaactttgttcattctttagccgcattaatgcgcaaattttcagcgataaaaacttgtagcagacacaaaactttgcgattacttcagtgcgagcagccaaaacacgtcgaaaagtctgagtgaacgatagagaaaagagggaaaatgtgcaaaaatatacgagaaacatgtctgccatgtgggttcattcaccaagttatctaaaagcgtgccaaaaccaaaaaatggacaacaaaaaatagatgattctgtttgttccaatgggcaaccaaactgtatagtttggccaaaaagagaaattcgacaagataaaatgaaactaaaggcaagccctaaatttgttatcttttatttttaatttgtttctgcaccctgtctacttcaatttttcgctcgtttatttttgaaaattttacgatgctttccacgttctctatatatatattttttttggcaattaactgagtgtccgtgttagttttttggtgcctggtcgctgaggaggaagtttcctgtcggctatgcctgatggactttcttcattgagcgataaatatttgattgccataaatgttaattcgtgtaatttacgacatgcgatgtgtgcgcccccttctgccactcaaattcgtttatcaactcaaattaccccggcaaattggtatcccatttcgctgccgcccattcccattcccactgaatattttaacaattttgttagtctctctgtgattgggccttatcagttgacaagcatctggcaacaggtttcggtgcataaacaataactcactccctctgacgaggagcatccactgaccaaatatttatactaagagtgatcttcatcgatcgaggtccgttgtaaacaagtttgctgtgtccgccgtcaattggtcgaaactgataaaaacgtcaaagtgttacgccggaggccttcacctgccgcttcttcgattgcaatctacaacgattttcacatctccacggggcaggagcacaaggagtccacgtcacatagttcgcctcctttatctggaactcgttttcaacagactccaaaggcagcaggaaatcagttcgggagcacggactgctcttcagctgattgcaatcagagacttggacagaaattctgatgggaacaacataattcactagagataacctatcgccttaattcgagtgtgtgaaactcactggctccttggagagatagcggaaattcgggataagaaattccaaatgcgggtggcgatttatttttggcatttaagagctagttggtgtattttcaatagaaacgtctacttattttatttcttgtatttattacattttatagattacatatcatttgtattgacattttcgaatatttctctataatatttgaacaacctggtatcctattcggcttaagtagtcggtagagctaatcactattaacaacagtgttacttgctggttgatgtttataaaactagttgaagttttggtatgtttttggttcttcataatatattattggaacttgaactcaacttattgaaattttattcttgtttagtgtggtaaaaatttaattttattatacagtgaaataggaaaaaatatcaatagacatggattacttggcattgaacctttacacagatgcagtcgataactctctctttatgtcgtaaattaaatatatattacattcgcattcatttttaaggcattttcggaatgccgcgttgcttacagagatatgaggtatatctaatatgtatgcattttatataatgcattaactttccttatcttcttcctagttattttaatgtttgatttctttagttatattttaacaatttaacgaaacaagtaaaacgccacttttgtgtttcttcaaagcactcggccaagttttaaatcgcaaccaggcccagtaatatttctgtttaaaaaaaaggttttcttatgctttattatacagagatttgtaggaattttttattgtactgaccttttcattgaagttgtgcttaattctggcatttacagcggccatgacttttcttttgttaataagttatccgaactatttcattgctagttaaaaactgcgaaagaaagtctcctgctcgccttatttatacattttcatggtcatcatgtcgactccataatctttgtgaaaaactaatctattttgtctgctaattggcgtcctgattttatccttaagtgtcatattccaattttataagcttgtccagctgcaggtcctcaaatttaatcaacaaggttagaaatagtattctgcaaaagaaaatcacttaatcctttaattcccacagtaaatatgttcattaattgccgcagaaagtaaatatgattgattatataagatagatggagaccaatttatatacacttttgtgcttagttttttttgtatatgttttaatgttgatttcacttctccatattcccgcttaaaatccccaagcagattaattttttgccgctctcttttgcttatttatttttgtaatcttatcagcttgtgacagacgtcgttgttgctgtaatcgaatacaggcggcattcaataaggagaacgcacgcatgcgcacaccttttttccaattttcctccaactgtcgctggcatttgacttcttgtgtttttgcattttatcagctttggaaaatcgtggaaaacgtatgtgtgtgctgctgatgccattagctacttactgagttgtgggtaaacaagtggctttgaaatttgatagagttgtttttggatatgtgtgctgcaccagcaattgctctcagatatcgttttctgatttgcctccggagttaacttgcactcgcgatgactagctaaaaaatggggaaaaaattaaaaaataacgctacatatctggttagatggcgccatgtggctgctctaagtcaatgcgtcgtaatcaattatacacctggccacaccttcgccacaagtcgcccgtcggaaaattcaattgcatgccttttattgatttctcattttggcctgccccttgcttttggctttactgtgtggtttttttggccactgatcttcgataggcgcaacattttcagcgtctcgaacacgcgacgtttttggcatttggatttggatttgatattttttcctcctcttattttaaccgaacaatttttccgaaatatcgtttgtcagctgttgctgccggccacgttgaaaagagctacagttgggcggcggttttggagggttgcggttggttgacagttcgctagatttatgacgcggcgatggcaatgttggcttaaaagattttgccagtaccacacgacattagcgaagatatagtcgtagttggttggttggtagtcatgcacagatgcaaagatatacacatacgcctgcgagtggatagaaacatcagttggtgacagaaacactgacatttgggtgcgtacataatttattgctcatttgcccatcggctattaaatcgaaatcctgaggtgtgatggtggtttgttgatggtgggaatatccattctttaatcggtaaaagttgtaaaaaaaaaacaataaaaaaaacttttttttaagatagtattttttgtaacaaatgtttaattacttttttaaacaatattcaagccttatactaatgcgctaaaactcttctcttttacagacttttcaaatattttccgtgtggctaaaatcggccaactctccgcgtccagcctcatggatactggaaaagtccctggatgggattaactttgagccatggcagtatttcggattgagcgatgcagattgtcagcgacgatggaatttatccgggcaaaatggcaaatacgtcttccagaacgatacagaaatcatttgctccactcagttttcgaagccgggtcctttggagaacggcgtcttgcatgcttcgctgctgaagaatcgccctggagccacggatcaaagtccggagctaatgaagttcataacgactcggtacataaggattcgcctgcagggcatgcactccacggccaatcaggacaacagtctggactggctgctggactctccgtcgctggagaagcacagcttctactcgctgtcccagttgaaggtgagtgcccgtctggattgtaatgggcacgccaatcgctcccacgagtcgccagatgaccctctgatgcagtgcatctgccagcacaatacctgtggtgctcagtgcgaacagtgctgtccgcttttccaggatcgcccctatcaaatgggcggagagtgcgagatatgccaatgctatggtcacgccgagagctgcacctatgatcccttcctggacaagggcatttgccagagctgctcgaataacacggctggcattgagtgcgagttttgcgagatgggattttacagggagctggatgcaccgctcaccgatccctgtttgccctgctcctgtaatcctgctcgttccacgggtggttgccagtcggatggaggaagctgtaactgcttggagggtttccagggcaagaactgcgaggaatgtgctccgggctactacggagacgattgcaaacggtgtgagtgcgacgaaaggggaagtcttggctccacgggttcctgctcgggtgtgtgccagtgcaagctcaatgtggagggcagcacctgctccgagtgtgcgcccggatattttgatctaagcgcagagaatgcagagggatgcaccagctgttggtgctcaggtgtctcgcaaacatgtcacagtgccaaactgcagacattggcctttgaaaccctcaacgattggaaaataaccgatattcaaagagtgaaaccaatttcaataccagttgatgccgaaacaaaccgtttgatctttgccaacgaactggatgaagtggaggccatttactggcaggcttcgttgggttacttgggaaatcgcttgaccagctatgggtcgagactgcagctggtgttgtcgtgggatgtgataagaggcgatagatcgggaaagcccacgacggggcccaatgtcatcctagtcggcaagaatggactgaagattgccttcggcgatgaatccttggacggattgggaatcaacttgaatgtaaccctaacagaggttggctggtatcacgtgccacccactgtcgttgatataaaaacaagacttcggcgaaccgagggcggtgactatcacggagaatctgttacccgttcccagtttctctccgttctcgtttccctcgatgctgtccttattagagcggcttttcacacggatcaaggggaaacatcactcgagagagcagtcatctattcaggaggtgtggagttgggcggaaagtcttccagccaagtggagcaatgcctctgcccagctggctataccggtctgtcctgcgagggctgcgcctttggattcaagcggatttacgagaacacctcggaccatcagattctgagcaagtgcatcccgtgtccctgcaacggacactcaaactcctgcgatctgcagagcggaaattgcggcgactgcatgcacaacacttttggagatcggtaagtaaaaaatgttataatatttatttgattttccgaaaaaaaagaatgtgtcttacatattaatcagctatagctaaataaatattaaaattaaattaaattttatttgttaaaagcgtagtccggacccaaacctaaaatcctcccattgcaaaatgcaatccacagaacacaatccacacccagtcaagtttcatacctttgcacagagtggtgtcttcactaattcaccactcaaagccggggcacacaccagccaagacacaagtcagttaaaatttaaaattctttattttcagttgtgagcgttgccagttgggttactacgggaatcccctgcagggaacccccaatgactgcaagcgatgcgcctgtcccctgtccgaggattccaacaacttctcgcccagttgtcagctaaagagctacaactacatggacctgaatccgcagttcgagctgatagagcatgcggagtacatatgcacccaatgtccggaaggttatacgggtgatcattgtcaggtgtgcgacgatgggtacttcgggaatccacgccagccgggaagcagttgtcagcgctgcgattgcgccggagggccctgcaacgtgaccaccggggagtgcatcacgtgccgcggaaacacagagggttggcactgcgagcgctgcaagctgggctactggggtgatccggccgtgggctgtgatccctgtcattgccacacggaaggatcggagagcggactatgcgacagcaccgatggtcaatgcctgtgtaagccacgttatgctggacagaagtgcgatgaatgtgacgtgggctatgctaatgttgagctacgctgtccatcctgcaactgcgatccattgggctcgttggtccaggacagatgtgatccccacactggacaatgccattgtaaggagggcgttatgggtgccaaatgccacgagtgccaggatggctacttcggcatgaatgctgtggcctatcgaatggatgaccttgctgcactgcgtcaaaactccgatagcgacgatgacgaatgggaattggttccagatactgaagatcccaatagcgaatccacggtggcctgcgagggtaagtaccccagattagagctccaagcgtagcgtctaagaacaaagaaattcctcgaaatgagttcactctctctgataaattgagtgcacctatgaaaaacagatgtggcagaggtggtcgggtagtccatcaataacttggaaaacataattaaattggcgttctactttgtgccgttaagtgaagcgtttctgatgctctccattggccccaattcgaagaacttaatgcacaaatcagtcaagttctgggtgggatataagtgcatctgtttctaggggcaatataatgtggtaatattttgtttctgttgtaatgcacattatttatactgcatatacacaaaatgggtgtttttttttattatttagatcttgttatatttaactaattcttccgaatacccagcctaatcgaaacttaaggcacattaagcattgctcaattatctcaagcattaggccacaaaattacaatttttcctgaggccatcagcatcaaattcaactcatccatcatacaaaatgcattacatacacaccgtccattgtaatgggatattttcgttatccagttctccttgaagttgggttttctatcttttttaacaccatttacaaactggacaatgggcaaaaacccgtctcgaattactacttcgttggttatgaaaaccaaatgcggctgacgagaagaagatgtttattgagttgtacttgaacaagaactcggattgcataacacactgaaggcctattcttttcatttaaatttacctttgtaagcgatattccttgaggttttctagttgtttctcatttttctaattgtaagtcagacatctcattgtactatgggtagatgccccttttagctaaaaaaaacatgtttttctttttaattttgctgtattcgtttatccgcagtcattctgcaaattttactacctttaggattttgcaagagtcagaactgctattactttttcgttgactatgtgatggggctcactgcaaaggattttaaatagttttttaaaaagaattatgctttgaagaaaaaataaaaatactgtacaccaaattcacttaatatttgctcttagtgttaaactacaactggtaaaaaacttttgcagtatctgaaaggttatataaggagtaagcagtaaacttttggatttaatgccaagtggacttgaagaaaatattcctacctataattacacatttgcatgccgacttgggcaggcacttgggtatttggcatgacagaaacccctcaagtcgccaatgcgaacacagtagcacgtgcgtttggacttaagctcgctgggaatttataacccacgcattaaattgtgcagctatctaagaaattaagcagcaaactgcgagatacatttagccgctggtcatattttgtaatcagttccatttgccgctcaccaagcagcagcagcagcaccgcgagcagacacacttttgtgttgaccacagactccggcacagacagcatggagccaccacctcgctggtctgctgctgtccagttttaagaccaaacccaagccaagccaagccaatccgatccaagctagcttggatccgagctagccactttggcaattcaagccaagcggcatattttcatggggctgaggctgctcttgtgcatttgctgttgtggccgttgcgttgacatttttatggacatcggaatgctccaaccgccgattgactctcaggcggaccccaaaaaacaaaaaaaaaaaaaaaggccaacaaaaatcgtggccactttgactttgccccttttttcgtttttagccaactaactgattagcgaaacaatttcaaatatttgtgttaaataacttgacaattaattgcatttcgtggatgcggttgcgtttgttgtggtttcaatgggtttgattattcgcatttggcgatggggggttttcgaaccaaatgaagttatacgatttgggagtacattttattgtggcattggcggtgcgttcaaaggaattaaatagtaggataatggagattgctgctgaaatggagagagagagctgataatatttctaggaatgaaatgaaatcataaggtaaatcaatcaaatagttgtttaaatggcatatgcattcaagactttataatgatccatctaaaataggcacatgtgcaaacaatttcaaacgattcacttggcaactaggccaaacaattacaaaattaaactcgttaaaaagaaaaaaaaaattgtaagtggcgcagtatctttttcaccatgcaacaacgaagagtctgaaaaattgccatgaaaaaagcatctttatagacatgacgagccacgactcgttaaacagacagacggactgtccaaggtaatcaagaagcgtctaaatggacaaaatggagcaacagccaccactagttgctgctgtcaacgcatcattcgaaatggagcaagaggatccaatcctcggaggcaataaatttcaaataatttccaagcacggacaaacaaatgtgacataaatcgtctggctaacggtaacggaagcatgcaaagccaaaacattgacactaatgaatgtggccaacacaaatgtaattgtcgaatgacaatttgtttacaattgccaaagcaaagcaactaacgttggtatttattacttggccgaacgatcgtagaagtattttgactaacagataccctttagctgtgataacatattatgaacacaaagtgacaaagtttgcgaaagacgaaacactatgtttcaaattatttgtatttatttatatttgggtcacataaaataatatcaaacagcatgtgaatcaatagtcttttcaactgcaaccaggtcattatcgaaaacactttttgccgagccggagaagccagaagtttggcattttgattttctaatttatggcccagactttcgctccaatcgaaggcccgtctcccgatagccgcccctctgctggccatcaagatcccgaattgtatctatatctggttgcctggttgccatgtttcgctatcgccagcgtccatgtcgtcgtctgcttctcctttttggtcgtggtgtgattttaattgctcttacaaatgttcttcgtcgcgcatgcggcgcaaaactttttcgagtgcaaatctatgtagcccagcttcgagctgaaattgggcaagacaaaagcctagccgagatttatagcctatagccagtcggcccagccatatgtgcgagagggaactctgtcccattttcggggatactgcatgcaacgttttcattttagccagctcgtgtgggtagtagcattagaaaggccgcatgttggttgttagattagatggtacatttggctcaagcgcatatagatatacagatgcctttttgagagtctttaaagataaggcaaaacgtattgtttccaatagatacgagtatttcctgttaatagccttgctgtaaacaacatactttatgggggtagtaaaccaatagaccataaaccacatcctctcgtaaaatctcattattgaaaaattcatatcattttgtcagttaacacttcgcatcatttggtgccactgggtctaaaaattgatttaaatacagcagccagtaatcagcttccttgtctattgcaaaagccccacaatgccacccaaatgaaaagccattataaataatcttccaatcttgaaagaaaaatattaattagaaaataatactctggcagtgtcttttgaatgaaacccaagtcaagcgcatacaataattaataaattatttccagtcaataaacttttcagtctctgcgcattgcaacatatattttcgtcgagactgcaacttggtgatttggtgagggggggggggggaagaaaacagccacagccaaccaggcaccccgcggatgagcaagcgccgcaccacgatcgtggagccgcagtcgaagtcgccccatgtcagttcattagggtcagccagaggagacctggcaaatgccgagtgctgtgcactgagtctctgtcttggcggttcataaaaattagttagctataaaattagtccggctgtgcaggaggcgggcgggtattcagttctcgtaaaatcaacacgaattgaattgcactccattcatggaaatcaaattgcgttcgccgttcaatatgttcatattttattgctgccacaatttgtgaatgggaatcaaaagaacgcaactcgctgccatcgcaaaactcgcttcaccgactgtttattaacactcgggaattaagaaagtgagaagcaggtgcgagccttgtataaatagatatctctgggcaggtgagtttggacttcggtgtgacttttagctgctcgtaaaccgaaatctcccaaggagatgcaaatgttctgccagatgatggaaagattgggggagaagtgaattgagtgtcattgacaacagagtgcttcatttgatggctcctggggcaaacttcccatggcaaatgtacatatgtatttattagaaaggagtgtgtgggaaaatgtgttgaccatataatgcaaacctcaacgggctctatttgattaatttcgtatattttgaacgtatataaaccataaagaatgtcaacactatatttcagtgtggttatatgtgataccatcaaccactactcatcccagactcttgttagcacattccatggccacacgattatatctcccgcgattcccgacagccgtagcggctgtatattattttcctcactttcctggcaaactttccttgtcggatctacaaaatgcgccatactttccccagatctagtgagtgttggtgaggaaccttctctaatctaaatgacaactagttggactctggatcttcggtgtgctgcccgaggacatggcaagaaaatattttggtcttgcttttttggttggtggcttctaacagcacattgattgattacaaaacgtgcgccaagcattttcacggcagcaacagcaacaaggcaattgtttttcgcgctgcgacttttccacaatggcattttcttcatttgcgcctaacaatggcatcactttgtcacgatttctgcgctcacaactaacaagatacaccggcaacatgttgctagatggtggatgttgcctggtgaattcattgcggctgctaccatttaatgttgctgtggcagccgctgccgttgaattatcaccgcgcatgtgtgactaacctcccgaggcggtggacaacaaaaagccaggatccgccgtagtcgctttttcggctttcctccagaggagtccccggactccaagagccaacctgctgctaatgtttccccagtcataatttcagctgccaactgccgaggtcccagagtcccgaagaagacgggggattcctttttttttttatttatgaaaacggcagatggtctgcccattctcctccatctggtgatgatgttgccgccgtggctactgtggcgtctttgaattttgaccgtcagcagcagcagcggcatgtggcacgttaatgatcttgttaccctggagactcgactccgttggacccttttgcataaacccattgaacgaggtgtgcagtgcaactaacgagcgttggctttggccccttttctccgcttcaatttgagtgcgacgaagtgtgagatgatgaatctgtgaatcattaatagttggggttaaagttctgtacacaacgagaatgtggtatgggacctatagaactaattgtaattattctcacgaacatcatcatcatatttaatgagctgagctaaggtgttgtaaatattaattgtcagaagataaagttaggcacattaataactagagagtgtacaataattaggtaataaataaaattacaattcaattctaccatacccctcatttccaactcccctcagaactttaaaatgccctattggcaattcattttgatcgtgtttcatgctctggacgattagcacatcccatgttttctccgttgcggtttcacttgaatttgtttagactgctgcacttccgtttgccgtctgggatttgtgtgccagctgcagctgaagtcatctgactatgagggaaccatcacaactttcagattcagatacagatccagatccacttccagagacaccacgacaatttcagcctcctggagacaaacagacacgacacgtcatcagcttgacatttaaattgtgctcctgataaagttgccaacattttttatgacacagccagaggaaaaggtggggggataccatcgggaatatggtccaaaagttggacacattgttggagcacacaatgcagcttttgtggtcgacagtcgtgtatccaaagagttttgcagatcctcgtgtggtcccaagaaaaatatatattacggccgacaattaatgtcagctcaggtgacagctttttctttattctcgtcggtacttttacatggatatgagtttaaacagactagatttgttaactgctttctggggatagtactggggttatttttcgcacactttacaaccaaataaattagaatctcaaactaaaaaagaaagttagatattttataccctgttgaattattttaataataaatgtagcgtgcccgttagaaatcttttgtagctctattccaaattggaggcccattcaatgagcttgagtcattcagaaaaacaaaacgcaaacatgtaaatatccagttttcattttatggttattagaatgctttcaaagcatgccaagcacattaaaatatcgtaaaatcccataccgaagtagtagttacttttagtacacacaactctggagagctgaaagttttgctgtgccattaggaggctgtatatggtgatctcccaaacatgtcaaatccatttagatagtgattgcattttggcccagagcatcgtttgtttcattcgttttttttattttagtgggcgttcccatctttcggactttcccctgacgcgttcaatcaatcaccatttctcacagaagtgcacgcaaactgaagtcaattcgaggcgtttaatcaatctggtcatgtaaatagtacgcctccctcgatcctccagtggatttttagccatccataccaacagccttcttcgccatccgcctcgttgcgtgagttgacactcgaaaacgtaaatcacaagagcaattaacaaggcaaacggctaggatcgtcaagccaaccatttgcagttggcatcgccaacggaaattgttgtttgctcaataaaagtaaattgcaattaaacagaattgctaatttcaatgatgacaggcgccataaattggtatctgtttgggcggaattttgttactggatggtaatggattcggataatggcagtagaggagctgtaaattgttcatgattaactttcgatatctaatattattgtcaatgcttatgttttaaatgcaactaaattgcaaagtcagttcatgatcgtggtttttgctgctataaactttcgccttactgcaacaccttctctcactgcgtaaaacaaagaatttgccgccaattttagcaagttgttcaaaaaaaaaatcaattaaaatcaagacgacagctgccgcagcaccaaaaaaaataataaaaacaagagagaaccgcaacaagcaaagccaacatttggccaacgtcaaaatttaatgcatttgcacttgacacgcaaaggaagttgcaacagttgcaacggcggcgcaacaacagttgcagccaccaaaaaactgcccatggccaaaaacaaaaaacattgactaaaaagaaaaaacctggctgtggaaacaagatcaaaaggtcgaagattgcgctaacccggggacgcccactttttcgcacgctccacgccggatacgcggatacgtgtccatagataaacatggtggatgtgtggccgggtgtaatctataaaagtgccaggctttggatgcgaatgaggcagcagacaaagagatatcccaggggaaattgaaaaacactcgagagccgctggtgaaattctatcatcaataggtggtgctgtggtttaaaaggatgagggggaggaattggtagtgttggggtatttaaaagtgagagaaggtgcatgtggctacagggttgtcaaatataactctaaatattataaacacagaatagattaaaaatattaatatttttcatgcaattcgcagaggagatacaaggaatgcactatataatctggtgctgataaactttacttattcttaacattttttgtttcaaatagttcctataactacttgtgcatactacacgtgaatataaatgtgtataatgtttaacgttatcgtcggcattttaagcaggcaccgcacccagatggtatttataagcgacgactcctgacaaccctggtgaaagccatgcgtagcggcccattcagctggcgtatcttcttcttcctggacaggccgaggccaaaacaaccaataaatagtatcaatcacaaatgatcgcaaacgaggaggccacggctgcacccagcggcactcagctggccaaacttgcagctgtctgtggcagagaaggaacgttccttctcctcaatccgtagatctttggcttagcacaacaaataatgattcatgcgagaaaagtagcggcaggaacaggttccaaagtttggccccaaacgagactggggagaaagggttggctgactgggagactgggagaccttgcaaccagagttggaacccctccacccgatacgattcgatgcgatccttttgcggcacatgtgcatggcattatggttcaataggtcaacgatgcgttgaatggcgaccgaggactccgagaatgggaggccgtaaaagaaaagatcattgcatgaagaattacggtgaggcacgtcaatcgtcaaaagcgatctaccaaacgagccgtgtaatagacctccagaacgagggttctcctggagagcaggagcaggagtaactggaacgtattcccaactccataaccgattgcgatcgcagcaaatcagagaaaagttgtcttaagcgcgactcgcgtccgttcttcttctccaataagaaatgagaaatgtgaaatgaggagtgtgtgtgtgtatcttgggaccaccatggggaatttggggagacgagatcgacgggcgggaattggggttcggttcgcagtttgtcaaaaagatgttggcgttttgataatttgctgcacagcttagaagtctgtgtgtaggatttcctgttttcatgcgactaaactattttttatatatattttttccattttccctgcttattttttatagcttttctttcactcttctggcggaaccgcaacaaatctgcggctgatttaaatctttgcatttactctttgttaccttgcagttagaggcttatgagatatacacgtaggggtctgcgagtatgtcagattttatttggaattttagtaggcttgacttggacatttctggcgtaaaatctgttaagtgatttcctcgttaggtgtagatcgtattggattaagtaactacaagaaatgtagtctaggttagaccaaagtctatacatgaatattaaatttgttattgactataagctttattttaataattagttttgtttttgataacttgaatacctctaaccaacactttaaaaatttcgaaagaaaagaaaacaaatgtctagtgtctatagtgcactatctcgaatccagccctttgaccttgttttttacattatcccaagaagtggccatgatttcagaaatactttaagctatttatagacatttcatatgggccttaattgtttcaattgtaattttggtcggctgccgataagatcaacaaagtgctttattttcggctgcacttcggcacgtgttgctatgtgggccagagtatccaatagtatctggttccagatcaactcccccactgcatgcacttctggattcgttgaaaacacaccctaacaatgcagtcagatactgtgggatcttaggggcgtattttgcatacgtaatttcatttcatgggtgcctaattaagttttctgccttgttcgcagcaattcaatggaattagaaatcacaaaaatgttaatattaggcttttcattatgcgacactcgtccgattatgggccataatttagagcaagttttcgaatttttccagtattttgttttttgacatttttatagctcacttagacgcagcctaactaattggtgacaaaaaggttacgaaactcgacgagccacatgtgaaccactttggcgcagtgatcgttttgcttttcaaaatgcttggcacgtttccaagacgatttgctatattggaaaaagtagccgaccatcatgagatcgatgaagaggaagacgaagaaaggaaagaaaaatgaattttcccgctgccactctgaacacagaatgcggacacacgcagtggactcgaagttggacttgaaccggctgcattttttttatttttttgctcagtgcagcggcaattaaaatattgacagctgtgttcatagaggggaataataagttttctatgttagatttcacatgcataatgcttatggccatcatttgaaaggcaccctgcggttggattttggccagaaacgaaaggttaacgtgacatgttcatgtgacaatgtcaggaaaaaaaagcaaaagaaaaaaaaaactgccggcattctgtccgtctgaagtccaggctgtccagtctgaagcgcataaataactgcgtttgtgacatggaatgtttgtttcgaccaagtgtaaaaggcccagtcgtaggccagatctcactgcccgccagtctggccatgtctggtgcggattgccgggatagccggagtatctctcagccaaactgctgctggtagcaaggtgcggtgcccatatgcagacaacccaaaagctatttgtagcttgtagctcactggctgattatggaaaaattgctagatgttttccttgagtcgctttcttgttagaggctttgccgagtcgtcttcagactcttcatctcgtacatttcaccattgcatcacacagacaaagaagccgctttgaagagttcagtgggatgctgttggatacataatattctgtaggtagggaatggcatttggtttagatcactggggattataaaaagcctcggcaaacggaatcatctttgccgagcccaggctacaaactggtatcatcagcctaattaaagggaacatttttgactggaatagtctctttacatcacattgtttgtagataatttgatcgttttgtgttgcaaaaagatatcatattctttgttataaatcataagccagtcttttgcttcagaaactacttacagacacttatgcaagtacttgagttttgacaactagtcggctacgcatttttttgcgttattatattattattgtattattatacgatattatatgtatattgttttatattgcattcttaaagtttccatttggaacaatgttcgctgatcttaatccttaaactacttgtcttatgctatatttagccagcactttacatttaagtttaactataaggcctgcaacaaatgttgctaagcctcagatacattctggcagtctcgcaacatgattagaatccaggtttttgaagtatcccccaaacattaaaaccgcaaatgaggttccttttcggtgactctacacaaaaaaaaaaaacaaaagctatagctaaaatcaagaaaactgctgctaacaggtgaaagatccagagctccaaagagtacagctggctaagagaattaaaagggagtatgtgtggcgaagagaatgtaaagcgcacgaagaccgttcgggtttctcaaccgagcgccaagaaaagactcccaacatcgcggtggaaactcgaaaagtcgaatcagttgcaatgggacgacgcgcgcgtttggattcacggaaatcgacggcgatcgcgatcgtgggaaatttttaaagcccggaaagccccgagtgcagaagtagatccaaagaacagacttttttctttgtatttcatatttcgtattttattcgattttttgtgtgtgttgtgcacttctgcagaaaaatcgattcagcagtaaaatgttgacattgattttcgtgaatttcgattgatttccaccggttctcggacaccgcgcacgttcggaaaattgatccagaccagcaacaacaaaactgggagttggctgtgagcgattggacggattgattgcttgattgatctatttttgcacttgatttgcgacgcacgcgccgtaaacgcgacgtgactggcgcttcacttcacctgaagtttgaagttggactccgtgtgccccacctcgtccacctttttgtggcccctttggagccaaccgattcgcctttttgtcgggggcaattatgttgatttgtgcaccgcatcgtcgatttcccaatgttgataacgaaaaatttgcaatgcaaagaatgaaaattgatttgatgatcgcgcatcctggcgcgatatcgtctaatcgcgacacgcccactatttgattatagataataatgtgtgtgtggttatagctaaaggtgatcattaaacaaagaagtgaaaaaggaaattatcaagtgccaatgcaacgtatataaaatgtgaaaatatcgaaaataggtgaataatattattataagatgttgcaatattttttgttgataggttattgcaaaaaggcttgcatcttatgaaaaaaaaaaattattatgaaaatagaaagattttttaatattgcagaaatatttttaattgtccgagtatacatgcatatattgtcatattaaacatggatcaatttagtttagttaattagtaaatcttttcaaaaaggtcccatagaaatttgttaatgtttcagtattatagggcctagtttgtaggtttacgatttgatgttgcccatggcttcatctcgttatactaaacgcctcttcgctttcggatttacatatgtaataaccgtcagattagttttaataactagcctggctaaagagagacacctccactggaaagatggcagtggaagctgcttaattagaagtacaaaatcagtgagtggagcgctaatagccgaaatgattacgcaaaagccacaaagacccataactcattagctgacgccccagaggtccgaaaaatacagattcgtttggtggaccagccgctggtcttgcaagtgatgattggactgggacatcatgatgattaatgggatgcagcgctgagagcagtgagcagatttatggatgagcagcgtggactttcttgtttctggttctgggaatgctaatagagttgcaacctggggcgcactcattttggcccccttttatttccatctgctcggcacatttctcccccacgccccggaaacactcacagtagttgccttttgtctaagaaacactattcgtttgccaagccgtagataacgtttacaatacgctttttcccctcttgagatgagtttttccatcagcagtcgacaacgcgcttcacactcaaaggcagttggagcatgtttgttcaatgataaatgtggaatgtggctttttaaacatgggcaagccctccacgatgtcacattcaaatgattctaggctacgattgcaaaacgaaggcccagttttacttacaaacggttttgtgactcagcgaatgggcgcgtgttgccaaaacgcaaaaacagggaacccagagggagccataatcaaaaggcggtaatccaattaaacggctccgcgtcccaagaccggctgacccaattagacccgctcctcgatcgatctggaggatcatcgtcggcgaagtcgtcgtcgtcatcgcttcgcatcgcatcgcatcgcattgaacttgaaagcggcggcgcctggccattgttttcctactctcagtcaagagactcggcaaaaacaagttcttactcccttaataaaagatcgcatcgggttcgatctaacggccgccctgcgagactcttgttcggcgtttcaaattgtagatcaaagatcaagcgaaaaaccagagagagaaaccacaaacaaaaatgcttaaattggcatgccaatcgtaaagaaaggcctgcgggaaatcgaagtttgggtaccctatgatttcaatcccgagatgagaaccatcataaatgtgatcatgagtcttttgatgatcatttattcagatttgtacgatcaattgatgacacgctgtgtagtcgtcctaagttttcatctttaattctatgagtactaaaatgtatttatttcgttgcatttattttttctaaaggttctttgcttccttttgttcttctttaagatattcaatgatcatatcgcaaacgaatcgatcagaggacctcccacaaaaactgaggaaggcacataaatcttaattgctgatcactttgggttatcttatctctgacacgcacattgtttttgtcccactcgaagatcaacttgtgatcttataaaaactgtgcatttggcacatttagattccagtttcaattgtttactcaagtgcgaccagacatatggaagtttgaaagttagcatctggtggtcagtcagtcgggacaagtgcaatcgagctgcacaagtgccgtggcatattgactgggtcagtcagtccgtgatatgcatatgagtgccactttctacactccatgggaagagacccatagccacgacgatgcacaagattaatcagttggctaacacacacactcacacacacatagggcctctcggaggcgggggacacgatcattgattgttatcgagaggggcataaactgacacaaagtcaaagtcaaagttaaacaatgcaaacagcttgaactctggaccagacgaacttggccatccaatccagccagtctgccaattcccgtagtcacaaaggccaactctcccctccgatcatgctgtgtgcgatcttaacaatcaagatcaatatcatgcatttacaatgtacaaatattgccttctcttgggattcgtctggtggaagactcctaaatgctgcctaaggtaaaaatggctaagacaagtcgatgcaaatacgtcttcgtcgcaatgaaactgaaatactctagataaactgggaatacgtggttgggtccttgaaaatcataagttttagcaaataaataaaagcatatttcaattttattttaaattttaactgccagaataggtaaatgtttgaaaactaactcttgacaaagtttcaccactccttccttcagagtatgccatagattatgtacaaaacaaacaatcgattgcgttaaagtggaaggagaatgttaaacaaattagcctgaacctaggaaccgggccaagaggaatgtggatgaagcagtcattggctggccggaaaatgctataattatgcaattcctcaaaggcgctgacggtggtccccgacatcccaggccggtcaccacaactgcctctttttctatacccactcccctgggtttggttgctccagctcagacatataatctgcaaacgattcgcgttttgggggcctcagaaattattgactagccgtcatgggttgaggccttcaagtaaattgccgtaaatctttatttgtgcagctacttaaagaccatgtcccgtcccccggagagatctcaaatgcatacatatataggagtcgggccttaggccggggttaacaagccggcagcgattaagtcatttcttatgtcggttcattatttctatttttcttcttatttttttttttttgcatccattgcatgcgtagctactgggcttgtctacctcccagtttcgctcctctcggccaaatgccttgcaatttttcttggtctaagcccaaaatttagagagttacgtgtgtgttggaaactcgtttcgcccagttgattgccaacttgcaactttgttagtgaaacatttcgttgctttgcgcatttatcttgacaatgagcgcctggaaattgtcactcgattcggctccttcgaatgtgctctaattagacgtgacaattctacgtaattaggcggcgggtcgtcttaacactcgactgattttctggagggcaaaacaagaaagcagaagcgagtatccgatttctgcattcgaatgatttgggtgtttaggaatatttgataatgggcagtgacagttttgcttctgtgttgtattcactgggtgtgtctggacttcagaagctgaagattctctacaaacgaacattttaagaaatgtttattgtctacatattctattttacattcttttctacatggactcacagctttcacatttcctgcattaattctcacttttggttaacagtggaacgacttccgctatcttttccatgccattaaccagcttgcaactttgtttttatccagccactcacatctatattaaatgttgcccactcaaggaatcgtttgaacactttgcacatgtccaagtgttcacaattcacatttcacaccacaagagccgccgacggggggaaactcatcatttaacaccttcatctttcgactccagaaacgaagccaacggagagcggaaaagtgccatggagtatttgaatattttccagagctcggccactggagcaaccacccgctgacccgtttgatcagtctctcaactggacatggccacatgttgattcgcagatggcagtggttttcgcttcctttggtctttcctttccttggtgtttcaatctttattgcataattgcaattgaattgtttatcgagtttccatttcgtttttcacgccgtaaattggaaaatgtggtaatgactcaatgtagagcgccgtcggctgccagatcagcaaacatattcccccataaactaaccattcgaaatatttatttttgtttcacttttatatcggcaaaatgaggaagctattatctagttcagcttgttgttgatcagctgtttatttctttttgactacatggattgtgaaatgcttcagcactttcttcatatatgcagcgtcacgcagcaggtgattggagaaaggttgcccataactcaaaattgggtcatggaaatggggctaatatttattgttcatgcaatcaggaagttcttgatcaatatcaattaataaccattaatcgttaatatcacatattgtaggaaactcacaaggaaactttagatagttttcgaatattacctttaaagcttctaagtcatactcgactttctttttggggtttacccacacatttagatttattcagcttaccgtgaccaaggacctacccatgtcagaaaatattgtactctttcagtggtacacagacaactcgaagcattcgaaaaaaaactggtcgtggcccggccgtcagattcaattaggtccaatttgaaaaataattatatacgcacagagttctgacatttttcgaaacattttacattaatttggcactaaactgtcagatgtggaatgccatggcactcaaatttacgccgaaaggtaaacggcccaggtactcgtaaaacggtccgagattcgaaacttttgaacaagttttcttcaaatttaattgtaatgtgagaaatttaaattaggtagccaagaggatgctcaaaaaaatgagcagcaacacaaagccgaaaaacaaataaaaagcccagactctgacaatgactaagaaacctcaaaaagcggaagatgcccaaagaaaacaaaaattatgaaaaaatgtagctcttttttcagtggggtttgttcagaggagttgaaaaaaaaagatcaaataactgaaagccgccaaatttcaaaggaaaacaaaaacttgttcacttatttcaaattttgttgccttttcaactaattttccacttgtgaatatataaagtgagctgaggtgcctttggcttgggttcaatttatggattgtccatttcgctatttgtcagtcgatatttgattatttacgatccgctattcatcagtggatttcagtttgcgtcatttgcctttttatagatcagcaatatcaaacaaaatcgccaggcattttgtttttcacagcttagcctttttatatttagctttgaaaatttattacatcacgatcttaaatttgtttcctctacttcaatacatctgtgggttcatgggttcctcgattcgtttgtagttttatctactcgtgtgtgtacgttctgaatgcgaatttgtttgcagctgggtttcctggaaaatatttatttcatctagcggatgcttcagttcagtgttctcttcccactgcgatcccttttataatgaagttttcaagtagaagtttatgggatttgcccagcaaatttatgtcgttttcttagccatatttttgtttggctcaatgcgttctaatttattgaatattttgcatcagtttcacgcgactcattttgcattaaacttccactgagtttgggccaaaagctcaagctgtttacatatatgtacatatgtgcatttcttgatctacactccctcgactttgtaagcaaataaacatacaaattgtaacacatttgtttagagtctatgctatttttgtttgtctttactaattagcttgcatacctcacataaacatgtctgtggatgaactgtaactgtgaattgttatttgtttatttacatattgtcaaatgtttcttcttttaaaataggcatttatcgccagctgataaattgcaaggtatttgaaaagtttataggacgttttggggagtaaaattacaatttgtacataaaaccaatttaggaaccagataatagttgattctttccaaaatattgcaacatcttttaaaaaagggaatgaaaaatcttttaacataaatataaaaattgtttcgaaccgtgtcaaaccacaaacgaaatgggacagatgcctaataagctaaactcattgaaaatgattaaatactaatttggaaaaatcgctcaagctctcgaccaaacaaaagaaaatgtcagcgtctgacaaacgaactgtcaaaatgtcagacgcgtcaataaagccacgaaaattaaaaaaacatctgcgggcagcagatgtaaagcctcgtggcatgatgacaaaaagcctgctgctgcatctatgcgtctatctagtctgcataacacaaacgctgcaactgcagcaacgacaacagcagcagcagcagcaacaccgacagcagcaacatggccagcccgagggcaacatgctgcagcaacatcaccgaaccagtgtaaatagcagtgtaaatatcaatataagcaggcaattcaatgaaattatacaaacggcaacggccagtgcatcggccagcggtacgggatcggcatcgggagcggtaacattcgcatcggttacggcagcaacaacaataacgccaggacgtcgaaaactgcgacgcaagtttcaggggcaacaaaaccgtaattccaccttgggcaggaggcgaaaactgcgtttgcatccctatcatcggcgcaatgcaacacatgccacacgcaccacgactgtggcaagtgtctctgcgacggcaactacgctgctaccaaagatgccccacaagcagcccttcaactatcacacccacctgcactcgagcttccagcagcagcaacagcagcaacatgttgccggtggccaagttacccagcagcagcagcagcagcaacaagtgcatgttgttgccgtaacaccgcgcccgcaacagcggcaacaacagcccggatttgccatagtacctgcaacctactatcaccagcagcagcagcaacagcaacgaacacttttgggcaatctcacccagcagcagcagcaacagcagcaacatctactcatacagccgggccaaaacattttggtctatagcaatctgggacccataccgccctgtccgccgggcctgctttccggatcgggaatgccagtctatacgcaacagcaacactttataccgctgcgatccacgacgaccccgcgccccaggcaacgtggtaagcaaatcctttcgagcgttgcgatcaattccttggccatttaattgtcgtcactcctgggagaagtggaaagaagagaggggtcgatgcgccgccaaaaggtgttaattacgctaataaaaactgcattcacagcagtttatggcatttaatgtggttaaatggatgccaagtccccgactggcgccttcatcgccatgtccaagtcgtggtccaataattacccccagcggcgatgcgcatagaaagccagcctaattggtcaaagcaattgacttcgattttggtgagctgcagcgggatttgaaaggtgtcagcgggaattgctgcgaagccataaggatgcggtaccagtttttatgattccatgaccaagggaatactgtgatcaagttatttcaaatcatttatgagtagcaataaagttggctaggtttatctgaggagttttaagcttttgtcaaatgcgaatataaattgtttattgattttccccattaatttctcatcacttgccatcaacggctgtttagcctgatacgcaaccattaatgaatcccattaagaaaatacaatcaacagcttgtcgatcatttgctcttatcaataccaagtgtcagtatttcaaatgtatacacaaatattttgattgcaagttgtttttcacagttggttgttgttaatggtcaagtatgaggcaattttgtgccacgaatcagttgacaggctctttagcaaatgaatatatgaagtagttaggggaaaattcgttttaaaactcgttcaaaaatatatattttgcgaacgcagcttgatggaaaataacgatgaaaaatcaattgagaaaatctattaactgccggtccgcattaatttttttacgcggcttccgcaatttattgattttctcttcccaattgattttcttttattttcgcttatgtaatcgaatcactcaacaaattggcaagcaaatcaaatcgcacacactttaaaatgcataaaaaaaactgtaagttgatgtggaaaaatgttgtccctgatggtggacacacatttggcgcctgcccgctcggcttggcgttcaattagcatttcggagaggagctccttggcgtcccagatcccggcagacatggccccaaaccagcacgaatctggcattatgtgtatcgaacacatacactacaccacaacgagcagccagttgtggccgcctttaggccatttttggttattggtgtgtaaagtggcgcccagcaggaggctctgatgacattctcctcgctttttgatcggatgccaatcgtggtggtatctgaatgcccaaacgaactatgcaaatttgcgacttgcctgtgaaccgagagttcatcaattattcacacagttatgagtgatttatacgatttcgaatgccatgaaattgatgcagattaatcaatcaactggtattatattgctcaaacgaattgcatatttataatgcttatgtcattctgctttgggtagtttttattatgttgagctctgctttcaagtaactcagacttagctccaagaagaaattgaaaagtatatcttttcagtttaaaaatgtacttaaatgcaccataaaactagaaatggtaaactcatatgacccacatcattattttccggtcagaggttttccacacagccacccagactttttccaccaagagaatgaaaaccgcatcagaatctcacacagtcattaacataaagccatgtgcagatgacaaacataaaaacgaaacaaaaatcaactggctggttagcagcagcaaatattgacatttgcagtgtcttagatcttctagcgcgactccaaatacaaaaatgctgggatgaagactgggagacagagactgaaagccacgagaaacacctacgtacatacatacaatatatggcctttattatgggagtagagccagctctagcctggccaagacaaatcttaccgcacacaacatgtcgcgggcaaaacggcgattttttaattacaatgaaacgtgccacacaaaacaaacaaacaatgcgctcgctaattgcacataaagtccaaaatcacagaaaaccacaaaaaaaaaagaaggcataaactgaaaacaggaaaaaacaaagtcaaaatgaaggggtggccaagggaaaggaggttagtttcggccagaaatacagaaatactgtaacaaacttgttgttagcgaagcaaatggacggataaacaaaccccaacaacaaacaagcaaatgagccgaatgacaaatgcaagtgtcaatcttgtcgactcagacgcaatttcagttcgacattaagctgccttttcctaaaaaaactgaagggcctacggcagtcgaatttgttgaaatttatggattaaagttcagttggtcgagggccatttgtctgtgtgtggtgcctgaactttgatgggaaatcattatattttctttattttacaatatctcaaactcaaatggtacacaggaaaaagataccctacaattcccatcccaaacaattgcaaaaataaatcattttgtttgccacccacattaaaaaaatcccgctagatacattaaaaacttaaatggcaaaaagccaagttcaacagcctcaaacaaaaataataccaattttatctcacaacatttagccacgtttttgagtagccagcttctgggtgtttggaaacattaaagcgaaatattacagcagttttcagacatttttctcttagccgattgcgcgcctgatagtatttattattcaattttcattaaatctgattatggagaacttgtttcgcgcttttttgttggccccttgccaacggctcagcgtatcgaaaaatgcaagcaaattatttttctgacgcttaaattaagcattaattttgcaacagcaagactctcataaatatcttggcgaaaatgttgcaacagcggaaaataaacccaaattcgagctttttaagctggatttatcgctaaaatgtaaaatatatgtctaattagtgagctatacaaagggtgaaaaggcaataaatcaatttccagttaaaagctgacttaaagaccggaaatacgagacctaaggcagcttgccttttgtggtttctcaaacgggaatcgaggttaatcagagagaaaattaaatggtggcttaggaaaatttcactatttaatccactattttcatggggcgcctctatttaaaaatttagtttacgagttcaaaagtctcactattgctcgcatactttgcctcaaagtcacgtttttcatatttatttggcaatttccatttgaaaacaagtcttccacaacgtgtgccaggttgtccgaggtcagtttcaactcgaaaaccccaagttaagtcccagcaatgaacagtgaaatcccgcagtatcaacactcctgccttggcgcctcttcggtcactttgatctatgcacttcaaatgatctcgtagccgttccgttgccgtttcagtatctgaatctgaatctatatctgtctgtctgcgcctttgttattgtttgtgccgatgcgtaaacaacgaagcgtcggcttaaatgatacggcaactttttctcccgtctgaagttggcacacaacatgtgctctttggtttgctaaaatcaagggaaatgaagacgaaactaaggaggggagacacatcttataaggtggtggtcaagggggactgatggaatcgtctgtctggaactcggagaaagtttcagtctgcgacaatctggagacgaaaggtggaattgttgcccaccggaatggttcattagattgcttacagattatttaagccaaaagaacttcttagtttaaatttgtgattgagttatataagcaagcgcttacattcgacctaattatctaaagatatttctccctacctaccgaattttgactccaatcagctttggttaccgctgctaatggcatgaagcaaattgcgcgcttaattaagcaattccaattaaaatcaaagatatttcactttgattacgcccaccgaggcagcaacacccacaaacaccaactagataaaaaaaaaaagaaacggagaaccaaatatcacatgtgtgtatgactcgcaatagacttgtgtactttcgcctatcaaaagctaaacgcagtcaaaagtttggcgcactcaaattgcatttcctgtcacttggtcgagatcgcttgactgctcctgctccttctccttatactcctccattccgatcctcctgcccggagctctggaaatgggtgtgttcacatcgctgggtctccggatctccgatacacacggcttttggctgtaactctaagttgcctggctgtctgggcggttcgcatgggtacatgggacatgcaaagttacctgtatgtcagccccactatgtgggagtgtccatgggcgtgtgtgtttccacgggccggccaaacggcatcaacttcaacaccaacaccaaaaccggcattaaactgaggccagttactgttacatgacacacggtgtcaaaatatgaacagtaatccaaacgatacaaaatatatttgcacaaaccgattaaatacccttgtgaaggattggagtgccaacatattatgttaatgatgcttaaaagaaatgtttaataatgagataattttgtatgcctccttttttgattctgcaatacttttattttcacatcgttaagatataaattatgtttatgtttaaaagtttttataacccgcaggtgttcaatgtttaacattttgacataaacacaatctttttaatcaccaactttagcaaaggagtttccgccccttcgaaaagcatgtaatcaaaaaatcgtatagccacataaattgtgttttttggctaattgcagttggattttaattacaactgggctgcactttcggctattgttaattaacttttaaggcccgcatttcgggcaccctcgtacggaaggcctgccaaactaatccgtatctttattagcgacatgtaattcccattttaaaggcagcgcagccatcaaatacttaagccgcaccgaaagtccagacgccttgggaatcgattttttgtgcggccaaattgaaaatgctgctggccaaaaataaaatcgatagcgtgcaaaattcattgaatttacctggctttatttctgatcagtcgtgtgttggaggaggccaaaagggggcggcaaatagttttgttaattgaaataaaattcaatttgacgtttttatggcatgtggagatagttcggctaaatacgtgagaagctcttggcgcagatgcgaattgcaaatctggagtgtgaaagttgttagaaagatgcaaccagtcggctcggatcggatcggattggattggattgcttccttacgattcatttacgatgtgcgattgaaaaacaccccaggaaatgtgaaaatcatattcattggtgttcagtcgttttttctctgatttattcatcgttgcagtttaatccttatggcctcgtaattctctctccaccgatttgccgatttagattggccaaccgaacattccatttttatggcttattttaattttgtttcactaaggctggatggatatccacctgcattttagttaggaggtctcaagacaagtggcaagtggccataaaatttatatgctcgcacatatttaatccccatattcaaatttgcttatgcgggcacaattttccgtgccataaactttggtattacccacatgtggattttcctctgctcacattcgagatttcgcaattcacaaaaaaaaatgtagaggcggtcgtcaatccgagacgctgtgacctttgccagtgcttgtcaaactattcgccgcatgatggattggagttaccgcaaatgaatggcacattaatttgcatttaaatgtgccaaaaatatttctcgccatttttggcatgtcattgactaatgagcgagccgccgaaaatattgtaaattgcaaacagcgaaaagaaaacgtttttgcaactgcaggaaacataaataacaagtcccagacgaaatagattgcaatggatttttttttttgctataggcacagcaacagcagcaattgctgcgatatgaaaaatatgaaaaacattttgcaaatgtcacattcgcatggctatgaaaaccgatctgcgagccaaattttttggcgcaccccattgaaagcaccaatttgtgttatacaatatatttatgtttgtgtcgagcgttggctgctttttcttggagtatttttgaaatatgcgcttttatgccctataacataaatttaaaaaaatttagctagaaaatatttaaatttatttaaagagcattttagtctcgactttgtcccgttttcggtagtgttaaaagctttatgcgtgccaatttatgcacattaacttttgagttaaaatttcaaatcggctttcggcagttcatttgaagtgtcttcgattcgtaatgctagcaaattatttgcgcaaacatttggcaatcgtgtgcttaagggaaatttatttattttgtttcgttctattcgtcgaaattggtagaagaatttgtttctaacaatttgctgctcatcttcgtttaaaaattaaaaaggatgtttagtatttgtttattcgtgactttgaacttttctagaacaaaagatactctatctttatttattattcagtaaatccaagattatatgtatccattatatatatccaagatattcaaaatttgatttaaatgtgtgcacatcaatctttaatagttttgatccatccaacttccgtttccgtttgtttcgctaaacgatataataatcacactgccaggcgcaataatctccaacacgacttacacatctggccaactcgattcgcaatgaagtcaacaaagccaacacggctcagatatttataaattgcatacgagatcgggcttaatgtggccactttaataggcgccgccacttatcgggcgccgttgatccaaacaccaagagccagacactcggaaaccatttattataacaaacaaaatgctataattaattttttctattattttcccaaaaaaaaaaaatacaccccgtcattaccgagaaggcggtggtgcaagtttggcccgagaacgtggccagtgagaagtcaaacgcaatttcctggccaacttaatactcgattaatttacgacggccacgaaaacaattgatttggccaattcggtgaggggggggggggggcgttgatccaagcgactgggattgcgactattatgacgtgccgggccgagttcgatcaaagaaagcataaataatgtcccgacagccggtcgatcgaggagtagaactggttcagcattttgttggtggcccgtaccgaaatttatgcaaacgggttaattaactttagctgaaaaagaggaggaaacaactaacgaaattcggaacggcagactttagccgggtggtcctggtccaggttcaggtcctaccccaacccacactcccattactctctccttcgcttgaaaactgggtcaacggtgggcggctaacaagaaaagccaactaactgcatttgtatccatcattttcgacattttaaatgtcaatctgtattgggtatatggagaagttgttggcaagtcagttggtcagtgagtcaatcactcaattgaatgcgactcattcactcattcgttcgttcatcgattcatttatttatgcagtcagtgggccagccagcgtgtagccaacagatttttatcgcagctgcctacagacgcttaattgcctcttgattacttgtggaaatatcgaaatgcaatcgttataacactcgtttattgatacgctgaggaattcggcattgcttatttaaagtattcgtattcaattaaacaaatttaaaatcctttccatgatcttgtttccaaagtgtatacgctagaattccgaatgccactatatttatttattgcaacctagatatagagtataaaatattttccgtttaaaaataattttttgtgttgatttgagatttatgataattgattggcatccatcggtgcttttttatgactattcactgcaagcatgcattgcgcatacgcaacgttgtcccacagtgctgtgagcgaacccataaatcatttaatcaatattttgtcgtgtcgagcgtaacatacggtatgttgcccacaaaacacgtgctccaaatcgaagctcaacaagtgagcttacggctctagcatatttctgcaattggtcaagtctttttatttttgatagtggtcaagtccaagagattttgcaattaaactgtcaattcattggtacttttagaattattagtatttgattgttaatttattgcattgcatttgatttgtgaccgcgttgactgaccagacagtttggttattggtagtcgcattgtgtatacgccatgttgtgcagtgaaaatgacaagccccaaggccacagcacagaagtgagactaatggcagtactctgatttgatagttagcagattagattgttagaaaacgttagaaggtgtttggtctcgaccatccgccaatttttcatgacattcctgcagacaaagcaaatgacagtcgatcaatcccaaattatgccgcccatgccaatgtgaacggtaaccctaaaatttaacgcacattcaagctgaaaaccgttaaacgaacggaagtgctcttaaaacggcccacacacgcgagatctctgaccatcgggaccagtctagcgatcggcagccagcaaatcgagatataactaaggggtaaaaacaaagcagaaaaaacagaaaacaaacaaaacgtgctcattaataaaaaatcaagaaaacaaaattgtcaataaaaccaaaggcccgcgagactaacaacccgaccagaagaaacaaactcaagacccacgcaataaatctccagtgggtgtgcaagtgactctcaaactgttgtgccatgacaaacgcattttcaactaaagcaccaaaaacatcaggcaaaaaaacgatcgaggagcaggcgaagagtcgtgattcccattgtaaactttaatgacatcatttgcccaggcaaaaacatgtgaatggcgtcagttgattgaactttttattggtggctccgtctgaaggagtcgcctatagtcatagtcgtagtcgtaggcctttctctcgccactcatttcattcatgaaaatgcaaatccccccaaacgaacgatggcaagcacttgacagctgcactatagtcagtcttgagtcttcaagtcccagccatatgccaagtgcctcaaggcgcagcttccttctcctcctcttgaatactcctcgaagcagctctagagtggatctactatcacctatcctatcgtgtcgcgtgctaagcttgttcatatttctttgaaataccctacgatttgtccaaagtcccattgcattcagttgactaggaatcaaaagaatttgcttacaatattttttaaagtatcactaccaaacatttaattatacattgcatacattatacattaccttatatacatatatctatttaatcttaatagccattaagagagagcacccaatcttcgttgcaagttccacagatctcttctaattttgcatgcaccttttgccaatattttagatgtatttttttatagagcgtgcaatcaaattgaaaagtgtttttgcgttggttttaccggatttatgaatgaatttattttcgtatatagtatatatatgtatgtacctcctgcctatccacatactcatgagcttggcagacttgtctggcttgttccgacgtcgtcgtctcccacagcttttttttcggggtccaacgtccgctggtccgtcgtcgcatttgtcgtttgtcgcccgaataggaaactgaatgcatatgtgggcggactttggggcgctgcctacgcgcaacccacaaacccaccaactggctagcgggtctggtgggtctagtggatacagtgggtctgtgcgcgccacttggtggctgttaaggtgcagttagctggctgccactgacagtgacgtagttgtggcccagtaacccaagacggggaaagctaatagcaaggggattgattgttagattccagcaccgacattgattcattgattaaatcctacttcattaaatataaatttagtaacataacttacagtaaagattttgattaaatataaatatctatttagatattcttccttttagttatatataataacatatgcaccttcatttacagaatgccactgcagcagtgtgggatccctgtcatcggattgcgataagcgaactgggcaatgcgcctgcctggccaacgtcaccgggaggagatgcgacaagtgtcgaccgggtcactggaatctcacggcgggcgagggctgccgggattgccgatgcgatcctcatggttcccgaggtcacgagtgcaacccgtggacgggccaatgcgactgcaagatcggggttggaggtcagcactgtaacgagtgtacggagggattctttggcttcagcacggagggttgtcagcggtgctcggcctgcaggtcggagggtcaggtgtgtgacccgcacaatggacgctgcatttgccccaagttcacccgtggcctgggatgtggacagtgtgtgccgggcacctggggctggcaggctcgattgggttgccgggaatgcgagtgcgatcacattggctccattggtcagcagtgcagcaccggcgatggacaatgccagtgccgagagggatattcgggcagaaagtgcgacacttgcgccatcgggtatttcggctatccggagtgccgacgatgcggctgcgatgcggagggttccttcacccaggcggatggctcaatagcctgtgactcgaatggccaatgcccgtgcaaatcccttgtggtgggtctcaaatgcgatacctgcatgcaaagcacttttggattgtccgcacaaaatcccgaaggatgcacccgatgcttctgcttcgggagatccggtgagtgcgagcagagcgacttgtcttggggacacatccgtatggcggagtccagaaatctcagcgttcagcaaataagaccgcactcggtacccagctcagactacgagtacatagtggtggttcagatggagggcagcagtttccatcgcgaagacgcggagatccagcgcatgaatgatctgagcttagtgcccaaatctacggggaatgtttccatcggagcatatggacaattttaccatccgctctacttccaactgcctccgcagttctacggagatcggactagtagctatggtggctttttgtacttcaccctgatcaccgaaggtgcccacaagcccttggagcgaaatattttgggtcagtatccattggttcagttacacgcgcactccaagttgctactggacttttacgagtacgaagagttcgagtactccttgaacgtgacccatcgggtgccgctgcatgagtccttctggaagtaccaccacaccagccaggcagtggatcgtaatactctaatggctgccctccaaaacattcgacacatcttcattcgagcctttgcttttgccgatttccaggaagttgtgtgagtcatttagtaaatccaataaacttagtaataagattctatcatgtactaacccttcttttgtatttatagccttcaaaatgtacacatggatgcggccatctatatcaagggctccaccaatcttatagccaagggagtcgaacggtgtaagtgtcccaagcggtttgatggactttcatgccaggatccgggaagatccttctaccgttggcggaataccactattgtggagagtgtattcattgaggatctgataggaagagcagctccctgtcattgtaatggtcgtagcagcgattgtgatcgcgaaactggagtctgtcaggtaaaaaattcgattcgaaatccattcaactccttttatatgactcctttttgacttttcgcagaactgtcgaggtaacactggaggagatcactgccatcagtgtgctgagggattctacggcgatcccaattctccacacggttgtcaggcttgtccgtgcccggagaccaataggaactttgcccggggctgcaatgtctgggacggagaagtcagttgtgtctgcaagccgggttacacgggcagattgtgtgagcggtgccaggcgggatattttggagatcctatgagatatccaaacactacttgccaaccttgcaactgtcacccagatggaatccaaaccgaaggctgcgatgtagagactggtagatgctactgtcgagaaggagttactgggctaaagtgcgacaagtgtcaggcggaacgtcatcatctggtggacaacggatgcaaaagtaagttaatcttcgatgtgaactgaacgaataccattctgcatattcccatgtgtaccattcatgttctctatatcctttatagtctgtgacaattgcactcttctgcttctggattatatggagctggtgggcaacaagcttcgtcgtggaatgcacaacatggatttgactggaattccggcgccatatcgaaaattgtcagagtacgaaagcgcctatgagaaatggaatgggcgccactgggactttagccagaccaaacggcgtctacaggattacgactccgctgacatcctaaagctggaggcccacgccgaaaatttgaagtttcaatcccgcaaagcagtggccaccattggaaaacgggagtttgccataaaatcgatgcgggaagatgctgtaacccaacagcatagtgtcggcttactccgctcggagattcttcaaaccctttccgatttacatggctatggaaagagtgcccattatctcagtctgcctactgctctcaagcaggcccgattctacctgcaggccatccgggagcacgaccaaatggttcagggaatccgcagtaccaacgactgtgcatggaagcatttttatgccatgggcaacgcatcggatgcgtcgttcgacgagagcggccgcttggagatgctctggcgggacttgaatcagaccaatcatcgagtggtagacatgcggctgcaggtggatcgcgtgcaagaggtggagaacgaagcggaggacgttctggaacatgtgcgcaatttgagtattcgcgtgggtgaatcccaccaggagctggatgaacttaaccagcgtatttccgatcacctagatccgggctacctagaacagggcgagggcctgctaaggctgacagtccagcggcagataatgctcaatgggcatcttaaccaattggatggctaccgtatactactaaataccacattgggcgtaaagactgagcagcagcgggaggtgcgtaaacactggcttcccaaggcggaaaagcacgccagtcatctgctggcgcgatccaatgagtacgcccgcaagtttcaacccaccagaaatggagcccgcatagccatgctggccagttcggcccacagcaatatcactgaggccatcaacgatgcccggctagcatcaatcctggccaaggaacgggtgtacgaggcgcagagaacactctatcccagtgacggcagctccatgatcgagcgagccaagcactcgctgcacagatcaaagcaacttcagcaagaagcgctcaagcagatgcacaaatccaatgtgttgaaggacaaactgcatcgccaggagcagcaggtggagggcatcaagtccacgatttacgattccggactgcgcaccaacaacatatccggacagctgcagggtctttcagatggttcagcacgtcgtcaagcgaaggatagtctggaaatggctgatagaacgggagaacaaatgcgtgctgaactgcaaaaggcgaaggatatgcagaagtccatccaaaacatgcgaaattcgttctccaatctggaacccgactgggaaatcaagctgggaatggcccaagagaacatatccctgacccagactaacttgcgtctggccaatgtctcattgagctacctagagcagcaggccgagaaggagcaacaggtgttcgaggtgtggaacaacagcatggcccagcaactgcagcagctccgggatcaaatagccaaggccagacatgcagcagaagcggtacgtatgtcatacttaatatacggccagttatttaaataaaaatacttgttacagatcgatgtttccctggaatcgctgggtcctaaatgcattcgatcctatttgcccgcctcctacggtttgagtacctcgaataagattcgtatgagcttcgccttatccaatcacctcgagagctctccattgattcacctggccagcagcgaggggcgtcacatcaccctggagctgtacaaacgtcgtgtgcgcctggtgtggaatcttggtggcaccaccgcaaccgttacgcatcccatggtggtgcatactcgtgaccccaagtacgacgatgcctggtaccatgtggaggccaataggacacttaatctgggcagcctggtcgtgcgtcgaatgaacaactatggcgagctgactccgcctaacccggtcatcataacaggatccacggatacggagcacacacgtttctatcagtctcgaagcgatcgaatttcgctgggaggctttgcatcgaaagatttgcaattcacgccgggactcaatgtggtggtgcatcaggtggaggtggacaacaaaccgctgggtctgtggaacttcgtgaccagcgagggcagctgcggtggatcaatggttggagctaaggagtcttcggcctcgtccacggctcgccatttcaatggattaggctatgcccagttgatgaagacccgaccacgacccactcgcaaaaacctgttctccgtgcagatgactttccgcacgttggacgaaaatgccttgctcttcttggcggttgatgacaagaacgtaagtaaaattaacatttaatcctttcttcaacgatacaataataaatttatattgtagaaccgctcggtatcggtaactttgagccggggtcggatcatgttccgcattgactatggcgatgagtccaagctggaaatcaacaccactaagaagtataatgtgggccagtggatcaagatcgaggctgcgcgagagttctcggcgaaaagaagtactgaaaatggaatgctccgagtaaacaacgatcgtccaatttccggagcacctacactacccgtaaacattcacttgcttccggatctttccaagactgtctattatctgggcggtgtgccaccaggtaagggattgatttttatataaggagttaagactcaatttgaattgtcataataggtttcacttcgggaacctcaaaggcgcctggtgctgataatcccttcttgggatgtatgaaggatgtccaggtaaatggcgagacctacgatcctctggagagctcaagctactacggtgtggagccttcctgcaagaacatgattaccaagtatgtagctagactatttttcaaaagaatcatattttaaaaactaaatccttcacagggctggtttctcgggcaatggttacttggagctgccatcgcagtcactacgaaagcgctccaataccgctttggtgttccgcacccttcagcccgattgcctgctgctccttgctgcctatccgcctgagatcctgggcgactatgatgctaaggacattaagggcaacttctccattagcctggtcgatggtcaattgcatgtttgggttaactctggtcgcagcttcatcaagatgtcctcgaactccagtcagatgaacgatggcgagtttcacgtggtacatttgatcaagaccggtcgcaagctggagctgatggtggacgatgagctgcaagagattcgcaatctaaacggcaatcccacggtggtcagcctgccgagggatgcaggtggcctgtatataggtggagctccgccgcacgaaagttatacgccattggcgccgacttttgtaaatctagaaggagccattcgggatgtggtgttcaacaatcggaccattaactttaacgatgccctgacctttgccaacgtccagattggacgtaatggtccactgatgggcagtctgaaaggaggactgtacgatgtcctcctgaaaaccgaacccatgattggaaagagttttacggcctcgcctgagggctgcaagcgggtaagtgactaaagtacctcttattttctgggattggttcggcggggtttgaagatttcaatgggtactgtccattttctgcatgtacatatgtggctacctaactctgttaaaatcatacgtttctctttgtttttataggattttagttgctaagcaattatgtcaaaagcggctacgctaaaagcttcaagcgctgcgccttaagaaagatcatttgtatactaatttcgcctaaaacaaaaagctaaccaaacaagctactctatgtggtctacatgtggattaatataaccaatcatcatcaaagatataacctcagttcttgcataaaaggcattgggaaagtgggtccatgagaggcattatcgaatgaatatttcactctcatgggcagactgatttagctttaagctagcgcatcttgatcctcagataaccgaaacctaatgcgagggatcttcttagttagtaattatctttataaacacttttgcaattctgtatatatttcatgcgacttttattactatttcataagcttcaacgctcaaattagaatgtaagattcaccatactcatatatcatacacatcactcatcaacgctttgtgtacgtttttgcttcatgaatgtatcatacaaattaacatttgcctacagcaacatggacatttaattgttatcacatttacctaaataaaaaaacatttttataacaaaaccaaatacgatatcatggcaaagtttttatttttaattcaaaatcgctgagaacgctacgcaaaagctcagaaactaacacaaagtcgtcggggtgagttgagttccaagaaaaaggcgcgatagtcctggtcataatctggttgctctcttgcagatcggcagctattcctacgagccgaatgcattcaagtttggagacgatatctatagctattcgcagctgaagctaccggagcgtcatttctggcagcgcaacttccatctgagcttcgatttccgctccttctatcccaatggaatgctctacttgtcgccgggaagcaaggagaaacccaagcactacgtggctctcgtcctcaaggacggacagctggtcctggtggtgcgaggtcgtcggcgcgaggaactccagttgaccgccaagttaaacgatggcgaatggcaccgggtgacgattagctgtcacgatcgcaaggtcaccatgtcggtggaaataggacgtacagatcaaaagacttccgcccagatgaagctgcccaagaagattggcgcctctcagcttttgctggttggtgggctaccacagtctccagtcaaggtctcctccgatctctatgtccgtctggaaccattcaagggttgtctgcgccgggtgagcatcaacaacaacacccaggatctggcccgacccggcaaacattcgaatgtgggtcagtgctttcccacggtggagagaggcagttactttcccggcgatgcctatgccatttacagtgagttccaacacggtctgttttcattttcaaataatctttatacttctgcgcagagaaaaacttcaatgtgggcaagtatctcgatctggaaacggagtttaggacctcggagctatcgggcattctgctgagtgtctctgatccaaatggattcccagcgctttcactggaactgcataatggcaatgtatgttgaactcgacttagtttccaaagctgtataaatacttttttccttgggcagataatattctcttgcgatcctggaaacggagcgcccatgcgtgtggagtcatcactgcccaccaaatatgccctatgtgacaacaaatggcataatatttcagctctctacgatggcgaacagattgtcctgcgcatcgatcaattgccagccgtgatcagtgtgggtaatcaggggaatgctggaaaggtgcaaacccgatccccgctctatattggcggtttgccaggtgggtcagctgctttatgaagataatttcatttatttaacccttttctcaactattttcctggcagagagtgctcccagtggttcactgatatcgcgggagaacttcaagggctgcatccggcacgtgtccatacggaacgagagacgcgactggatcgagatggaggacctgaggaacgtgctgctcagcgagtgcctcgtgtccagcgatgagagctgaagatcgatgtccgaattccggacagctttccgggcgcatctggttcctgttgacgccacaccaaaactttttccaaatgtattgtgatcaataacgagtttagagccacctatttatagcccttcactgccatataagttaggttactgtaggattagctttgaatgtttatatataattaactacgacttctattgccagtgactgcattttgtactttgcaatctgattcataatttattttcgtatttatacattactttcattatttattttatgtttttaaagaggctttaagtttgtatttcatttggcatacggcttatcaaaaattgtgtttatcgaatctccagtttgtacagtgcgcaacgaaatttacttaagtagctataactcatcattattttcatttgtaaatagaactgccatttagcttgtattcattgtagcacctatgcttatgtaatatttccagactaataaaataaaataaaaacctattatctaaatgaaacgtatggaaaaattatttaaattaaattaattttataaacaaatagcttgaaaaacaccttaccaatttctgaaccgattacttcgcgattttttacttggattttagctttgaatttattctgggagttaactttcattagctgaatgataagtttgtaactctccattcagccattacttacatattttttaacgcacacgatgagtataaacaaatccattcgtggcagccgaaggactcgaagatccctagcttcgggtggtggtgatctcattggcccctatatctattgcatcaacttctatgataatggattgagtgcggtgcgggatgagtttgtgaagcggcttgaaagtgggctacgacgtgccatgttcgtcatcgacttggataaggaagttgcggaggccaattatcagttccaacgaaagtcgaggaccaagaaagctggtgagttgtatggcatacaactgtttggggaaggttttcaaaatgttgctttctaggatctctggacatgaagtccttagatccattgaacattgtcctgcaatgcattcagaactgtgtggaagagtttgacagaataacgaagcagattgagtcagaggcgaatttcgacctgtactcctactggcaacgaaatatccctgcacagctcaagaacctattggcgcctaaaaaaaagggtgctccagatacgaagcgtgacctaaatacagctagatccaaaacgggcaagacatcgagcgacaagatgcgcctggagaagatcaagtgctcgtccgttacagccaaggagcaccacaaagttggcaagggagcgccggtgtccaagcgagaagtaagattcttttatttttttttaggaaatataccctttgaacctttctgactttcagtacattcgagacaatccgacgttcacgaaaatgctgatcctgatcgtggggcaaatggataacgacttctacaaattgctattggcctacgaac

SEQ ID NO: 37919 - DNA, 10672 bp, DROSOPHILA
gatttgaaaaagaaataatacaaaaaaaaagaacaatctgtgcagtgaaaataaaaaatattatgaatgaaaataccaaggaataagtgcctgcatctcaagtggttttattaaaagagcacagaaaatatatccaagttcaaagtcgaacggaatataatgtgtcattagtgatcgtagtgcattcagttcgtccagcatgcaaatcggaaattttatcaaatggccactgggcctgatcctcatcctgctggtcacccactgtcaggccaaaaggcagcggaaacggttgcgtggattctccactgccaaggacctacaggattatagcatgccgctcaacgacaactccacggaactccagcagaacattgtgtcctggacaggagctcgaattgcgtcgagtcccgataagaagaagaagtcaccgcaatcatcgagacgtcacaaaaccaaaagtggcctgatcattgaaagtaacattgccgactcggaatcgatgttggctattgcctcctcggaatccgtcaccaagaagaagccgccgcagcgtcgtcgcaacggaaaattacagaaatccggaggaggagcaggaggtggagcccttcgattgctcaaaacggaggacgtgtactcatccagtttctccggcggcctctatccgccgctcttcaatgtggttccacgggctcagatctcggtgaatgccacttgtggccagaacggtgccgaggagtactgcaaacaggtcggcgccaagccgtgtggcatctgcaatgcccattcctcggatcgagccaaacagcgctccatacagtcgctgatatcgtcgggatcgggatcgggatcgggatcgggatttgaagaaggctggtggcaatcaccaacgctgcagggtggccggcaatttgagtatgtgaccatactattggatctgaagcagacttttcaaatattttccgtgtggctaaaatcggccaactctccgcgtccagcctcatggatactggaaaagtccctggatgggattaactttgagccatggcagtatttcggattgagcgatgcagattgtcagcgacgatggaatttatccgggcaaaatggcaaatacgtcttccagaacgatacagaaatcatttgctccactcagttttcgaagccgggtcctttggagaacggcgtcttgcatgcttcgctgctgaagaatcgccctggagccacggatcaaagtccggagctaatgaagttcataacgactcggtacataaggattcgcctgcagggcatgcactccacggccaatcaggacaacagtctggactggctgctggactctccgtcgctggagaagcacagcttctactcgctgtcccagttgaaggtgagtgcccgtctggattgtaatgggcacgccaatcgctcccacgagtcgccagatgaccctctgatgcagtgcatctgccagcacaatacctgtggtgctcagtgcgaacagtgctgtccgcttttccaggatcgcccctatcaaatgggcggagagtgcgagatatgccaatgctatggtcacgccgagagctgcacctatgatcccttcctggacaagggcatttgccagagctgctcgaataacacggctggcattgagtgcgagttttgcgagatgggattttacagggagctggatgcaccgctcaccgatccctgtttgccctgctcctgtaatcctgctcgttccacgggtggttgccagtcggatggaggaagctgtaactgcttggagggtttccagggcaagaactgcgaggaatgtgctccgggctactacggagacgattgcaaacggtgtgagtgcgacgaaaggggaagtcttggctccacgggttcctgctcgggtgtgtgccagtgcaagctcaatgtggagggcagcacctgctccgagtgtgcgcccggatattttgatctaagcgcagagaatgcagagggatgcaccagctgttggtgctcaggtgtctcgcaaacatgtcacagtgccaaactgcagacattggcctttgaaaccctcaacgattggaaaataaccgatattcaaagagtgaaaccaatttcaataccagttgatgccgaaacaaaccgtttgatctttgccaacgaactggatgaagtggaggccatttactggcaggcttcgttgggttacttgggaaatcgcttgaccagctatgggtcgagactgcagctggtgttgtcgtgggatgtgataagaggcgatagatcgggaaagcccacgacggggcccaatgtcatcctagtcggcaagaatggactgaagattgccttcggcgatgaatccttggacggattgggaatcaacttgaatgtaaccctaacagaggttggctggtatcacgtgccacccactgtcgttgatataaaaacaagacttcggcgaaccgagggcggtgactatcacggagaatctgttacccgttcccagtttctctccgttctcgtttccctcgatgctgtccttattagagcggcttttcacacggatcaaggggaaacatcactcgagagagcagtcatctattcaggaggtgtggagttgggcggaaagtcttccagccaagtggagcaatgcctctgcccagctggctataccggtctgtcctgcgagggctgcgcctttggattcaagcggatttacgagaacacctcggaccatcagattctgagcaagtgcatcccgtgtccctgcaacggacactcaaactcctgcgatctgcagagcggaaattgcggcgactgcatgcacaacacttttggagatcgttgtgagcgttgccagttgggttactacgggaatcccctgcagggaacccccaatgactgcaagcgatgcgcctgtcccctgtccgaggattccaacaacttctcgcccagttgtcagctaaagagctacaactacatggacctgaatccgcagttcgagctgatagagcatgcggagtacatatgcacccaatgtccggaaggttatacgggtgatcattgtcaggtgtgcgacgatgggtacttcgggaatccacgccagccgggaagcagttgtcagcgctgcgattgcgccggagggccctgcaacgtgaccaccggggagtgcatcacgtgccgcggaaacacagagggttggcactgcgagcgctgcaagctgggctactggggtgatccggccgtgggctgtgatccctgtcattgccacacggaaggatcggagagcggactatgcgacagcaccgatggtcaatgcctgtgtaagccacgttatgctggacagaagtgcgatgaatgtgacgtgggctatgctaatgttgagctacgctgtccatcctgcaactgcgatccattgggctcgttggtccaggacagatgtgatccccacactggacaatgccattgtaaggagggcgttatgggtgccaaatgccacgagtgccaggatggctacttcggcatgaatgctgtggcctatcgaatggatgaccttgctgcactgcgtcaaaactccgatagcgacgatgacgaatgggaattggttccagatactgaagatcccaatagcgaatccacggtggcctgcgaggaatgccactgcagcagtgtgggatccctgtcatcggattgcgataagcgaactgggcaatgcgcctgcctggccaacgtcaccgggaggagatgcgacaagtgtcgaccgggtcactggaatctcacggcgggcgagggctgccgggattgccgatgcgatcctcatggttcccgaggtcacgagtgcaacccgtggacgggccaatgcgactgcaagatcggggttggaggtcagcactgtaacgagtgtacggagggattctttggcttcagcacggagggttgtcagcggtgctcggcctgcaggtcggagggtcaggtgtgtgacccgcacaatggacgctgcatttgccccaagttcacccgtggcctgggatgtggacagtgtgtgccgggcacctggggctggcaggctcgattgggttgccgggaatgcgagtgcgatcacattggctccattggtcagcagtgcagcaccggcgatggacaatgccagtgccgagagggatattcgggcagaaagtgcgacacttgcgccatcgggtatttcggctatccggagtgccgacgatgcggctgcgatgcggagggttccttcacccaggcggatggctcaatagcctgtgactcgaatggccaatgcccgtgcaaatcccttgtggtgggtctcaaatgcgatacctgcatgcaaagcacttttggattgtccgcacaaaatcccgaaggatgcacccgatgcttctgcttcgggagatccggtgagtgcgagcagagcgacttgtcttggggacacatccgtatggcggagtccagaaatctcagcgttcagcaaataagaccgcactcggtacccagctcagactacgagtacatagtggtggttcagatggagggcagcagtttccatcgcgaagacgcggagatccagcgcatgaatgatctgagcttagtgcccaaatctacggggaatgtttccatcggagcatatggacaattttaccatccgctctacttccaactgcctccgcagttctacggagatcggactagtagctatggtggctttttgtacttcaccctgatcaccgaaggtgcccacaagcccttggagcgaaatattttgggtcagtatccattggttcagttacacgcgcactccaagttgctactggacttttacgagtacgaagagttcgagtactccttgaacgtgacccatcgggtgccgctgcatgagtccttctggaagtaccaccacaccagccaggcagtggatcgtaatactctaatggctgccctccaaaacattcgacacatcttcattcgagcctttgcttttgccgatttccaggaagttgtccttcaaaatgtacacatggatgcggccatctatatcaagggctccaccaatcttatagccaagggagtcgaacggtgtaagtgtcccaagcggtttgatggactttcatgccaggatccgggaagatccttctaccgttggcggaataccactattgtggagagtgtattcattgaggatctgataggaagagcagctccctgtcattgtaatggtcgtagcagcgattgtgatcgcgaaactggagtctgtcagaactgtcgaggtaacactggaggagatcactgccatcagtgtgctgagggattctacggcgatcccaattctccacacggttgtcaggcttgtccgtgcccggagaccaataggaactttgcccggggctgcaatgtctgggacggagaagtcagttgtgtctgcaagccgggttacacgggcagattgtatggaatccaaaccgaaggctgcgatgtagagactggtagatgctactgtcgagaaggagttactgggctaaagtgcgacaagtgtcaggcggaacgtcatcatctggtggacaacggatgcaaaatctgtgacaattgcactcttctgcttctggattatatggagctggtgggcaacaagcttcgtcgtggaatgcacaacatggatttgactggaattccggcgccatatcgaaaattgtcagagtacgaaagcgcctatgagaaatggaatgggcgccactgggactttagccagaccaaacggcgtctacaggattacgactccgctgacatcctaaagctggaggcccacgccgaaaatttgaagtttcaatcccgcaaagcagtggccaccattggaaaacgggagtttgccataaaatcgatgcgggaagatgctgtaacccaacagcatagtgtcggcttactccgctcggagattcttcaaaccctttccgatttacatggctatggaaagagtgcccattatctcagtctgcctactgctctcaagcaggcccgattctacctgcaggccatccgggagcacgaccaaatggttcagggaatccgcagtaccaacgactgtgcatggaagcatttttatgccatgggcaacgcatcggatgcgtcgttcgacgagagcggccgcttggagatgctctggcgggacttgaatcagaccaatcatcgagtggtagacatgcggctgcaggtggatcgcgtgcaagaggtggagaacgaagcggaggacgttctggaacatgtgcgcaatttgagtattcgcgtgggtgaatcccaccaggagctggatgaacttaaccagcgtatttccgatcacctagatccgggctacctagaacagggcgagggcctgctaaggctgacagtccagcggcagataatgctcaatgggcatcttaaccaattggatggctaccgtatactactaaataccacattgggcgtaaagactgagcagcagcgggaggtgcgtaaacactggcttcccaaggcggaaaagcacgccagtcatctgctggcgcgatccaatgagtacgcccgcaagtttcaacccaccagaaatggagcccgcatagccatgctggccagttcggcccacagcaatatcactgaggccatcaacgatgcccggctagcatcaatcctggccaaggaacgggtgtacgaggcgcagagaacactctatcccagtgacggcagctccatgatcgagcgagccaagcactcgctgcacagatcaaagcaacttcagcaagaagcgctcaagcagatgcacaaatccaatgtgttgaaggacaaactgcatcgccaggagcagcaggtggagggcatcaagtccacgatttacgattccggactgcgcaccaacaacatatccggacagctgcagggtctttcagatggttcagcacgtcgtcaagcgaaggatagtctggaaatggctgatagaacgggagaacaaatgcgtgctgaactgcaaaaggcgaaggatatgcagaagtccatccaaaacatgcgaaattcgttctccaatctggaacccgactgggaaatcaagctgggaatggcccaagagaacatatccctgacccagactaacttgcgtctggccaatgtctcattgagctacctagagcagcaggccgagaaggagcaacaggtgttcgaggtgtggaacaacagcatggcccagcaactgcagcagctccgggatcaaatagccaaggccagacatgcagcagaagcgatcgatgtttccctggaatcgctgggtcctaaatgcattcgatcctatttgcccgcctcctacggtttgagtacctcgaataagattcgtatgagcttcgccttatccaatcacctcgagagctctccattgattcacctggccagcagcgaggggcgtcacatcaccctggagctgtacaaacgtcgtgtgcgcctggtgtggaatcttggtggcaccaccgcaaccgttacgcatcccatggtggtgcatactcgtgaccccaagtacgacgatgcctggtaccatgtggaggccaataggacacttaatctgggcagcctggtcgtgcgtcgaatgaacaactatggcgagctgactccgcctaacccggtcatcataacaggatccacggatacggagcacacacgtttctatcagtctcgaagcgatcgaatttcgctgggaggctttgcatcgaaagatttgcaattcacgccgggactcaatgtggtggtgcatcaggtggaggtggacaacaaaccgctgggtctgtggaacttcgtgaccagcgagggcagctgcggtggatcaatggttggagctaaggagtcttcggcctcgtccacggctcgccatttcaatggattaggctatgcccagttgatgaagacccgaccacgacccactcgcaaaaacctgttctccgtgcagatgactttccgcacgttggacgaaaatgccttgctcttcttggcggttgatgacaagaacaaccgctcggtatcggtaactttgagccggggtcggatcatgttccgcattgactatggcgatgagtccaagctggaaatcaacaccactaagaagtataatgtgggccagtggatcaagatcgaggctgcgcgagagttctcggcgaaaagaagtactgaaaatggaatgctccgagtaaacaacgatcgtccaatttccggagcacctacactacccgcgcctggtgctgataatcccttcttgggatgtatgaaggatgtccaggtaaatggcgagacctacgatcctctggagagctcaagctactacggtgtggagccttcctgcaagaacatgattaccaaggctggtttctcgggcaatggttacttggagctgccatcgcagtcactacgaaagcgctccaataccgctttggtgttccgcacccttcagcccgattgcctgctgctccttgctgcctatccgcctgagatcctgggcgactatgatgctaaggacattaagggcaacttctccattagcctggtcgatggtcaattgcatgtttgggttaactctggtcgcagcttcatcaagatgtcctcgaactccagtcagatgaacgatggcgagtttcacgtggtacatttgatcaagaccggtcgcaagctggagctgatggtggacgatgagctgcaagagattcgcaatctaaacggcaatcccacggtggtcagcctgccgagggatgcaggtggcctgtatataggtggagctccgccgcacgaaagttatacgccattggcgccgacttttgtaaatctagaaggagccattcgggatgtggtgttcaacaatcggaccattaactttaacgatgccctgacctttgccaacgtccagattggacgtaatggtccactgatgggcagtctgaaaggaggactgtacgatgtcctcctgaaaaccgaacccatgattggaaagagttttacggcctcgcctgagggctgcaagcggatcggcagctattcctacgagccgaatgcattcaagtttggagacgatatctatagctattcgcagctgaagctaccggagcgtcatttctggcagcgcaacttccatctgagcttcgatttccgctccttctatcccaatggaatgctctacttgtcgccgggaagcaaggagaaacccaagcactacgtggctctcgtcctcaaggacggacagctggtcctggtggtgcgaggtcgtcggcgcgaggaactccagttgaccgccaagttaaacgatggcgaatggcaccgggtgacgattagctgtcacgatcgcaaggtcaccatgtcggtggaaataggacgtacagatcaaaagacttccgcccagatgaagctgcccaagaagattggcgcctctcagcttttgctggttggtgggctaccacagtctccagtcaaggtctcctccgatctctatgtccgtctggaaccattcaagggttgtctgcgccgggtgagcatcaacaacaacacccaggatctggcccgacccggcaaacattcgaatgtgggtcagtgctttcccacggtggagagaggcagttactttcccggcgatgcctatgccatttacaagaaaaacttcaatgtgggcaagtatctcgatctggaaacggagtttaggacctcggagctatcgggcattctgctgagtgtctctgatccaaatggattcccagcgctttcactggaactgcataatggcaatataatattctcttgcgatcctggaaacggagcgcccatgcgtgtggagtcatcactgcccaccaaatatgccctatgtgacaacaaatggcataatatttcagctctctacgatggcgaacagattgtcctgcgcatcgatcaattgccagccgtgatcagtgtgggtaatcaggggaatgctggaaaggtgcaaacccgatccccgctctatattggcggtttgccagagagtgctcccagtggttcactgatatcgcgggagaacttcaagggctgcatccggcacgtgtccatacggaacgagagacgcgactggatcgagatggaggacctgaggaacgtgctgctcagcgagtgcctcgtgtccagcgatgagagctgaagatcgatgtccgaattccggacagctttccgggcgcatctggttcctgttgacgccacaccaaaactttttccaaatgtattgtgatcaataacgagtttagagccacctatttatagcccttcactgccatataagttaggttactgtaggattagctttgaatgtttatatataattaactacgacttctattgccagtgactgcattttgtactttgcaatctgattcataatttattttcgtatttatacattactttcattatttattttatgtttttaaagaggctttaagtttgtatttcatttggcatacggcttatcaaaaattgtgtttatcgaatctccagtttgtacagtgcgcaacgaaatttacttaagtagctataactcatcattattttcatttgtaaatagaactgccatttagcttgtattcattgtagcacctatgcttatgtaatatttccagactaataaaataaaataaaaacctattatctaaatgaa

SEQ ID NO: 37920 - protein, 3319 aa, DROSOPHILA
MQIGNFIKWPLGLILILLVTHCQAKRQRKRLRGFSTAKDLQDYSMPLNDNSTELQQNIVSWTGARIASSPDKKKKSPQSSRRHKTKSGLIIESNIADSESMLAIASSESVTKKKPPQRRRNGKLQKSGGGAGGGALRLLKTEDVYSSSFSGGLYPPLFNVVPRAQISVNATCGQNGAEEYCKQVGAKPCGICNAHSSDRAKQRSIQSLISSGSGSGSGSGFEEGWWQSPTLQGGRQFEYVTILLDLKQTFQIFSVWLKSANSPRPASWILEKSLDGINFEPWQYFGLSDADCQRRWNLSGQNGKYVFQNDTEIICSTQFSKPGPLENGVLHASLLKNRPGATDQSPELMKFITTRYIRIRLQGMHSTANQDNSLDWLLDSPSLEKHSFYSLSQLKVSARLDCNGHANRSHESPDDPLMQCICQHNTCGAQCEQCCPLFQDRPYQMGGECEICQCYGHAESCTYDPFLDKGICQSCSNNTAGIECEFCEMGFYRELDAPLTDPCLPCSCNPARSTGGCQSDGGSCNCLEGFQGKNCEECAPGYYGDDCKRCECDERGSLGSTGSCSGVCQCKLNVEGSTCSECAPGYFDLSAENAEGCTSCWCSGVSQTCHSAKLQTLAFETLNDWKITDIQRVKPISIPVDAETNRLIFANELDEVEAIYWQASLGYLGNRLTSYGSRLQLVLSWDVIRGDRSGKPTTGPNVILVGKNGLKIAFGDESLDGLGINLNVTLTEVGWYHVPPTVVDIKTRLRRTEGGDYHGESVTRSQFLSVLVSLDAVLIRAAFHTDQGETSLERAVIYSGGVELGGKSSSQVEQCLCPAGYTGLSCEGCAFGFKRIYENTSDHQILSKCIPCPCNGHSNSCDLQSGNCGDCMHNTFGDRCERCQLGYYGNPLQGTPNDCKRCACPLSEDSNNFSPSCQLKSYNYMDLNPQFELIEHAEYICTQCPEGYTGDHCQVCDDGYFGNPRQPGSSCQRCDCAGGPCNVTTGECITCRGNTEGWHCERCKLGYWGDPAVGCDPCHCHTEGSESGLCDSTDGQCLCKPRYAGQKCDECDVGYANVELRCPSCNCDPLGSLVQDRCDPHTGQCHCKEGVMGAKCHECQDGYFGMNAVAYRMDDLAALRQNSDSDDDEWELVPDTEDPNSESTVACEECHCSSVGSLSSDCDKRTGQCACLANVTGRRCDKCRPGHWNLTAGEGCRDCRCDPHGSRGHECNPWTGQCDCKIGVGGQHCNECTEGFFGFSTEGCQRCSACRSEGQVCDPHNGRCICPKFTRGLGCGQCVPGTWGWQARLGCRECECDHIGSIGQQCSTGDGQCQCREGYSGRKCDTCAIGYFGYPECRRCGCDAEGSFTQADGSIACDSNGQCPCKSLVVGLKCDTCMQSTFGLSAQNPEGCTRCFCFGRSGECEQSDLSWGHIRMAESRNLSVQQIRPHSVPSSDYEYIVVVQMEGSSFHREDAEIQRMNDLSLVPKSTGNVSIGAYGQFYHPLYFQLPPQFYGDRTSSYGGFLYFTLITEGAHKPLERNILGQYPLVQLHAHSKLLLDFYEYEEFEYSLNVTHRVPLHESFWKYHHTSQAVDRNTLMAALQNIRHIFIRAFAFADFQEVVLQNVHMDAAIYIKGSTNLIAKGVERCKCPKRFDGLSCQDPGRSFYRWRNTTIVESVFIEDLIGRAAPCHCNGRSSDCDRETGVCQNCRGNTGGDHCHQCAEGFYGDPNSPHGCQACPCPETNRNFARGCNVWDGEVSCVCKPGYTGRLYGIQTEGCDVETGRCYCREGVTGLKCDKCQAERHHLVDNGCKICDNCTLLLLDYMELVGNKLRRGMHNMDLTGIPAPYRKLSEYESAYEKWNGRHWDFSQTKRRLQDYDSADILKLEAHAENLKFQSRKAVATIGKREFAIKSMREDAVTQQHSVGLLRSEILQTLSDLHGYGKSAHYLSLPTALKQARFYLQAIREHDQMVQGIRSTNDCAWKHFYAMGNASDASFDESGRLEMLWRDLNQTNHRVVDMRLQVDRVQEVENEAEDVLEHVRNLSIRVGESHQELDELNQRISDHLDPGYLEQGEGLLRLTVQRQIMLNGHLNQLDGYRILLNTTLGVKTEQQREVRKHWLPKAEKHASHLLARSNEYARKFQPTRNGARIAMLASSAHSNITEAINDARLASILAKERVYEAQRTLYPSDGSSMIERAKHSLHRSKQLQQEALKQMHKSNVLKDKLHRQEQQVEGIKSTIYDSGLRTNNISGQLQGLSDGSARRQAKDSLEMADRTGEQMRAELQKAKDMQKSIQNMRNSFSNLEPDWEIKLGMAQENISLTQTNLRLANVSLSYLEQQAEKEQQVFEVWNNSMAQQLQQLRDQIAKARHAAEAIDVSLESLGPKCIRSYLPASYGLSTSNKIRMSFALSNHLESSPLIHLASSEGRHITLELYKRRVRLVWNLGGTTATVTHPMVVHTRDPKYDDAWYHVEANRTLNLGSLVVRRMNNYGELTPPNPVIITGSTDTEHTRFYQSRSDRISLGGFASKDLQFTPGLNVVVHQVEVDNKPLGLWNFVTSEGSCGGSMVGAKESSASSTARHFNGLGYAQLMKTRPRPTRKNLFSVQMTFRTLDENALLFLAVDDKNNRSVSVTLSRGRIMFRIDYGDESKLEINTTKKYNVGQWIKIEAAREFSAKRSTENGMLRVNNDRPISGAPTLPAPGADNPFLGCMKDVQVNGETYDPLESSSYYGVEPSCKNMITKAGFSGNGYLELPSQSLRKRSNTALVFRTLQPDCLLLLAAYPPEILGDYDAKDIKGNFSISLVDGQLHVWVNSGRSFIKMSSNSSQMNDGEFHVVHLIKTGRKLELMVDDELQEIRNLNGNPTVVSLPRDAGGLYIGGAPPHESYTPLAPTFVNLEGAIRDVVFNNRTINFNDALTFANVQIGRNGPLMGSLKGGLYDVLLKTEPMIGKSFTASPEGCKRIGSYSYEPNAFKFGDDIYSYSQLKLPERHFWQRNFHLSFDFRSFYPNGMLYLSPGSKEKPKHYVALVLKDGQLVLVVRGRRREELQLTAKLNDGEWHRVTISCHDRKVTMSVEIGRTDQKTSAQMKLPKKIGASQLLLVGGLPQSPVKVSSDLYVRLEPFKGCLRRVSINNNTQDLARPGKHSNVGQCFPTVERGSYFPGDAYAIYKKNFNVGKYLDLETEFRTSELSGILLSVSDPNGFPALSLELHNGNIIFSCDPGNGAPMRVESSLPTKYALCDNKWHNISALYDGEQIVLRIDQLPAVISVGNQGNAGKVQTRSPLYIGGLPESAPSGSLISRENFKGCIRHVSIRNERRDWIEMEDLRNVLLSECLVSSDES

SEQ ID NO: 37921 - DNA, 8433 bp, DROSOPHILA
aaataagaaacacttacacaaactcatagaaacacatggaacattggtatgtatgagtgtgcagaacgacatgaagatccgctatgcaaggcaaattatagaatttaattatataaattaattgctaaaattatttaaccacaaataattatgactaaaccaacataaatactccaaacgaacttgatggcttgcaggagaaatatttatacggaatacttaaatataatgtaatgtgtggcatttgcattgaagagtaaactaattaaacaaacacgaggacaacacaaatgaaacaagacattttaaaaatcgaattaataaagaatttatgagaattatatgtacattacaaacgcttgaatatttattggggcttacatctggcaggaattaataaaatattctttttttttttagttagatggcaaaccaaatagagttggtaaaaaaagaaggtaaggaagagtattgatgtttcgacattaatgacttcctgtcataatcacagtaactcaataggtctcacaggtctcaataggtgttgttgtcaaaagcatcatacagtatgatttctgaaatcataatgctgcttaagaacacaaacgagacatcattaacccacaaacaaataaattaatactgaaaactcacagctattgctagtttctcgttaatttaaaaatgcctttgtgatgaaaggtcttcctgattttaaatgtaatatacatttttcttacatatccatgtagatacatatgtctacacaactctacataattttagtactcttgctcacacagagatggcgccaacacttaactaatttttgttataacctatagatggggagatgcattccatgctcaaaatcattccatgctcaaaatcattccattatcctgatttgtaatcctgattatataatacaaactcagttagatttgttgcagaaccaatgttttaattgtaattaaatgtgatcacatacatatgtacattatccaaaaaagtttccgaagggtagtggtggtctaggcggtggtcgaggaaatgctgggatcggtggtggaggcggaataggtagtatagcaattacagcagaatcagcctctggcaaggatccaatgaatggaaatggtggaggtggaagggggaagcgtggcggtggaagcgggaaggctggaggtccaatcacttcgtggtggtgatggtagtgatgttgggcctgtgggttggagggagctgttgttgtggttgttaattcttcagtggatgtcgataatgttgtggttgttatttcttcagtggttgtagacgcggtgtttgagttgtcctcagtagttgttggagctaaagatgtggttgtgggagatattgttgttgtcaattcttcagtagtagtaggagaagcagtggttgttgttgcttcctcggccgttgagcttgtagttgtagttatttcttcagttgttgttgaagtcgatggctcttcagtcgttgtagaagagactgccgttgtgggagcggccgtagtcgttgttttgtcttcagtagttgttgttaattcttcagttgcagtaggagaagtattggttgttgttatttctacggtcgttgtcggaccgagtgtggttgttgttatttctgcagtgctagtaggagcaagagtagtagttgtaatatctttagtggttgtgggagcggttgttgtggtcgtttcatcagtagatgaagcagaagtcgtagttgttatttcttttgtcgttgtgggtgcatttgtggtggttggtatattatcagtggtagtaggagcaggtgtggttgttttcaagtcttcagctgttgtaggagatgctgcagtggtcgtgatgtccttcgtagttgtggaatcagagatggatgtcgtagtcgtcgtacttaccaaacatattggtaagtacggaaaatctttacactgaattgagtccgttgtagttattccttctgtcgttgtgggtgcatttgtagtggtcgatatattatcagtggttgtaggaacaggtgtggttgttttcaagtcttcagctgttgtaggagatgctgcagtggtcgtgatgtccctcgtagttgtggaatcagttatggatgttgtagtcgtcgtacttaccaaacatattggtaagtacggaaaatctttacacggaattgattcacttgtagttattccttttgtcgttgagggtggatttgtggtggtcggaaaattttctgtggttgttttcaagtctttagctgttgtaggtgatgctgcagttgtcgtgatgtcctttgaagttgtgaaagcggattcggttgattgtgcacataatggtaagctcggaaaaataatacacggaattaattcagttgtggttgtttgcgtggttgaaatggatatttcaagtgcagtcaacatgaaaataactagaatccagcgaatgatctacaaaattaaagtccatgaataagtttttaaacccagcagaggcgaccttaccatcttgagcttctggcattcactaaatcctcgaaaatagttacaactatatatgtacacccaaggtttcaatcgtctttgttgtgattttcgataacctaatgacagcacattcaccctcgtcaaatgcaaatagtaagtgcagccagaaattgaaattagatagccgttgtctatttttataactgattttttaagagcctttttagtttgcgtagtgctatcgttctgtaaaaacaacaacaacacatgctttgtctgtctttcaattcttttgaaataaataaaagaaccaaaagatatttcttaactatattttttatttattttacagaattttgcaaattaatttgcacatgatttaatgccaaaaataaatatatgtgaacttagcttagataccaatcagattccaactgtcttggcttctttttacatattctctgcttctttcttaaattgaactatttgtaatgactgttttatgaaggcgaaaaagaaaaatacagaaaagtatatggaagcaccaaatcgttgcgtatatctcttatacatgatggatttgcaccagttctataaaagattgtaatttcttaagtccttttaaggacgttggcaagatttcactatcaattttggatgtggttgatgaaactcctcctcgcttaaactaatcttaaggcttaaaccaaaaactgcttaataaagggattctccgaccccggcagctttaatctcttcacgccaagactccatccagggcgtgaatcactccattcgtggctggaatattggatgtgaccatctgtgcatcgttgaccttaatcttgcccgcggatgtcttctggaggattacggttttgccagtggacaaagagtccttaacctggtagaaacgcataccagcagagaaaagagccccgggaacaatgtgcttcatggcaaactgttcggcagtatctttgtcattgtacagcttctccagtgtatcagaatccagttcgctgaagcttttgtccacaggagcgaaaacagtgtacgtcttgacacctgaaaattcacattcattagaaaagattttagttttggcttcaacattttctaacccttgctctgaagcttttcagacagtccagaggtgtacagaatcttcaggaaattgctgaagcgaccctcacgatcagactgcagagtctgcaggatatctccaacgggcagtgggaacataacgcgatcgactgcgtgggccactccttgcgggatcttgatgtcctttttgttcagcacaaccatggctccgttgatggtggtgagctacaaaaataaattataaatgtgaagtttttagatttcattgaattattgccgtcttacagtcacatcattccactcctggtcgtgcatgttgtactggttaactcgcagctgtgttccagccagggaaacgccagtcatctcgtcctgcagggtggcgatctcgaaagctcctgggatcacatgatggagtaggagctatgaaaaagagaacgtgtaagacattatatttttttatattttagtaagggtcaacttaccccgctcagcaatctgggattggactggaacttttcctcagctctttctggtcctcccaactgcaccaaaagattcttgaaggctttatcagtgggaacaaagatggtatacggtccggtttcgttgagtatgctgtccagacccgactgccttagatacttggccatggcgaaaagtccgttagtcttcaatatctggaggaggtcttcgctaggattggacagcaccgaactggttgggggatttgcttgagcggccttctcggtgttctccgtctcctggacgagggcatcggcatattggggaataggtggcaggagctctgcattgttcgccacatcggacagcctctcggtcaccaccggcaagtgggtggatacaccttccagatatggggaaactgtcactgtggaacctccgtaaatgggagatgtggtggtgcggatcagactagcagcatttacatgactggtgctgctctcgaaaatcaaattgtgccgagcggttgtgggagcagtggttgtggtggtggtggtggtggtggtcgaggtcctcgacgggtgatactgcctgtgattgctgggtgttccacgcgaaatgaaaggcgttggagtagttgtggtggtggtagttgtgcttgtggtcgtggtgggtgcacgcgtggtttgaataatcttgccgctcttaatctctaccagctcatcgttgggcaatgttaggcgggaaaccgaaggcggcagcttaatttctccacttctgatgcgctccagaatgctttccacttcggatccggtttgcttggtctccttctctccgttggccttcaccccttggattttgaagctaccatcggtttgctcctctaggtaaacgtaggtggccttcttcttgggcggcaaagttggtggtgcagctgtggccggtgcctgtgactttgggctgagaccctcaatctcatagccatcgggaatgagtccacgcttggccagctcctccaaggatggtggctcatcggaatccgaggttatgactgcggaactggcaatgctattggctccattactgatgccctgaatatcaccggcaccaccgccgtagagagcggccaagctagagaggtcaacaccaccgggcagagagccggaaggaagggtgtccgactcctgaggatcgggggaacgcagaatttgaacctttccaccaccgggcagctctagatctttgctcttactgggagccacatcactcaaacttagcttggtttcgccacccaacgcctgttgagctagcaaagtttgcagttgctcctgggagtatgccttttgcccctggaccaaattgggatctgtggtacgaatcacctgaacccgctggccgttgggcagaaccaggtccatctcatcgtaggtcttgtttcccgtcagtggttgttgtggtgcttcggacaaggctgccttgagttgcttgagcaaatcatcccgggcaatggtcttcacgggcttcttgcttttctgacttgggaattttcccagttccgacttaacctgagcatagatgttcttctttggtgtggttgtggcctcagtggttgtggtcgtcgtcgtggtggtggtcgttgtcgtcgggtgctccttgtagtactgttgcagagcactgttgaactgattgtactcagtgggatgagccaccggtcttccacgtgccggtgctgccacatatggtgagttctggtagttggcattgtgttgggtcacaatggtcggcaggatgtgctgcttgatttggtgctgcttcagaaggaattcttcgtgctgctgacgcaccttgtgctgcgacttttcgtactgcttggccacaaattgctcgtgcttctggattagcttttgcttgtattcctggtcagctggttgggcctgtggctgaattggcgatggagcattaacaaattgatgctggaactgaggctgctgcactggctgctgctgttgctggaagcttcctctggttggctccgggaagggtgtggcctgaacattgctaaatatctgcggcactggcaatcccaattggggagtcagctgatactgctgctgctgactggactgtggctggtagttaaactggctctgctgctggggaatcgtctggaaagtgggcacgggtgcctggctgggcagcttctgtgtggtctggggcagaacctgtggtccaaactgctggggctgctggtaggcaaactgctgctgttgctgttgctgcaattgctgttgctggtaagtttccggagatggttgtggcgggaaggcagtggactgcaagcgggaatctgggggaatacaacgagaagggtaacaggttgaagatcaggaaagatcttgagtctgacttaccaaattgcttatggcgctgctgatgttgttgctgatttggctgctgctgctgggagccagcaaagttgcgcaagtccaagaagttttgatgatgcagatccaaaccggcggcaggagagggcaactgctgctgctgctgcgggaactgtggagcggtttgaagttgattttgggtcgaacgttggaactgctgattgctgtggggctgctgatgctgctgctgctgctgctgtgggaactgcccgaagcggtgctgctgctgcggctgctgctggtgatgcagatgcgtgtgctgcggatgggggccatgttgggagcggtggggaatgggcagctccacgcccgcctggacaaagttttgctgattgtactgctgcagatttagctgacggcgctgcgagttgtgaaagggcggctgcaatgaggggaacaggtgagttacaactttccatggcgatcattgcatcatctcggccagagcagaaaccagctttgcctcgagatccctcgacagttaaaagataagtcaaacattgagtgaacgctcctaaaatagacgtgaaccagtttcacaggcggctgtaatagcaatctccgctccacttttgcaggctaaactggactgtgtgtctggtttggctaggggtccttattggcgggcagtcggtcaagttgaagtccataaaaaaaatggcaaacttgtttgcgccacgaaaaaatacgtattacggaagatgaaagtgcaattgctgggctttcttcatttaaatgatggtaatgtcacttgtaaaatttgattgcccatgaaagtaataccaatgatgcacacagatttcagatccgagtaagcatgaatttatgtaatgacagtttcatgctccctcccccaattgaagttgctctattcacttgctaacccacttgtattgttttccatctgcagatgtcattagagtttctctctcaacgagcaaactgcttatacaatcttgtagttaggaccgccctggccgaactagccgtcatacaccgcgtatacgtattgccaattgaggggccaagcaaatggtcagtcgtcgagcaattgttacaaacagttattcaacacaaaatccacaggagaaggtgaagctgcattggctgccgtgaatattgtagatgtacagagttttttgtcttatggctaaactgctgtatgtataatttaattgcctgggccataaatcttctttttttcccgccgagctctgtcgatgccagattgaggcgttatcaggctactcgacccctgactctttcttttcgcatggtaattatgttgttgccgctaatgccgcacctcatcatgacgcgatattgttgctccgatgatgccgtcaaaagctaactgtgggatggggcagtgggattatgcaacctaatcggaggggcaatgattaaattggagaagagatgaaaatgctggagcaggtgaatgaaggagttatggcgctttcttataatggaataaaagcttgctcaattacaaactcagtcattctttgggtgggtatattttctgtgaaatcacttttaggccgcctagggtaatcggaaaaaatcgaatgtcttgtcatgcatcttcatcgtaaatttctgtttttctacgcctacaattttctttccttttgaagatgacttttccctacaaattgcctggccggtgaaaacgtcaatcagtcatcaatcaagtgccaaagcaatcagcatcgtcgtcccaagagccactgaaccccactcctcatagggccccacgtatttctctttcaatttctgtctatccgcaaaagtttgtacgccatgtatcgaacatgtcaatttcgtggtttagcgtattcattcaacatttccacggcgcttgtatgcaaaacgctttcgtttttaaacgccaccgatctgtggccaacaatt

SEQ ID NO: 37922 - DNA, 4287 bp, DROSOPHILA
atgacatctgcagatggaaaacaatacaagtggccgccctttcacaactcgcagcgccgtcagctaaatctgcagcagtacaatcagcaaaactttgtccaggcgggcgtggagctgcccattccccaccgctcccaacatggcccccatccgcagcacacgcatctgcatcaccagcagcagccgcagcagcagcaccgcttcgggcagttcccacagcagcagcagcagcagcatcagcagccccacagcaatcagcagttccaacgttcgacccaaaatcaacttcaaaccgctccacagttcccgcagcagcagcagcagttgccctctcctgccgccggtttggatctgcatcatcaaaacttcttggacttgcgcaactttgctggctcccagcagcagcagccaaatcagcaacaacatcagcagcgccataagcaatttgattcccgcttgcagtccactgccttcccgccacaaccatctccggaaacttaccagcaacagcaattgcagcaacagcaacagcagcagtttgcctaccagcagccccagcagtttggaccacaggttctgccccagaccacacagaagctgcccagccaggcacccgtgcccactttccagacgattccccagcagcagagccagtttaactaccagccacagtccagtcagcagcagcagtatcagctgactccccaattgggattgccagtgccgcagatatttagcaatgttcaggccacacccttcccggagccaaccagaggaagcttccagcaacagcagcagccagtgcagcagcctcagttccagcatcaatttgttaatgctccatcgccaattcagccacaggcccaaccagctgaccaggaatacaagcaaaagctaatccagaagcacgagcaatttgtggccaagcagtacgaaaagtcgcagcacaaggtgcgtcagcagcacgaagaattccttctgaagcagcaccaaatcaagcagcacatcctgccgaccattgtgacccaacacaatgccaactaccagaactcaccatatgtggcagcaccggcacgtggaagaccggtggctcatcccactgagtacaatcagttcaacagtgctctgcaacagtactacaaggagcacccgacgacaacgaccaccaccacgacgacgaccacaaccactgaggccacaaccacaccaaagaagaacatctatgctcaggttaagtcggaactgggaaaattcccaagtcagaaaagcaagaagcccgtgaagaccattgcccgggatgatttgctcaagcaactcaaggcagccttgtccgaagcaccacaacaaccactgacgggaaacaagacctacgatgagatggacctggttctgcccaacggccagcgggttcaggtgattcgtaccacagatcccaatttggtccaggggcaaaaggcatactcccaggagcaactgcaaactttgctagctcaacaggcgttgggtggcgaaaccaagctaagtttgagtgatgtggctcccagtaagagcaaagatctagagctgcccggtggtggaaaggttcaaattctgcgttcccccgatcctcaggagtcggacacccttccttccggctctctgcccggtggtgttgacctctctagcttggccgctctctacggcggtggtgccggtgatattcagggcatcagtaatggagccaatagcattgccagttccgcagtcataacctcggattccgatgagccaccatccttggaggagctggccaagcgtggactcattcccgatggctatgagattgagggtctcagcccaaagtcacaggcaccggccacagctgcaccaccaactttgccgcccaagaagaaggccacctacgtttacctagaggagcaaaccgatggtagcttcaaaatccaaggggtgaaggccaacggagagaaggagaccaagcaaaccggatccgaagtggaaagcattctggagcgcatcagaagtggagaaattaagctgccgccttcggtttcccgcctaacattgcccaacgatgagctggtagagattaagagcggcaagattattcaaaccacgcgtgcacccaccacgaccacaagcacaactaccaccaccacaactactccaacgcctttcatttcgcgtggaacacccagcaatcacaggcagtatcacccgtcgaggacctcgaccaccaccaccaccaccaccacaaccactgctcccacaaccgctcggcacaatttgattttcgagagcagcaccagtcatgtaaatgctgctagtctgatccgcaccaccacatctcccatttacggaggttccacagtgacagtttccccatatctggaaggtgtatccacccacttgccggtggtgaccgagaggctgtccgatgtggcgaacaatgcagagctcctgccacctattccccaatatgccgatgccctcgtccaggagacggagaacaccgagaaggccgctcaagcaaatcccccaaccagttcggtgctgtccaatcctagcgaagacctcctccagatattgaagactaacggacttttcgccatggccaagtatctaaggcagtcggccttcaagaatcttttggtgcagttgggaggaccagaaagagctgaggaaaagttccagtccaatcccagattgctgagcgggctcctactccatcatgtgatcccaggagctttcgagatcgccaccctgcaggacgagatgactggcgtttccctggctggaacacagctgcgagttaaccagtacaacatgcacgaccaggagtggaatgatgtgactctcaccaccatcaacggagccatggttgtgctgaacaaaaaggacatcaagatcccgcaaggagtggcccacgcagtcgatcgcgttatgttcccactgcccgttggagatatcctgcagactctgcagtctgatcgtgagggtcgcttcagcaatttcctgaagattctgtacacctctggactgtctgaaaagcttcagagcaagggtgtcaagacgtacactgttttcgctcctgtggacaaaagcttcagcgaactggattctgatacactggagaagctgtacaatgacaaagatactgccgaacagtttgccatgaagcacattgttcccggggctcttttctctgctggtatgcgtttctaccaggttaaggactctttgtccactggcaaaaccgtaatcctccagaagacatccgcgggcaagattaaggtcaacgatgcacagatggtcacatccaatattccagccacgaatggagtgattcacgccctggatggagtcttggctacgacgactacgacatccatctctgattccacaactacgaaggacatcacgaccactgcagcatctcctacaacagctgaagacttgaaaacaaccacacctgctcctactaccactgataatataccaaccaccacaaatgcacccacaacgacaaaagaaataacaactacgacttctgcttcatctactgatgaaacgaccacaacaaccgctcccacaaccactaaagatattacaactactactcttgctcctactagcactgcagaaataacaacaaccacactcggtccgacaacgaccgtagaaataacaacaaccaatacttctcctactgcaactgaagaattaacaacaactactgaagacaaaacaacgactacggccgctcccacaacggcagtctcttctacaacgactgaagagccatcgacttcaacaacaactgaagaaataactacaactacaagctcaacggccgaggaagcaacaacaaccactgcttctcctactactactgaagaattgacaacaacaatatctcccacaaccacatctttagctccaacaactactgaggacaactcaaacaccgcgtctacaaccactgaagaaataacaaccacaacattatcgacatccactgaagaattaacaaccacaacaacagctccctccaacccacaggcccaacatcactaccatcaccaccacgaagtgattggacctccagccttcccgcttccaccgccacgcttcccccttccacctccaccatttccattcattggatccttgccagaggctgattctgctgtaattgctatactacctattccgcctccaccaccgatcccagcatttcctcgaccaccgcctagaccaccactacccttcggaaacttttttggataa

SEQ ID NO: 37923 - protein, 1428 aa, DROSOPHILA
MTSADGKQYKWPPFHNSQRRQLNLQQYNQQNFVQAGVELPIPHRSQHGPHPQHTHLHHQQQPQQQHRFGQFPQQQQQQHQQPHSNQQFQRSTQNQLQTAPQFPQQQQQLPSPAAGLDLHHQNFLDLRNFAGSQQQQPNQQQHQQRHKQFDSRLQSTAFPPQPSPETYQQQQLQQQQQQQFAYQQPQQFGPQVLPQTTQKLPSQAPVPTFQTIPQQQSQFNYQPQSSQQQQYQLTPQLGLPVPQIFSNVQATPFPEPTRGSFQQQQQPVQQPQFQHQFVNAPSPIQPQAQPADQEYKQKLIQKHEQFVAKQYEKSQHKVRQQHEEFLLKQHQIKQHILPTIVTQHNANYQNSPYVAAPARGRPVAHPTEYNQFNSALQQYYKEHPTTTTTTTTTTTTTEATTTPKKNIYAQVKSELGKFPSQKSKKPVKTIARDDLLKQLKAALSEAPQQPLTGNKTYDEMDLVLPNGQRVQVIRTTDPNLVQGQKAYSQEQLQTLLAQQALGGETKLSLSDVAPSKSKDLELPGGGKVQILRSPDPQESDTLPSGSLPGGVDLSSLAALYGGGAGDIQGISNGANSIASSAVITSDSDEPPSLEELAKRGLIPDGYEIEGLSPKSQAPATAAPPTLPPKKKATYVYLEEQTDGSFKIQGVKANGEKETKQTGSEVESILERIRSGEIKLPPSVSRLTLPNDELVEIKSGKIIQTTRAPTTTTSTTTTTTTTPTPFISRGTPSNHRQYHPSRTSTTTTTTTTTTAPTTARHNLIFESSTSHVNAASLIRTTTSPIYGGSTVTVSPYLEGVSTHLPVVTERLSDVANNAELLPPIPQYADALVQETENTEKAAQANPPTSSVLSNPSEDLLQILKTNGLFAMAKYLRQSAFKNLLVQLGGPERAEEKFQSNPRLLSGLLLHHVIPGAFEIATLQDEMTGVSLAGTQLRVNQYNMHDQEWNDVTLTTINGAMVVLNKKDIKIPQGVAHAVDRVMFPLPVGDILQTLQSDREGRFSNFLKILYTSGLSEKLQSKGVKTYTVFAPVDKSFSELDSDTLEKLYNDKDTAEQFAMKHIVPGALFSAGMRFYQVKDSLSTGKTVILQKTSAGKIKVNDAQMVTSNIPATNGVIHALDGVLATTTTTSISDSTTTKDITTTAASPTTAEDLKTTTPAPTTTDNIPTTTNAPTTTKEITTTTSASSTDETTTTTAPTTTKDITTTTLAPTSTAEITTTTLGPTTTVEITTTNTSPTATEELTTTTEDKTTTTAAPTTAVSSTTTEEPSTSTTTEEITTTTSSTAEEATTTTASPTTTEELTTTISPTTTSLAPTTTEDNSNTASTTTEEITTTTLSTSTEELTTTTTAPSNPQAQHHYHHHHEVIGPPAFPLPPPRFPLPPPPFPFIGSLPEADSAVIAILPIPPPPPIPAFPRPPPRPPLPFGNFFG

SEQ ID NO: 37924 - DNA, 2171 bp, DROSOPHILA
tttggggcgccaagttcgcccctttcgtttctggcgcgaccatggcgatatccttagccccacgattccgttttcgctcaccaatccttctgggtaacctccctttccttcccgattcctgtgctggctgcttttgggttttttctttggatgccttttcgtcctctggctgggaaccgccatcttgttgttttgctgaaatgcgaaggacatttgatgtaatgatgcctggaggcagccaccactgtgtctatatgtatatgtgtgtgtgtgtgtgtgtatttgagggatcagctcggtgaggtcctgcgtccttttctgcaggagcacccccgagtcgccagctccctttgtttgagttcacttaagttcaacgcttgggtccaggtcctcagatccccttcgccagcgccgacctagccccattctattgcaaagttctgccgttgctttcattatcctattggcgtatccttgccctgactcatgtgggcgtcttgagaagccgtcgccaaggcacagggaaaaaaggtccccgcagtgggcaacgggaaaaggaaagcagaataaagccaaaaacgtggcgagggtgagtaaaaggacaggaaggacccagagcgaggggaaaaaaataagatgaattacttcttttggccgcagcgccaatgaccaaaccgaatctggcaaacaccccgcaccttggatggagtaaccacccgcgtatccaacctttgccgccaacctaaaaacaggacgaccagcagaccctggctggtcatcaattttcgttctggccgttggaagagcaaggcaagaagcattccaagaaagctgtccgcttcgtttttcgaacactctgcgcgggtggggaaagggatttggtgggacagcaacgaaaaaaaagaagggcaggagggtcagaatccaaggcaaccaatgtccaatgtccagtgcccagcgagcatcagcagctacgctcggagattagatttgatgggttttagggtgccccagcgcatgtgtcccattccggctcatcctgttcagttccattctgttcggctccttcgccaaatcccatactccgtccctgtcccttgctcgcttcgtaggtctccatctcatcgccttgactggctgcaagattttcgagggatatgtcttgggccattatatgtttcgaattttgttctttttctttttccttgcccttgccgctggcgaggagcacgcaatttatacttgtatttcactccgcttgcaatttgttggttctatggccaggatcttagggcttggaaatatctgcggaacaagtttacctggtagttagaagcccaaacaatttgaattttctccaatgaaaaaggaatcaactttcgtaacttactggtttttatttttttttcccctcctaactgggcattataaacatagaaaaactcagaaatattctttgggcgtttagctactgagagctcaactttttccaaaaagataacgtatctaaaaatgttggtttccaaagccatattacttcgctaacttaaggccattcctacagactgacacatatgtataactaactatatataacaatatgtatttgtcatataatcttctacgttaaatacaatactttcgtattttgactgcaaatcgtatgtattcaattctctttataatatgttactagaaaatagtcaattcggttgagtatcatcttaatttttgagtacctccccaaacttaaatattaatttctaattttcaacactgggtggttcacattaccattgccgaaatatcgctgtctaatgtgcatgaataagcatacactgatttgctgaaaatcaggcagatctgttgagtgatcaactgcagttgcaaatttaatgcggcccccacaagacagagaaaatactttgcacaatcaatggccgaccaatcaaatgttcaaggcaattagtataaatgctttttgcagggagaggtcttcttaaaagtggggctttaataaacatatattaaaattttagttatttatgtaaatctcgggcgggttgacagagcaaggcaaaattcgtatctcgaaatatattctccacattatgtattgaagatatctcaagaaagtcccctcctccgttcgacttggcaaaattaaatgg

SEQ ID NO: 37925 - DNA, 171 bp, DROSOPHILA
atggcccaagacatatccctcgaaaatcttgcagccagtcaaggcgatgagatggagacctacgaagcgagcaagggacagggacggagtatgggatttggcgaaggagccgaacagaatggaactgaacaggatgagccggaatgggacacatgcgctggggcaccctaa

SEQ ID NO: 37926 - protein, 56 aa, DROSOPHILA
MAQDISLENLAASQGDEMETYEASKGQGRSMGFGEGAEQNGTEQDEPEWDTCAGAP

SEQ ID NO: 37927 - DNA, 3198 bp, DROSOPHILA
tgttcaaatattaatgctttttgtaacatattttatgcgtagttgaattttacatatgttttacgcctaaaggccaatgcgcaactattatttgcttttttggctttaacccgcatatttagacttaagaaaaaatgcttttaccacgatttccacaccatttccactcgataaaacaacatttttttactaatctagtttcttttttctctgacatgcttggcttataaatgtaacccaactaatgcaatgctaacgagcgagaaagacaatgacagaaatgcacttttgtcagccgaacaactaccaccaggctgtcagccacacaactacaaagaactgcaaccgaatcacccatgaccaacacattgctttcggccaccaaatgcgttttgcactgagctgcgcacaaaattatgcaatagtttttttcgacgtgctttaatcagtttgccgtgaaattccaattgaatttctcgttccgcgctgcgttttttatatatttataattttgatctcctaatgcttgaattatttttgactgcaagtatttttttcccttgctgaaatgttttgtttatcatgcttagtttccaaatgttattattttatattatttcgttgatttttttattatcccaattatatttttcctttcttttattttttacagctcagttgttagcgaaaacaaaaaaaatgtttgtaataaattagctatacaaaactattaatgctttttaattaatttggccaacgatctgaaaataaagaattattaatttcccaaaatgtacacatgtatgcgagtagtttttgaataatttagagcgctttgtagttgctaacatatgtatatttaaatttgccaatatatatatatatatatataagcaggtaagtttgtacaatattttccattccatttcgattaaactgaaagttatgtatcaaatcagacacccttatcaaattcccacctacatatataaaggttatatttcagtgatagattgatttagaaattttattacaatttctgggtttagcccaggctgataagcttatttattaaactgcgctaagcattgtttacaaaatattgcgatgatttccatatattaatatttataatgagctatttacttggtcggcctctgctgctgagatccttcgttggttcctttgactgagcttagaacaaatctggcagttagaattctgccattcttatccacaatagtcttgaccacttcaccattcgaattctcaatttctgaggcactcagattcacttgtttcaaataatcatctatgactcgatctgatccgtcgtctcttggtaatgctgaactgaaccggggaactgaagtccgctgcgtggtggttgagtcaatcactggcacaaagacgggttccctttggcttggtcgggaattatatacatagttgaaatcaataggtccagtagatggggaacgagatggggaaaagactgaggtgttaggattctcggctggatggtttgagtctgtgttaattggaccaggctctctggagatgtcggggaatatctgcttgaatacattactgcctgggaccagaatgccgctataagttctagttgtggtggtcaccttgcgtcccgagctatccgtttccgtcttggttgtaactttcggagtaactcccgctggcagctcccaattcggaaatctcggaaattcagtgctaaatatctttgtctcgaaattacctgtaccgaagttggaatctccaatgggacggaactgacgaccggcactcggcacatactcccaatcttgctggggcttagagcctgaattatcctctagcctagcaggcagtattccctctgagaccttgcgtcttaaaatcgatctgaaatccggacctaactcataggtcaaagtggtgacttgaccagcatcgttttgagttctgataaccagcggctgctggctgtgccacatttctcgcaagccaacttcatctaaacctatttgcttggccgcattcaaaagttccggagtcggttcggcggataaagaagtggcagctgctccctgtgagcgaaagatgacgtcagtttcagatttctggagatttccatgacctaccttcagcttcagaagcagcaagctgacacagattgccagtagataggagtactgcatattcgatctttccgcgacacttgtgaatacttcgatcgacagaatcgaactgattttagaattctaatcgactgacctcgtcgcttctattcgcagtgtctactcaaaggttatcaacagttttcgcaaagtcgccattatcaaagagtgttaacagaatgcgtttcccaaagctttcataaaaacatattgtagtttcttcataagtttcttataacaaattgcttctggatcctggaaattcactttgttaaattgcgtttagaagttgaatcatactgtaatgaacaagaaactactatataagttttcaatacttatattgccactacaagaaggttcaatgcggtaaacatagatttatttatattatttatactaaacttttctgttaatttaaattgagcttttcttgttcacatatctctttatttatgtatatcattttccagtgcgactttgatagtttgccgcacccccttgttcgttctcattgctcagtgcaaaactggcacttagaacgcgtccttgtttgtccacgattgtggtgaccacctggccatcctcctctttgatgtccgcgacagtgagatccacctttgccaaaaagtcatcgattgtcgagtcagttccgtcgcctttgggtgcgagcgtgggcagcgggaccgaacttcgctcggttgatgttggttctgggactggaacccatatgggctccgtatccttcaagtttgggggtgccagggtaggcaaagttacgataggccggtgtgtggatgttggatttggcagccatctatcactatccgattcactattgggaatgtgttcattttctttggggacgtcttgagggcgtaaattccacgcatcctgctcatttacccgcggatcttctcggcgaggattattttcattactgcgatcttcttcgggaggaatacgttgcggcttaaattccgggataaacggaaaattttggaagacgttatagtcagga

SEQ ID NO: 37928 - DNA, 1144 bp, DROSOPHILA
atgcagtactcctatctactggcaatctgtgtcagcttgctgcttctgaagctgaagggagcagctgccacttctttatccgccgaaccgactccggaacttttgaatgcggccaagcaaataggtttagatgaagttggcttgcgagaaatgtggcacagccagcagccgctggttatcagaactcaaaacgatgctggtcaagtcaccactttgacctatgagttaggtccggatttcagatcgattttaagacgcaaggtctcagagggaatactgcctgctaggctagaggataattcaggctctaagccccagcaagattgggagtatgtgccgagtgccggtcgtcagttccgtcccattggagattccaacttcggtacaggtaatttcgagacaaagatatttagcactgaatttccgagatttccgaattgggagctgccagcgggagttactccgaaagttacaaccaagacggaaacggatagctcgggacgcaaggtgaccaccacaactagaacttatagcggcattctggtcccaggcagtaatgtattcaagcagatattccccgacatctccagagagcctggtccaattaacacagactcaaaccatccagccgagaatcctaacacctcagtcttttccccatctcgttccccatctactggacctattgatttcaactatgtatataattcccgaccaagccaaagggaacccgtctttgtgccagtgattgactcaaccaccacgcagcggacttcagttccccggttcagttcagcattaccaagagacgacggatcagatcgagtcatagatgattatttgaaacaagtgaatctgagtgcctcagaaattgagaattcgaatggtgaagtggtcaagactattgtggataagaatggcagaattctaactgccagatttgttctaagctcagtcaaaggaaccaacgaaggatctcagcagcagaggccgaccaagtaaatagctcattataaatattaatatatggaaatcatcgcaatattttgtaaacaatgcttagcgcagtttaataaataagcttatcagcctgggctaaacccagaaattgtaataaaatttctaaatcaatctatcactgaaa

SEQ ID NO: 37929 - protein, 333 aa, DROSOPHILA
MQYSYLLAICVSLLLLKLKGAAATSLSAEPTPELLNAAKQIGLDEVGLREMWHSQQPLVIRTQNDAGQVTTLTYELGPDFRSILRRKVSEGILPARLEDNSGSKPQQDWEYVPSAGRQFRPIGDSNFGTGNFETKIFSTEFPRFPNWELPAGVTPKVTTKTETDSSGRKVTTTTRTYSGILVPGSNVFKQIFPDISREPGPINTDSNHPAENPNTSVFSPSRSPSTGPIDFNYVYNSRPSQREPVFVPVIDSTTTQRTSVPRFSSALPRDDGSDRVIDDYLKQVNLSASEIENSNGEVVKTIVDKNGRILTARFVLSSVKGTNEGSQQQRPTK

SEQ ID NO: 37930 - DNA, 2703 bp, DROSOPHILA
tgtttcactgacgggacgatccaaggagatcatcattaccgccggcggcgagaacataccgccagtgcacatcgagaacacgatcaagaaggagctggatgccatttccaatgcctttttggtgggcgagcagcgcaaatatctcactgttctgatcaccctaaaggtgagtcttcaatcgaatccaattggttggaaagtatttaattgttttttgatttccagaccgaagtggacaaggattccggtgagccgctggacgagcttagccacgagtcctccgtgtgggtgaaatcgctgggagtggagcacaagaccgtatcggatatcctggccgcaggtccctgccccaaggtgtggaagtccatcgaggatgccattaagcgggccaacaagcagtccatttccaatgcccaaaaggttcagaagttcaccattctgccgcacgacttctccattcccaccggcgaacttggacccaccctaaaggttaagcgcaacgttgtgtccaagatgtatgccgatgagatcgagaaactatatgcctagatttctcactgcaagatcgaaaccgatgatagccgcggaacttgagctttaatgtgaatttgaatttaacggacttccaagccaattgagtgccacttttaatttgatttaggctgatgttaactgttggatattaaactaagaacaactatggccctatgcctaggtagacacgagcttgccaacgattaggtccagagatcatttaattagtaactaagttttattttttatatactatttggttgtaccaactgaacaaacgaaaattgtttattgtctgaagagcaacaataaatttgtaattagattaactaccatttcggttgtgattacttcaattgcttgtttcagtatccttagcttttgttattaaaaaaaattaattcactttattaaacatctcaaacagttacatggctgattgattaccactggagattcagattggttagaaaatgatgcatttactctgaaacttatgattccggttcgttggccgcctcctcttctgcctcaagtcccttggcgagccgctcggcgacacgctgcatcagctcctccatgctcatctcgatctggacgcaggcacgtcgtcccggatcaaatcgctgctcatggccgcactgcacccgttcgcaacgcaggctcaggctgaaccagctgctcgcatccttgaatcccggccagcactcgcactcgttgtgggccacacaatggctgtgctccggacaaccaccctggcagacaggtcgacagatgagctggtggccagtggtgtggtggtgcgatggctcgtagccccgctggcaatggcagcgatccggctccgcacagtagctgtgggcggggcacgcctcctggcagactggctcacagaagccaaagagaatggttcgatatcccgggcagcacacctggatgttgtcccaacgcacccgttcctcgtacaccacatagctgtccaagtcgatgggatggctggcatttggaggacctgcacccgccatgcgcgtcttggccacgggcacctgatacttgacactgatgttcttctggcaatgaccgttggtgatggccaggctgctgacctccaccaagtggatcgtcatcaggacgaggaccagcatgggatacagcacttgttgcagcattgatgccattcgcttcggtctgggttcttcaagattgtgcgtacgtcgtcgcaagtgcactaaacgcagcagccgcagattaaagagaaccccaatcccgattcttctgttgctgctcactcggaaaaaatgtggcattccaaaaattaatcaaagaagcttaacaataaaatgtggcttcagtttcatgtgtatattacttcaacacatacagatacaatctgtgattttctaaacgttgtagactttatattacgacctgtaaaggttactgaaatacaacgaaaattcttattcattggaaataattaagaaactttccagtatcatagccaatgtttatataacggaaaactcacaaactatagatatacagttaagtcgcacttcgttatggctgatatgactatcctttattacctttattggtaaattagtattaaagttaataattcattcagtttttttttgtgtgtgcatcgtgccgttcgcagtcttaaaagtaataagtatgataagtcagtctgtgggtctgctattattatttctttttgcatcgcccgccgttcttatcaacagcattggaaatgtaccaagacgaccgtttggagagtggagaatcggccttgggtcgagcatgttggctctggttgcaggtgggttcgagacgatctcaagaacatgaaataaagtatctgtaactcatgcgaatagattgatgcaacatgctggatattccccttactcgtacattaaaggggtatactagacccgctgaatgttagctatggatggaacgaatgaatggatccttaagccatgtatatcatatattgtatattcttcattatgattagatctggttattataaatttaaaagaagcaatataattcgaacatacgtaactatcatctacacgaaatcagctgagcaaatgaatttcttcaaactggttctaagtttaagcatgcgtatgtaaatacttctgcgtctgctaa

SEQ ID NO: 37931 - DNA, 703 bp, DROSOPHILA
atgctgcaacaagtgctgtatcccatgctggtcctcgtcctgatgacgatccacttggtggaggtcagcagcctggccatcaccaacggtcattgccagaagaacatcagtgtcaagtatcaggtgcccgtggccaagacgcgcatggcgggtgcaggtcctccaaatgccagccatcccatcgacttggacagctatgtggtgtacgaggaacgggtgcgttgggacaacatccaggtgtgctgcccgggatatcgaaccattctctttggcttctgtgagccagtctgccaggaggcgtgccccgcccacagctactgtgcggagccggatcgctgccattgccagcggggctacgagccatcgcaccaccacaccactggccaccagctcatctgtcgacctgtctgccagggtggttgtccggagcacagccattgtgtggcccacaacgagtgcgagtgctggccgggattcaaggatgcgagcagctggttcagcctgagcctgcgttgcgaacgggtgcagtgcggccatgagcagcgatttgatccgggacgacgtgcctgcgtccagatcgagatgagcatggaggagctgatgcagcgtgtcgccgagcggctcgccaagggacttgaggcagaagaggaggcggccaacgaaccggaatcataagtttcagagtaaatgcatcattttctaa

SEQ ID NO: 37932 - protein, 224 aa, DROSOPHILA
MLQQVLYPMLVLVLMTIHLVEVSSLAITNGHCQKNISVKYQVPVAKTRMAGAGPPNASHPIDLDSYVVYEERVRWDNIQVCCPGYRTILFGFCEPVCQEACPAHSYCAEPDRCHCQRGYEPSHHHTTGHQLICRPVCQGGCPEHSHCVAHNECECWPGFKDASSWFSLSLRCERVQCGHEQRFDPGRRACVQIEMSMEELMQRVAERLAKGLEAEEEAANEPES

SEQ ID NO: 37933 - DNA, 4031 bp, DROSOPHILA
ttgggaaaaacgagcgccacgtttttctttctccgttctccgcaactgcctaaaagtatggtagtgaaaatgcaaaacaactaagcgccgggttaggggtgactttagccgtaccatcgtcatcttcgggttggtttagcccggcaacaggaagttcagccgggcaaatcccggctgaccagcaattgcgcaacttattgaggtaggcactctatggttatctgcaagatacgagcttcttcgggggctggctctgggctggcttctctggcatttgtctgtcattcggggctggagttcaaagttcaaagatgcccgatcaaccggtttgcatctggaccagcctgtcttcgactagaccctaagaccttcaagcatccgcatctcctcgagatcttctcggcgggacgttgatcagttgggcagtcagttgtgtttgaactttcattcggtcgcgtcgcgttcgctgttactcatttcttttttggcctttggttatttgttgggccgaaaagatctgaaccctgtttttcgtttttgtgggatttctgttatacttttaatattgttaaaaagaaaactcatcgttttgttgacttttttagttaaatatttgttcaaaaaatttgtgtctgatattttgccaagtttaacatacaaaaaggtatgtattaagtccagtgcaaataattcgtgtgtggaaatatttaagattctgattctatgaataattacaagagttttgagtcagaagtgctcaattaagattcgtgtcgtcttatcgtgatagtgtacaaacaaagttttttttatcttttacaggacattccgagaaatcccaccaaacgaagaattgaattcagctgaaattctaatttcacacaaaattcttcccaaaacaccccatgtcatcgattatcgcttgcagttgtctttgatttgctgttttttgagtcccttaaacagtgtgtgcttgagttgagccccccaaattcgcatcatggagcactcgaatggcagtggcaagcctcgtacagaccagtctgcgtcacctaacccacagtcctcggcgatgactgcctcgtcggagggttggagcagcaaaaggaagctctatgccatcgatgagcgcgaggagagctcgccagtgactgtgggcaaggtggagactgatttggcctacgatgcggatgtggacgagctggaacagccgacggccgagcgcgagatcatctacgagctgttccagccgtgggccctcagcacatatggcgatcaggccaagaccaagacgataacattgcgcaagaaggcgcgaattcttaaagccctcgagggcaaggagcacagtcgtcccgatagctccaagttccgcttttgggtcaagacaaagggtaagtgagatcaatggtatacaaaggcgctaactcatgtgcaatatccaatcgtgataggcttcactactaatcgacccgagggctttgaagaggcaccaggcagtcggcgccacctgaaaaatcttcctagctcggccattttgtcggataatcccgctgatgtggacctatttgccgcatccaccagcaagggattcggtcgaaggacctaccgcaaagtggcctgtgtggaagagttcttcgacatcatctacaatgtgcacatggagctgggaggtcgcagtggcatgcacgcgggtcaaaagcgcacctaccgcattgtgagtatagtgtttagattgtatttattcattaatagataattagtactcaaaacacaattcctttatatcaatttctgaaccgattctctttcgcagatcactgaaacctatgcgttcttgccccgtgaggcggtcacccgcttcctaaccatttgtcccgagtgcaagaagaaccttcgcccctcctcaccatcggggggtggaaaagactccgacctggccggcaatgagagctcctccgaagtggagaactacctcaattactcatcgcacacggagagctcgctggaggcggggccaactgccaagcgccgtcggcactcgagcgccgaaatcaaggcctcactggccagtggcttggctgtgggtgcgggagtcgccagcagcatgagtgccactcagctggatgtcctgtggactggagtgcccagaagtcgaagtccaaagcccccgatggcggcagaggcggctgttgaaaccacacctgttagcgtgcccaaaatccgcatcaagacccagttgcagcgtccgtcgagtccgcaagatcagtcccctgctgacccgaacaccgatgcccaatcccaatctcagatccaatcccagtcccaatctcagtcacagtcacagtcacaatcccattcacagccaagtggccaaggctttgatgcacagctgctaaagtcgcgggataatctgctgcgatactataacttcatgaggcgcttctatgccggggaaccggttttagcaccgcccatctacggcagcagcctgttgcagagcctcagctatccaaccaccatctcaaccgcggccacagcaacccctacgacccctaccacaaccacatcagctcctggcaagatgctggcccctcccaagaccgcgactccgccaccaaatcctcccaagatcaagacctcaccggatagcttgttgcgggcacgcactcctcccgtggcttcaacagccacctccgccgcgcccaaggacgcagctcacactccgattaatctaactaaatctttattttctagccttaaaaccggacatgcgccatccacatcgacgccagttccactcaagctggaactgcccagtccaccgaaaccactgccggaactacgcattccccaactgcgtggaatgccgcctgtggagctatccttgccactgccgcctttggatttggagcgattgaagcccatcacctcgacatacttgcagttgacacgcagcatgggactcagcgatgaggatgccttgcggttcgacaatctggtgagtaaggacttcaagtactcgctgtagacctaagcgaatgttgagaatgtatttgagaagttatgatagtttccactacggttagttgaatggaaacatccgatctcaaatgagcaatcacagttttattgagcaatacgtttatttttttaccaaattactttgaaacttacatacattattgatggaaacacaaaagaaaaaaaaaaacgttgtcaatcattgggtaattcttattcccagtcatatatattttatattgaacgtattatattaaatttgaaagccgctggcgatgtgaaacctttattacaatatctcataaaaaaaaatttacaaatttatacacctacatatttattctgtaaaagaatcatacaaaggactcaccgaaattgttcaaatattaatgctttttgtaacatattttatgcgtagttgaattttacatatgttttacgcctaaaggccaatgcgcaactattatttgcttttttggctttaacccgcatatttagacttaagaaaaaatgcttttaccacgatttccacaccatttccactcgataaaacaacatttttttactaatctagtttcttttttctctgacatgcttggcttataaatgtaacccaactaatgcaatgctaacgagcgagaaagacaatgacagaaatgcacttttgtcagccgaacaactaccaccaggctgtcagccacacaactacaaagaactgcaaccgaatcacccatgaccaacacattgctttcggccaccaaatgcgttttgcactgagctgcgcacaaaattatgcaatagtttttttcgacgtgctttaatcagtttgccgtgaaattccaattgaatttctcgttccgcgctgcgttttttatatatttataattttgatctcctaatgcttgaattatttttgactgcaagtatttttttcccttgctgaaatgttttgtttatcatgcttagtttccaaatgttattattttatattatttcgttgatttttt

SEQ ID NO: 37934 - DNA, 1872 bp, DROSOPHILA
atggagcactcgaatggcagtggcaagcctcgtacagaccagtctgcgtcacctaacccacagtcctcggcgatgactgcctcgtcggagggttggagcagcaaaaggaagctctatgccatcgatgagcgcgaggagagctcgccagtgactgtgggcaaggtggagactgatttggcctacgatgcggatgtggacgagctggaacagccgacggccgagcgcgagatcatctacgagctgttccagccgtgggccctcagcacatatggcgatcaggccaagaccaagacgataacattgcgcaagaaggcgcgaattcttaaagccctcgagggcaaggagcacagtcgtcccgatagctccaagttccgcttttgggtcaagacaaagggcttcactactaatcgacccgagggctttgaagaggcaccaggcagtcggcgccacctgaaaaatcttcctagctcggccattttgtcggataatcccgctgatgtggacctatttgccgcatccaccagcaagggattcggtcgaaggacctaccgcaaagtggcctgtgtggaagagttcttcgacatcatctacaatgtgcacatggagctgggaggtcgcagtggcatgcacgcgggtcaaaagcgcacctaccgcattatcactgaaacctatgcgttcttgccccgtgaggcggtcacccgcttcctaaccatttgtcccgagtgcaagaagaaccttcgcccctcctcaccatcggggggtggaaaagactccgacctggccggcaatgagagctcctccgaagtggagaactacctcaattactcatcgcacacggagagctcgctggaggcggggccaactgccaagcgccgtcggcactcgagcgccgaaatcaaggcctcactggccagtggcttggctgtgggtgcgggagtcgccagcagcatgagtgccactcagctggatgtcctgtggactggagtgcccagaagtcgaagtccaaagcccccgatggcggcagaggcggctgttgaaaccacacctgttagcgtgcccaaaatccgcatcaagacccagttgcagcgtccgtcgagtccgcaagatcagtcccctgctgacccgaacaccgatgcccaatcccaatctcagatccaatcccagtcccaatctcagtcacagtcacagtcacaatcccattcacagccaagtggccaaggctttgatgcacagctgctaaagtcgcgggataatctgctgcgatactataacttcatgaggcgcttctatgccggggaaccggttttagcaccgcccatctacggcagcagcctgttgcagagcctcagctatccaaccaccatctcaaccgcggccacagcaacccctacgacccctaccacaaccacatcagctcctggcaagatgctggcccctcccaagaccgcgactccgccaccaaatcctcccaagatcaagacctcaccggatagcttgttgcgggcacgcactcctcccgtggcttcaacagccacctccgccgcgcccaaggacgcagctcacactccgattaatctaactaaatctttattttctagccttaaaaccggacatgcgccatccacatcgacgccagttccactcaagctggaactgcccagtccaccgaaaccactgccggaactacgcattccccaactgcgtggaatgccgcctgtggagctatccttgccactgccgcctttggatttggagcgattgaagcccatcacctcgacatacttgcagttgacacgcagcatgggactcagcgatgaggatgccttgcggttcgacaatctggtgagtaaggacttcaagtactcgctgtag

SEQ ID NO: 37935 - protein, 623 aa, DROSOPHILA
MEHSNGSGKPRTDQSASPNPQSSAMTASSEGWSSKRKLYAIDEREESSPVTVGKVETDLAYDADVDELEQPTAEREIIYELFQPWALSTYGDQAKTKTITLRKKARILKALEGKEHSRPDSSKFRFWVKTKGFTTNRPEGFEEAPGSRRHLKNLPSSAILSDNPADVDLFAASTSKGFGRRTYRKVACVEEFFDIIYNVHMELGGRSGMHAGQKRTYRIITETYAFLPREAVTRFLTICPECKKNLRPSSPSGGGKDSDLAGNESSSEVENYLNYSSHTESSLEAGPTAKRRRHSSAEIKASLASGLAVGAGVASSMSATQLDVLWTGVPRSRSPKPPMAAEAAVETTPVSVPKIRIKTQLQRPSSPQDQSPADPNTDAQSQSQIQSQSQSQSQSQSQSHSQPSGQGFDAQLLKSRDNLLRYYNFMRRFYAGEPVLAPPIYGSSLLQSLSYPTTISTAATATPTTPTTTTSAPGKMLAPPKTATPPPNPPKIKTSPDSLLRARTPPVASTATSAAPKDAAHTPINLTKSLFSSLKTGHAPSTSTPVPLKLELPSPPKPLPELRIPQLRGMPPVELSLPLPPLDLERLKPITSTYLQLTRSMGLSDEDALRFDNLVSKDFKYSL

SEQ ID NO: 37936 - DNA, 3144 bp, DROSOPHILA
gtgcatgtcgtagtttcctttgtggtcaaatgcaacgtcgtaggttattgcctggggttactgaatgggccattgggccgaaatctgagaagcttgatttagccaaattggaatggcagatgccacagggtaaatttctaatgcaagtacttgaaaatgcaactataatgcagattaaggttgtttcggtaataacgattggctttggattaatattgaaagtgtgttaagtgctatgttggattagagaaaattaaagcgatgcacttaagcctaatttgtataaaacaagtatcttccagattttgaaatattattaactgagaaatttgatcttttccttacagcagccacttttgcatccacaattaaggaagaagtcaagtaaatcaatagaaaccaaatgctacaaagcactgccatatacaactgcaacggattgcattaggagaactaacaattgagtagctcaacatttatagcaaaaacaatacgaaatctagaataatatagcaactactatacaaaatcggagaccacgaacaaatgagggagaaaaggcaaaaaggaacatcaacagcggaataaagttatgaaaattggatgaatgaagcatgaagcaagcccagaaacgagaaaaaagttgtggtataaacttttattgtaggaaaacgcataaaaataatagaaaaacgctcttcgggttgtaaagaaaataagaagacaaaagaaagacatgaaaacgttgcgaacaataaagcatatacttgccatattgatataaagggaaatcgtgaaaaggcggtgaaaatttcgtaagattagttggtattaagggcagcccaggcacacagctaaaaagggaactaaaaaaaccccgcacagaacaatgaaagctgcagcagctggataaggccgacaaaaccgaaaattatattattgtaatctagtagagagcagacaacatatccgctggcaacaaccaacaccgaaagagactatgaaaaatgcacaactgaaactgactgaagttgacgatgatgagctgtggctggcagtaagattagcgcactgcagcagcaacatcagcagcagtagcagcacaagaaccaccagcagcaacaagaggcacaaccagcaactcacaacactgcaaccaaggagcttaagtacaaaacaccacagcaacattgcaagcgagcagcacaatagccagcaacaggagccagcatcgaaggacgaggatgtagccaaccacggtagaagcaatgaccagcagacgcatctgcaacagctagacagcagcaacatgttgtcgccaaagacagccgcagcagcaactgctgccggcgatgaagcaacaacccaacaaccaacaaacataagactgtgtgcacgcaagcgacaacgattgcgtcgccgacgaaaaagaaaaccagcaaccccaaacgaaacagatatcaaggtaaacattaataacatcatatttaactaaatatatagaaatttagaaaataattgcaccctcagcacttgaatttggtcttcttacaattgcagaaacaacagcaacttagcatgcctcccttcaaaacgcgcaaatccacggacacctacagcacaccagcagcaataaccagctgtccgacagccacctacatgcaatgtcgagccagcgacaatgagttcagtattccgatatcgagacatgatagagtatccacggccacattcgcctgggtgttgcatgtgctgcaggtgctgctcgtgtcgctgcaacagtggcaacttcacgtgcaacagcgatcggtgctactgttcagaaggatcgcagcgagcaccatcgccttcatttcctatttaggcagctttgcagcgcaactgaggagcagcagcagtagcagcagcaacagcagcaacagcggcaacagcagcagcacgcaaatattaaacggacttaataaacactcatggatatttttattgatatatttgaatttatctgctaaaggtgagtgccatttaaattatctcgagtgctgcatgcaacatcaacaatatcaacaacatcgacagcaagcaacagttgccgcacatggtgcattgtttgccgcattgtggcagtggcagcagcagcaacataatgcacgccggcaacatattgtcactttgacacataaaaccactcacgagtgggatgcgagtattttgtgggccggagttgtcgttgtgttgccccttgttgatgtcattgttgtttgccagttgtgacatttacgacagcctcaagtgaggcaacaacagccatctcagaccggtctatgccacttgaaggcgtctgcgcctaaggttattttctttcttttcttccgtcgcccccacttgagaagtccttagtccttgttcgtggctaacgcgtggcaggccgcagttgaggtccttcaaagggcatgttgcataaacggtcttgactcggatgcacctattgaaggataaaccattttatgtctgtaattgagaagctttcagtttttagtttttaattgcacttcctcgaaacttaaacggttgcgttgagcatgtatcatcgtatgaaactcccgcacagtgtggtatttattggttaattatactaaattgcttgcttcagctgacccacattttccggcacaaaaactatttgccagaaactaagcaaagcaaagtcatgtcgaacaatgtgtggctgatgctgtgccgaaaagttgcaatgccataaatactttcaacaaatgcttgttgaaacgctttgctgcacagaaatttcccatatcaagtggttgcggcaaggggctacgaaaatcttgtgtaatggcattttttctgtccttactgtgctgcactaaaagcttaaaaattctttgccacgacaacaatattccaacgagacaaggactaagtttggttagcagctcaaatgcctgccgttccattagcggcataaaatggaaaaaaaagaatccccacctgaagatggtggcaaggagatggctccattgccacttacacatattggggttattaatggctgcccatatgggctggagcagcaaaaacacaagatggaaagtgttgccaatgtttcacgctgccgcggactaagtc

SEQ ID NO: 37937 - DNA, 984 bp, DROSOPHILA
atgaaaaatgcacaactgaaactgactgaagttgacgatgatgagctgtggctggcagtaagattagcgcactgcagcagcaacatcagcagcagtagcagcacaagaaccaccagcagcaacaagaggcacaaccagcaactcacaacactgcaaccaaggagcttaagtacaaaacaccacagcaacattgcaagcgagcagcacaatagccagcaacaggagccagcatcgaaggacgaggatgtagccaaccacggtagaagcaatgaccagcagacgcatctgcaacagctagacagcagcaacatgttgtcgccaaagacagccgcagcagcaactgctgccggcgatgaagcaacaacccaacaaccaacaaacataagactgtgtgcacgcaagcgacaacgattgcgtcgccgacgaaaaagaaaaccagcaaccccaaacgaaacagatatcaagaaacaacagcaacttagcatgcctcccttcaaaacgcgcaaatccacggacacctacagcacaccagcagcaataaccagctgtccgacagccacctacatgcaatgtcgagccagcgacaatgagttcagtattccgatatcgagacatgatagagtatccacggccacattcgcctgggtgttgcatgtgctgcaggtgctgctcgtgtcgctgcaacagtggcaacttcacgtgcaacagcgatcggtgctactgttcagaaggatcgcagcgagcaccatcgccttcatttcctatttaggcagctttgcagcgcaactgaggagcagcagcagtagcagcagcaacagcagcaacagcggcaacagcagcagcacgcaaatattaaacggacttaataaacactcatggatatttttattgatatatttgaatttatctgctaaagcaagcaacagttgccgcacatggtgcattgtttgccgcattgtggcagtggcagcagcagcaacataa

SEQ ID NO: 37938 - protein, 327 aa, DROSOPHILA
MKNAQLKLTEVDDDELWLAVRLAHCSSNISSSSSTRTTSSNKRHNQQLTTLQPRSLSTKHHSNIASEQHNSQQQEPASKDEDVANHGRSNDQQTHLQQLDSSNMLSPKTAAAATAAGDEATTQQPTNIRLCARKRQRLRRRRKRKPATPNETDIKKQQQLSMPPFKTRKSTDTYSTPAAITSCPTATYMQCRASDNEFSIPISRHDRVSTATFAWVLHVLQVLLVSLQQWQLHVQQRSVLLFRRIAASTIAFISYLGSFAAQLRSSSSSSSNSSNSGNSSSTQILNGLNKHSWIFLLIYLNLSAKASNSCRTWCIVCRIVAVAAAAT

SEQ ID NO: 37939 - DNA, 3134 bp, DROSOPHILA
acattatcatttttgatgtttaataatagacattcgattttatgttttcccaccgtttctaaaaatcaaatggtccaaaattaccatacggaaactatttctgtcaattaaattggagagaaaaatcttgcctgctgggaaaatgtacaatttttcgtttctattagaagaaaacagctagttgaacaggtaaaattctaaaaaagcaggtaccaaaaaaggaccacttgataagagttaagtggaaaaatcctgggaacaaattgttgagacatgaagtaatcgtaaaaaatctgactaatttttaaagaacgcaatagtgtaaaatgattattattttctattatatgtggaggaagtcgtgaagtaaaaatacatcaatgtaaaccgtttagttccgctctttgtgagtcatatcggcaacgattctcaatggaaaacaattacatctttatgttatgttattttcagcattatcaacgtctttatgcgggcaacttataaagcgggttttatgataataactgaaaagctacactcttagatagtgcactgtgataaagaggggggaggttcaaagtcagaaagatcagagatccggtggtgacctttggcagcggctcagatatgctgcaaccctccgagatcacagcactgaacgaaattgtgacaagtttaatatgttgtaaaattaaatgtatttaaccctttgataagcttatcaagattttaataagtccaatgccttattaattatttgaatatcagcaagattcggcttagcgcaacatctcgatgagattgttttcagtgtagaaagcgattgtatctagctgcggatgttgttgtgtcctatctggtggcctgcctgcattctctgccgatcctccccgcagtccactgcctgcgtggccagcttagctgtcgtccgcacttcttgttctgggaaaattcagttgtgtaccgactgcagttgcgaacggacaagtcaaactggaaaatgaaattcatctgggccctgattttggtgctcggttccattgcagcgaacgctgagcgtgataattactgcgaaaggaacgagacgatacgagccacagtgccagtgaccaaacagcggatcatagtaaagcagccatccaagtggaagatctggaagaagactgagaagatcacagagatctacgattcagaggaggaacaagtcacccacaggttggttagggagtgctgccccggctacttgcaggtggagtccggcttgtgtgagcccatctgcagtcggggctgtcccgcccacgccagttgtgccgctccagatcgctgtgagtgcatttccggctacgtgtcagccagaaatcaccaggatggcagccactactgtgaacccatctgcgagaccccatgtcctgcgggtgctcagtgcgtaacgcccaatacatgtgcctgtcgcgacgggtacacccaattgcagccaactgacgatggtgtgagtggtggatgtgccccagtttgccgggtgggcgatggctgtgccaatggcaagtgcatcgatgtggaccgctgtgcctgcaactccggatatcggtgggataaggccgaagagaggtgtatcgagctcagtgcagagtcaatctctgaggaactggagaccaccgaggacaatacggattcgccgagcaccagttcaacagcagtattcacggccacccactgtccggatgactttgtcctgttccgcggcgaatgccgcgagaagcaattcgacagcaatgatgtgggttgccttaaatccggctgtggtccgcatcaaacatgcctggactccggtgtatgtcagtgctccgatggctatgtgccggaggagagtggcgaagcaactggagtgctcagctgtcggcgcactttgctcgaccaaattctcgggctgaacgaagctatcgacgatgacgatgagctgaatccctggaccatacccatcattggtgttgcctgtggattcctgtttgttctgctcattgtgggtctcctcggtggtagacgatatcgccaggagcgggctgctttggccaacaaggagatggagtgccagtattcgcagaagacagtggatgtggacgagtgggtgccatgaaggggtcaggttcatcccttggcgttgggctgtgttatatcaacattgattgttaatttttaatcatttaaatcattcgagaataaagcgtatcataattaaattgcttttgttttaaatggtagataatataatggatatatagtatatatattatgtaggggctttattcctcagccaaatccaattgtattgcataataatataaatgtttacaattattcaatggtgttctaattcaatggtgttctttaacattacaaaaagatagttaggataggcaatctttatcgtgaccaaaaattaatgttaggagcttaagaggcttaacaaatctgacaaactattagatactctcatagttcgcttcataacttgtggctgataaatttaaaacgttaaacaaacattttactcatcatatctcgcttacggattgtgagtcccttagcagcaatatggactcatatgctgattactggcttatgtaaataaaatattcataaacattcgaggcaagagtgctcatgctcagcacatcagcaaacaagccaacttgaaaatggctaaaaatactcagacgaatgaacagacacatttgaaatgttatgtttttactcacaactatgtatgttgaaggacttttaagttattgaggctgagtgtgagtctcatatttaacgttatctgtattggaaattctttattttagggattaaaatccatgtagatacatgagtaccgttgtgggctcattaccttttaactcatttcagaaatataaaattgctactatatatttcgtttattaataacagcaaaagctacaaaaagtgttgattctgattaaatgcggatattttgaattaaaaggatttatttctatgcttaagtagaagcattatttatattatattttaagccgtagcatctgcttcgaaagtcgagcgcttttgtgtatctgtatttgtatctttgcgaagtgtatctggcagcggca

SEQ ID NO: 37940 - DNA, 1134 bp, DROSOPHILA
atgaaattcatctgggccctgattttggtgctcggttccattgcagcgaacgctgagcgtgataattactgcgaaaggaacgagacgatacgagccacagtgccagtgaccaaacagcggatcatagtaaagcagccatccaagtggaagatctggaagaagactgagaagatcacagagatctacgattcagaggaggaacaagtcacccacaggttggttagggagtgctgccccggctacttgcaggtggagtccggcttgtgtgagcccatctgcagtcggggctgtcccgcccacgccagttgtgccgctccagatcgctgtgagtgcatttccggctacgtgtcagccagaaatcaccaggatggcagccactactgtgaacccatctgcgagaccccatgtcctgcgggtgctcagtgcgtaacgcccaatacatgtgcctgtcgcgacgggtacacccaattgcagccaactgacgatggtgtgagtggtggatgtgccccagtttgccgggtgggcgatggctgtgccaatggcaagtgcatcgatgtggaccgctgtgcctgcaactccggatatcggtgggataaggccgaagagaggtgtatcgagctcagtgcagagtcaatctctgaggaactggagaccaccgaggacaatacggattcgccgagcaccagttcaacagcagtattcacggccacccactgtccggatgactttgtcctgttccgcggcgaatgccgcgagaagcaattcgacagcaatgatgtgggttgccttaaatccggctgtggtccgcatcaaacatgcctggactccggtgtatgtcagtgctccgatggctatgtgccggaggagagtggcgaagcaactggagtgctcagctgtcggcgcactttgctcgaccaaattctcgggctgaacgaagctatcgacgatgacgatgagctgaatccctggaccatacccatcattggtgttgcctgtggattcctgtttgttctgctcattgtgggtctcctcggtggtagacgatatcgccaggagcgggctgctttggccaacaaggagatggagtgccagtattcgcagaagacagtggatgtggacgagtgggtgccatga

SEQ ID NO: 37941 - protein, 377 aa, DROSOPHILA
MKFIWALILVLGSIAANAERDNYCERNETIRATVPVTKQRIIVKQPSKWKIWKKTEKITEIYDSEEEQVTHRLVRECCPGYLQVESGLCEPICSRGCPAHASCAAPDRCECISGYVSARNHQDGSHYCEPICETPCPAGAQCVTPNTCACRDGYTQLQPTDDGVSGGCAPVCRVGDGCANGKCIDVDRCACNSGYRWDKAEERCIELSAESISEELETTEDNTDSPSTSSTAVFTATHCPDDFVLFRGECREKQFDSNDVGCLKSGCGPHQTCLDSGVCQCSDGYVPEESGEATGVLSCRRTLLDQILGLNEAIDDDDELNPWTIPIIGVACGFLFVLLIVGLLGGRRYRQERAALANKEMECQYSQKTVDVDEWVP

SEQ ID NO: 37942 - DNA, 3126 bp, DROSOPHILA
gcaaggtctaaaagagcccaaggatttaatgggcttagattgtcaccggcacacacttacggcacttcctgtcggcacttgtccggatgttcccctctccggggcagcgacaaaccgttgggtattatatagggtttccgtgtggtggtcgaggacgagaggcgtcgctgtagagcctcgtgctcacgcagcagttcccgctggcgttgctccgcgcgcaggcgcagctgctcgtccttttgctgctgcagctgttgctcgtgaagttgcagctccaggccgtgcagcacgcagaggaacaggaccaggagcaccgagtggaggcacagagatcgcagtattgttgacatctcagtgctgggcgcggattcctttgtggcgcgctaccgaaacgctcaagtcgctattgtttactgctccggagacgacgcagttgggccagcctctaatcacagccggaggcaatgataagagggcttcagcgcttaattcggatctggagggggagatccagggctcgcaatgccaatgtatgtcaagtaagaacgagctaaagatcgtcttaagttttatgttctttcattacgaattgtaatttcccggataaatagtgatgggatgcaaataaaatatttcagtaaccaaaagtatcttttgggtatgtaaattagcatattcaaatatattttattttattttatttatatttaaatatgctttgggctcgttcaaaataaaattagaaaaaatattttagaaaattatccaactgaggtataaacaagtcgcaacacttaaaaatttcgacttacatgtattcataataataaactctcataaacaaactgaaccaaattcctctcatcttagcctatgcatcgaatatagctgcttttctgataagacaaaaaaaattaattctgtttcagtggcgaaaattagtacaattctagctggcaaattgtgaacacctagaaacttgaaataaggagtgctcaagatgtggttgcgagacttgcgcattcgtctaagttttttccacctgatggtgtgtctgcccagtatttacacaaatgtgccaagctattcggatcggtacaacagaaggcctgtgtcccaggatccaggaatgggaacctatggccgcgggtacatggaaaaccggcagttgtcctataatcgacctggaccagccaacttccaagatcccagaaatgtggagttgcagccgaaacgacgagagtatctcattcgatcacatgaaacgcaatccgatagggggcaacacaaatgccgcatttgggtgccgtaagtatgtcagatacacagaaaacaacgttgaagtatatatacattaacaaaatttttttattttaacaatgtatatatatatatgtatgttttgataatcagaaatatatatataaactttctactgtgaacataatatcgcaagccttatctgtactcccagaatttgtaaaacttttagttgccaaaattcataagcatagactgagaattggaagcaatgtggtgaacttagttataatattttttgttttccaacattcgagcagccccgatacggtggaaaagtactcgtaccccagtgtcatccagacggaccaggccaaccggctgtccctgatcgaggtctgctgcaccggatactcggccagtcgtctgatgggcgtaaccgtgtgccgggcgcaatgtggctgccagaacggaagctgaagattcctggtgagtgcgagtgctatgatggctttgtgcgtaacgacaacggtgactgtgtgtttgcctgcccgctgggctgccaaaatggtcagtgctatctggacggcagctgtcagtgtgatccgggctacaagctggacgagacgcgacgcttctgccgcccgatctgcagcagtggctgtggcagcagtccgcggcacaactgcaccgaaccggagatctgtggctgctccaagggctatcagctgaccgacgacggatgccagcccgtctgcgaaccggactgtggaatcggcggactctgcaaggacaacaaccagtgcgactgcgctcctggttacaatctgagggatggtgtctgccaggccgattgctatcagtaagctgaaaacttcatgctgggaataccagactaatggcaatctttattcggtgcaggaagtgcaacaatggcgtgtgtgtcagccgaaaccgatgtctatgcgatccgggatatacctaccatgagcaatcaaccatgtgcgttccagtatagacattattactaaagaattgatttttatttcgaaatcccttgggcttgatcggtataaaaccaaaacagagattgtgtttatccaaaagctgcagtcattatcttaaaaaataaatttaaatggctagataatatcgcattcaaaacatgtcgaatagctgagattacttacttccgtatcgcttaaatataacaaatgtttttgttttgaaattcttcttatccggcacaagtagaaataaaatatttgaagcgcttgtcggaaataaatgagtcatgtttatttcaaatattttaagattcgtgccaaaaattattttaatacttagtggatgcaaatttgtttttaagaaagttattatttaaatccttgtttttagataatattatttaaatatgattttaatatttaatattattaaaatatgcggtactttcaatgggcttgcattgctctttcacagaatatgaaccataatggcgtcgaatgcagtatattagagcaactaaaatagccaaggtaattacaatgccatacacactgataagtaaagtgttgctgttttctggttttgaaatctcattgtcctttaaaaatatctttgctgtcgtcgaactttcggttgaactttcggtgaagtcagaaatctgtgtactttcttcagtagatgtatccgaagtggattccgtttcacttggggttgaatctgttgtcataaagctagttgaagttgaatctgttgtcattgtagtagttggagatggacggttgctctgacaaaaacaaaaaattatgataattcttggtttttaaaattaaatttttttaattaaatacctataaatat

SEQ ID NO: 37943 - DNA, 692 bp, DROSOPHILA
atgtggttgcgagacttgcgcattcgtctaagttttttccacctgatggtgtgtctgcccagtatttacacaaatgtgccaagctattcggatcggtacaacagaaggcctgtgtcccaggatccaggaatgggaacctatggccgcgggtacatggaaaaccggcagttgtcctataatcgacctggaccagccaacttccaagatcccagaaatgtggagttgcagccgaaacgacgagagtatctcattcgatcacatgaaacgcaatccgatagggggcaacacaaatgccgcatttgggtgccattcctggtgagtgcgagtgctatgatggctttgtgcgtaacgacaacggtgactgtgtgtttgcctgcccgctgggctgccaaaatggtcagtgctatctggacggcagctgtcagtgtgatccgggctacaagctggacgagacgcgacgcttctgccgcccgatctgcagcagtggctgtggcagcagtccgcggcacaactgcaccgaaccggagatctgtggctgctccaagggctatcagctgaccgacgacggatgccagcccgtctgcgaaccggactgtggaatcggcggactctgcaaggacaacaaccagtgcgactgcgctcctggttacaatctgagggatggtgtctgccaggccgattgctatcagtaa

SEQ ID NO: 37944 - protein, 185 aa, DROSOPHILA
MWLRDLRIRLSFFHLMVCLPSIYTNVPSYSDRYNRRPVSQDPGMGTYGRGYMENRQLSYNRPGPANFQDPRNVELQPKRREYLIRSHETQSDRGQHKCRIWVPFLVSASAMMALCVTTTVTVCLPARWAAKMVSAIWTAAVSVIRATSWTRRDASAARSAAVAVAAVRGTTAPNRRSVAAPRAIS

SEQ ID NO: 37945 - DNA, 2780 bp, DROSOPHILA
aactaagtaacagttcaaagcttaggaaagcttaaatatataattttttgttgcataaatttaggcctactcactaaatttacagttttaaaaacattgtttgcgaacaattacttgacgcactgtaatgcaattcagaataattcccaaaatttataataaataaataaatcattgcatagttgtgggaatatcctttgactaaaataagctgtattaatccacttaagagtaactccacaccccctcataaaaattaataaatatccataaatatataatatatatatatattatatataaatatataatatgtaaatatataatatgtagtcctttatggctacgttttaacttgacagatatataacttctgtaaaaaaatgtatttattccaaaatagcaatgcagcaatacaaattaagctttcagcttaaacaaaaggctcattaagtgaaaataccctatataccttaaaaatatcctatcgaacttctatcttttttttttttaatggaaagcccagtatttctgaaagtacaagtcttaagttttttttttttaattttcgttttatttacattatttaaatatgtacaaatatttcatagaaaagaaatttacgtgaaaaagtcgaaggagcaactcgtcagcagttatttctctgtgattgtctacaaaagaactgtacactcgatggatttggatgccaggagacaggcacttttcaaacgccccggatgggttttggcaagctttctataatggattgcgtcagttgtgtgattttctcctggttccgatccttccagaatttcggttggtatcacaaactaaaactaaatttgtaagtcgtacgttggcggttgctgggcgtggaaagagagggaggggtgcttgattcttaatgtctgttggatactttcgacttgttggttggttcgctcgccttcacccgacttcacttctcgcttggccctcgacagcattgcgatttcatctactttttgtggaggtagccaccgtgggcggagccgccgtaggaggagctgccgtaggaggagattccgtgtccggaaattccgtatccggagattccgtgtccggagtagccgtggctgatgatggcaggagcagcggcaacggtgtgggtgacggccacggcgggcttgacgtggctctcaacgtggacaggcacgggcacggccaccttgtagggcactggacgctccacatggacgggcaccttgtggatcacacgcttctcgacggtgtatggcacgggcttctccacgggcacggggtatggcttgtcgacatggacggtgtagggacgatcaactgggatcttcacgggcacacggatcaccttctcgacggggtagggctggggcacctcgacgggcaccttcacgatctgcttgacgggcacatggacgatcttctccacggggtagggctggggcacgggcaccttaacgggataggtgacggtcttctcgacggggtagggaacgtgacgctccacctggtagggcacctgcacggtcctcaccacggtgttggtgtgcacctgggtgggcagctcagcgacagcgggagccactggaactccaacaccgatgccggatcccagaatggcgcctcccgccgatggtccgtatccgtagcccagaccgtggccaatgccgcgcttctcctgcttcttctcggcgggctcggcggtctcgacggccttcttgggtgcctcctcactggcgttggccaccagcacgcacatcgccacaaggccgaaaatgagctgcaatgacaagtgggttaaattcgatagaaacccaattggcttggtcgggcggttatgcaactgcagccgcttccggctccacctccgcccgattactccataatttggaatatgacaattatgcaatgttgggtggaaagttggctgggcaaccagccaagttcaattgtggcctaggccccctgacatattgggcatgcggcgtatacttaatgtggcttgatattttcgcaataattcggttaaaatacaaattggaagaaggcaaattcaactctttgtagtttcgcgttcaaagctttttaatacgaatctacatttttgttttcttttttaaatgctaaaaacatattctaggactgcctatccttttcgggttaaaatgatccttaacacttttcgattttagtaattatgaaatgtgatttctttcaataagatttaaatgtagaactggtaatggaaaaattaaatatttcaattagttttctctctaaaaatcctttcttaaaaccatgttcatatttacttgggtaaaccaaaatgccacaaaaaagtaacatatctagagacattttagaatatccgttctatccttgcttttgaaagagctgatgaagtcgtgcaaaaacctttttaaaaatactttaattgcaacaccgatatgtctacattgttccataaatatatatatatatattcttttgcaagtcactttaactgaatccgagtttttgaaacacaattattctaagcagcacttcgaaggagaacacactgagctcagaccgaacataccatggatttcattttgcactaggttagctcctcaacactttgcgatcaagatgggcttgtatgtctcaaccaacccgcaacagttaactgaataatttcgcacagacgcagcgagcttttatatggccgatgctgtggcgggattgtcttcagccgcggctgcgcagtcgacgtgaat

SEQ ID NO: 37946 - DNA, 780 bp, DROSOPHILA
atgtgcgtgctggtggccaacgccagtgaggaggcacccaagaaggccgtcgagaccgccgagcccgccgagaagaagcaggagaagcgcggcattggccacggtctgggctacggatacggaccatcggcgggaggcgccattctgggatccggcatcggtgttggagttccagtggctcccgctgtcgctgagctgcccacccaggtgcacaccaacaccgtggtgaggaccgtgcaggtgccctaccaggtggagcgtcacgttccctaccccgtcgagaagaccgtcacctatcccgttaaggtgcccgtgccccagccctaccccgtggagaagatcgtccatgtgcccgtcaagcagatcgtgaaggtgcccgtcgaggtgccccagccctaccccgtcgagaaggtgatccgtgtgcccgtgaagatcccagttgatcgtccctacaccgtccatgtcgacaagccataccccgtgcccgtggagaagcccgtgccatacaccgtcgagaagcgtgtgatccacaaggtgcccgtccatgtggagcgtccagtgccctacaaggtggccgtgcccgtgcctgtccacgttgagagccacgtcaagcccgccgtggccgtcacccacaccgttgccgctgctcctgccatcatcagccacggctactccggacacggaatctccggatacggaatttccggacacggaatctcctcctacggcagctcctcctacggcggctccgcccacggtggctacctccacaaaaagtag

SEQ ID NO: 37947 - protein, 259 aa, DROSOPHILA
MCVLVANASEEAPKKAVETAEPAEKKQEKRGIGHGLGYGYGPSAGGAILGSGIGVGVPVAPAVAELPTQVHTNTVVRTVQVPYQVERHVPYPVEKTVTYPVKVPVPQPYPVEKIVHVPVKQIVKVPVEVPQPYPVEKVIRVPVKIPVDRPYTVHVDKPYPVPVEKPVPYTVEKRVIHKVPVHVERPVPYKVAVPVPVHVESHVKPAVAVTHTVAAAPAIISHGYSGHGISGYGISGHGISSYGSSSYGGSAHGGYLHKK

SEQ ID NO: 37948 - DNA, 3536 bp, DROSOPHILA
ttttataaatccgtttcgtctgcttatgcgaacaagcaacataacatagatgtattacaaactaggtatagcaatgaatattacaaacactaatacaatacgttcgattacaaactgacttaaataggcgtcttcctatctcgaatatcgcacaagcttaaacgctatcagtagtcttatcacacgctcacaacgctgggacgctgcacacaactggatggattgatcgtcgtcctgttgcgcaggacacgaatgtagccatctcacttgggaaccggaacgggtgcacgagtcgggtggaccagagcagaagagggaggagccgcggctggaggacaaaacagcagcagcaaccacatcgatgttgcacccagatggtgtcgcttccgtccatccaaggttcacaaacacaaatcgtagcagtacagggaagcctcgtatcctgggatcctttgctcctggatcaactggcaactgtgtctgtgttcgatcgggtgtgtcttggagggtcgggaagtgggtcggtgttcttgttcatgttttgatgttgttgttcttgttgtgttggctgtgcggcccaaatgtgtcgcttaaaagtcttaaactaaagttcctttacaattcactcattcacagtgctcacgggtttcgtcaacgttttcaaggtatccatttgtgttctattatcggttatggcttaaggctagaagagagttcggtctaaaagctatgttcgtcggttactcgtctggttttcactgaatctctgtcggttatcacgttctgcatagcaaagtgtgtgtggagaaaaggtggtacgagtacgagtatgatacggtatggagtgatgtgtggtgttatggatttgggaatctttcttttcggatttgggaaatagtggaaatggaagtggtttagcttgccatcccagttcattctcaatgctgcaaagaaaagcgaaagaaggggagagaaagagagaagatttcgattcaccaggttagtaaccgtaatatgaatgataatcatgagaggcaaattcatgctccacctcgtgctcatgttccacaatggggtgcgaatggtgatggatgggcgcgtggtgatgatcctcctcgatgtgcttgtggtggaactccggctccttgtaggtgacatgcttctcatggtattccggcacgtgcttctcgatgtgaacatggacgggcttctccacggggatcttgaccgggtacggaacgtgtttctccaccttcactggcacttccttgatcaccgggtagggggcgggcacatggaccttgacctcatagggcactggcttctcgacatgaacgggcacgggacgatcatagggcacatggacgggcactggcaccttcttgatcacgggcactggcactggtttgtccacatagtggggcactggtttgtcgatgtagtggggcactggcttgtcgacgggcaccttcaccgggtagtggacaaccttctccacgggatatggcttgtcgacgtgcacgtgtttctcaacattgtagtggacaatcttttcgactggatagggagccggaacatgaaccttcactggcacatggaccttcttttcgactgggtagggagcgggcacatgaacctgcagacagaaaatccaaagaattagaacaccgattgctgggaatttccgtatcccaacccaccttaacgggcactggtcggtcgtagtgcacatggacgggcacatggacctgcttctcgacgggatagggagctggcacctcgtagggaaccttcacgatctccttcacctcgtagggaatgtgtttgatcaccggatagggctttggcaccttgaccttaacgggcacatggatgtgcttctcgacgggcacatgtacgatcttctcgatgggcacgggcactggcaccttcttaatgacggtcagtgtcttctcctcgtgcaccgggaagtgaggcacgtgatgatggtgatagtcctcgtagtggtgcagtcctctcttcgacttggtcgtatcctcgctagccgctgcctcggcagccttggcctccggctcagccttcttctcctcggcgggagcggcggccttctcgtcctcagctcggacgtagctggtggccaggagcaggaccaaagccagcgatgtcgctgtgcgctatagattaaagaaggtccaggttagaaaacagattttatgtaatttcataactttctgcagctaaatttgcatataactaacgaattccggtttaatgaaaaacatgttgactatattgttttaaattctaacatatttagatcacaaaaagttcatgtcggattgcaaagttagttttgaagaagaattcgtatcgtttaaatgcatttcaaattgtgcatataatgttgatttcactatgttttactattccacgttcttaaggtatttctgcattctatgattattactgagtccttttaagacacttttccactgcacacattcgtcctgccaccgatactcaccatcgacttcatgctgctgcgtttatccttcgatgaacgggaatggaaatccgtattcccaggtcgtgtggcacgcgattcgagaactggacgagaactgatcccgtttttatcgagggggatggtggctattgatcactattccacacgttccgtaccactctaggctgtagactgttcgacggttaacggtttaatgatgccaactacagcgcctgcgcgcacttttatagttggcaatcgaaaggcaggccagccaagtcactacgccgccgaatgaatggatgcacgaagcgaagttaagccgaagagcataagcatacggcggccaaaaaccatcggcaacaccaataataatcgcaatggcccaaaacatacgcggcgcggcgaatggtgagcggtacgctgttgttgtttctgttgttgttgttgtgcggttgcctgtctactttgccttcggcggtccgctggatttcggaggcgcgaagtcaacccagccaagcgccaaatgcagcgccaccgtctccgcaaaaaaaaaaaacaaaaaaaaacaaatacaagaatggaaatcgagcttgaatatactgcaatttgcataccctttaattaaaatgggttcagtgagtttacttaaaacatacttatatacttgaaaaacatataaaaagttgaaatgaggctcagaaatcaaaaaaaaaacttttatcagctttgggctgtgaacccggtgacttgtagttttggttaagaataaaaaaatttaacaaactaattatgtgacatgcgcttaatagaagaaattaattcatttgctggtaaaaccatattacaatttgattccacttaaaattgttaattaagtactagctattgctccttaagcttaagcttattttctatccattaaacagttgcattgccacattatttccaagcggcgtgccaaagtgatcttaaaagtcgtaaaactcttctgcagagttataaaaaccaaaataagattgcaatatca

SEQ ID NO: 37949 - DNA, 1122 bp, DROSOPHILA
atgaagtcgatgcgcacagcgacatcgctggctttggtcctgctcctggccaccagctacgtccgagctgaggacgagaaggccgccgctcccgccgaggagaagaaggctgagccggaggccaaggctgccgaggcagcggctagcgaggatacgaccaagtcgaagagaggactgcaccactacgaggactatcaccatcatcacgtgcctcacttcccggtgcacgaggagaagacactgaccgtcattaagaaggtgccagtgcccgtgcccatcgagaagatcgtacatgtgcccgtcgagaagcacatccatgtgcccgttaaggtcaaggtgccaaagccctatccggtgatcaaacacattccctacgaggtgaaggagatcgtgaaggttccctacgaggtgccagctccctatcccgtcgagaagcaggtccatgtgcccgtccatgtgcactacgaccgaccagtgcccgttaaggttcatgtgcccgctccctacccagtcgaaaagaaggtccatgtgccagtgaaggttcatgttccggctccctatccagtcgaaaagattgtccactacaatgttgagaaacacgtgcacgtcgacaagccatatcccgtggagaaggttgtccactacccggtgaaggtgcccgtcgacaagccagtgccccactacatcgacaaaccagtgccccactatgtggacaaaccagtgccagtgcccgtgatcaagaaggtgccagtgcccgtccatgtgccctatgatcgtcccgtgcccgttcatgtcgagaagccagtgccctatgaggtcaaggtccatgtgcccgccccctacccggtgatcaaggaagtgccagtgaaggtggagaaacacgttccgtacccggtcaagatccccgtggagaagcccgtccatgttcacatcgagaagcacgtgccggaataccatgagaagcatgtcacctacaaggagccggagttccaccacaagcacatcgaggaggatcatcaccacgcgcccatccatcaccattcgcaccccattgtggaacatgagcacgaggtggagcatgaatttgcctctcatgattatcattcatattacggttactaa

SEQ ID NO: 37950 - protein, 373 aa, DROSOPHILA
MKSMRTATSLALVLLLATSYVRAEDEKAAAPAEEKKAEPEAKAAEAAASEDTTKSKRGLHHYEDYHHHHVPHFPVHEEKTLTVIKKVPVPVPIEKIVHVPVEKHIHVPVKVKVPKPYPVIKHIPYEVKEIVKVPYEVPAPYPVEKQVHVPVHVHYDRPVPVKVHVPAPYPVEKKVHVPVKVHVPAPYPVEKIVHYNVEKHVHVDKPYPVEKVVHYPVKVPVDKPVPHYIDKPVPHYVDKPVPVPVIKKVPVPVHVPYDRPVPVHVEKPVPYEVKVHVPAPYPVIKEVPVKVEKHVPYPVKIPVEKPVHVHIEKHVPEYHEKHVTYKEPEFHHKHIEEDHHHAPIHHHSHPIVEHEHEVEHEFASHDYHSYYGY

SEQ ID NO: 37951 - DNA, 2363 bp, DROSOPHILA
ctccaacgaaaagaaccaatgaacagttcgatgtgccggctaagcttctcatggaggtagatgaccagtatgccaggtaaaaatattaaatctttactagaagatatgaatattaaattatgttgattttcagcaacttcctgagcattgttctgcagttccaattgttgaaacacttttgcaccataactggtcagtttgaaatgggcaatcccaggaaacccttggacatgtgtgatttatccgatcagcgaggcattggagagattctgaaacgcgccatgtccctgggatcttcggttcactatagggaggtgctaaaggttcttcttggtgagccggagatcagcatagatggactgctcacctactttcaacctctgcaagactggttgcagcaccagaatcaagaaaacaacctggaagtgggctggacataagatttggtgcaggggatattttggaaatttaatcactagtaaattatttaaataaaaacataataatggaagggtatttagcacagtctttcataagacttccaccataaagttgtgtgtggaaatgaactctttgaatttaatcatcggaaaagtaatgctatgcttaaatataaagtagacgtgacttagatagaaaaatgagataaaacacattttaaagttattttctagtaataaaaactatttatggatcaattggtttcaactacccaaaagtatgccacaatcaaaaggcaaataatgaatatttttacagatgtagaataaatgtagaattacatatttacatatgagtgtcaaattggaattggccgttagtaataaatttgtgtatgttttttaaatttgcctagcctgtgttatatacttttcgtttttgttcaaaatgtgaaacgtaacgaaaatatagaataaatcaattttggatcccttttgatttcgtcgaaagtcccaaaaatttccccatattgggaaacgacagtagagacttcttcgcaatggcgacccataatgtccattcctgcgaattcgaggtatttggccgcgtgcagggcgtcaacttccggcgacacgccctgcgaaaggccaagacactgggtcttcgcggctggtgcatgaactccagcaggggcaccgtgaagggttacatcgaaggtcgtccggccgagatggatgtgatgaaggagtggctcaggacgacgggcagtccgctgtccagcatcgagaaggtggagttcagttctcagcgtgagcgcgatcgctatggctatgccaactttcatatcaagcccgatccgcacgagaatcgcccagttcatgaaggattgggcagtagttccagccaccatgatagcaattagcggatttttgacggaacaataaaattaaatgtgaaaaattgtgcttggtacataagggaattgagcaaaataatcagcatagtccttgggaaatccgatattattctgaaatccttgaattaccaatccgagggaagtgagtttgggatgtagtcacagttcgttgggcttgcatttgttctcaatcagtcagcgtcttcttgatgacgattaacgtgttgtttacttaaaataagcggaaataatctaagccaaatgcaaaacataagcgcgccctgtaattaaaatgcacttgattataatgacgcgttgtgctcttcactcgatagccacttattaaaaccatgcaaataactattggcgaaaataaaaataaaacgtatttgcactacgtgcttagtgtgcgtcataaactattcactcgtgtaaattaatgatttacaggcacttgccgctattttcccacggttcttagctgtccagaacttgtactatattctgggcatagccaagtggtaataaaaccctggccgaccttgactgttaattagcttttggcccaaaaataaggtaacagttccaggtagaaaaccgaatcagccaaccacatcataaagtgtctaatatttatgagctcatatccgagacagatagctactttgcagatcccaatctaattacagcctgaatcacacacctctccccgagcacattaatatataatatataccatatatatgcattctcatttgtatgtcagcagattgacaatcaaggcatcagtcagcgtgccaggccattcgattcatcggggtgaagagtcatgctcccctccccccatttaacatctttggggatagttccctgcccatatatcatctcgattttcacctgacatgagtcacaacattttcacatgccgtcgggtcaagatcgtgtctagaaattgaaattcctcaagcgagggtgtacaaattcagatcttcatcacatgcattct

SEQ ID NO: 37952 - DNA, 363 bp, DROSOPHILA
atggcgacccataatgtccattcctgcgaattcgaggtatttggccgcgtgcagggcgtcaacttccggcgacacgccctgcgaaaggccaagacactgggtcttcgcggctggtgcatgaactccagcaggggcaccgtgaagggttacatcgaaggtcgtccggccgagatggatgtgatgaaggagtggctcaggacgacgggcagtccgctgtccagcatcgagaaggtggagttcagttctcagcgtgagcgcgatcgctatggctatgccaactttcatatcaagcccgatccgcacgagaatcgcccagttcatgaaggattgggcagtagttccagccaccatgatagcaattag

SEQ ID NO: 37953 - protein, 120 aa, DROSOPHILA
MATHNVHSCEFEVFGRVQGVNFRRHALRKAKTLGLRGWCMNSSRGTVKGYIEGRPAEMDVMKEWLRTTGSPLSSIEKVEFSSQRERDRYGYANFHIKPDPHENRPVHEGLGSSSSHHDSN

SEQ ID NO: 37954 - DNA, 4001 bp, DROSOPHILA
tcttgcagatacttggtctccttcatcattcagttccagttctacaagtccgcctgcatcaaggctggccaatatgatcccgacaatgtggagttgcctctggataattgcgatatctacggaagtgctgcagctggtgctgctttccagtaagttttgggaacttatataaatttgcctaaatacatatgtttgtgttttttgataatcctatagcaacatgctgtccatgggcgcctcgaagccatggcccgatgcactggaggccttcaacggcgagcgcatcatgtccggaaaggccatcgccgaatactttgagccactgcgcgtttggctggaggcggagaacattaagaacaatgtccacattggctggactacttcaaatagtaagttttcaccttcttcaaattgaaggataactgtgtctaaatgtgtgttttcttatttcagaatgcgtctcatcataattcaaatgattttagtgttctcacacacagttcattgctcaataaagtttaacaatatcttaactataaaaatgttatacttccttataacaaagtacttgggcttgaatattaagacttttatataatattattatagtttattacctgttatacaaaccttaaacttctaaaatgatagaaacaggtaattttatggttgtgtaagtaaatgttcattatatataaaattccccatccaaaaacaaagtgctggacataattgtctcagtaaacaagttgtagatattgccaagtgaagtcgtagttgtattttctaagtggaacacattataattacaaatggccaactgggcgctcagttggtcaccagactcactccactggccatggattcatggattgtcgtcggcccaagtcagttgacttcgagagctgcgccggcgcagaacgttgaccaaaagtgtcgggaatttcaatgagctaataaattgagttgcgaaagtgagtttagtagaaagtgtgggaatatgtggatatttgcggttttggtgagccaaattgatagggtaatcaatcgcaattccctaagatccttctgttttagctcctggtgggattaacccaggctggatctcagcctgatgccacattggaaagatttctgaatgaaaccaatcagcaactggctgttatttacgatcaggctgtattggcacagttgttgaatgaactgcgcggcccgaatgatttggtggctctcctggagatcgaggtcaccgatgataagcttgtgaagtatgtgaggaccctaacgactcgcaaggccaagttcaagcgtttgggattgggtgactcccggcagcggagactactcgacaaaataccccaattgggctatgaggctctcagtggcagagatttgaagctggtctacgcattggcctccagcatgagcgataattaccacaatgtcaagctgtgtgcctacaaacagccggggaactgcactctaagactcatacccgaggttcagtccatagttcaaggaagccgagatctagacgagatcgaatattactggttcgagtggcgtagtcgcacgggcttggccaccagatctcagtttgttgactttatggatctgtacaagaagaccgcccagctgaatggatatcctcgtgccgaggactattggtttcgatccctggaactgaaaggccaggagaccatgaatctactagacaggataatgcatggcttgagaccgctgtttcttcagtttcatgcccatgtcaggggatcactgaggaagatgcatggggagcatttggtgcccagaaacagaccttatccccagcatttggcagaggtctttattggaaatgctttccggcgggttgaggcggaatggtatgtggatttgccgtcgccggagatcggattggccaatattacccaggagctgcaccgtcgtggattgagtaccactcaaagagttttctggaatgtggccgagtacttcagagctctgggttttccgcaattggagaagtaagttatttgatcagatgtattacagttttaattatatttatcattttagctcactttggacatatgcccagaaagtgtcctccgatgatgatgatcgctgctggcacaaagcctggcgatactatgctctaccaaggacgaacttcacctactgtccactgaacgatgaggagcgtttcttcaatatgtttgaggcccagtcggatttgcaatactatcgagctgcatcgattcaaccaactttgctccaagaggagccctttcccaatttcagtgatgccatcgggaaatgtttctccatggcagccagttcaccgcgattccttagaaaactgggaatgctaagggataacaagtggaaggaactgcctgcacgtttgaatcgcttgtatattcagggcttgagggttgtgttcctgctacccgtcttctatgtactagatcgctacagagtcgaggtcctggcaggacacattaaggcggatgataatgaggcctattggaggttaacagaactttataccggagcggctgctccaacgaaaagaaccaatgaacagttcgatgtgccggctaagcttctcatggaggtagatgaccagtatgccaggtaaaaatattaaatctttactagaagatatgaatattaaattatgttgattttcagcaacttcctgagcattgttctgcagttccaattgttgaaacacttttgcaccataactggtcagtttgaaatgggcaatcccaggaaacccttggacatgtgtgatttatccgatcagcgaggcattggagagattctgaaacgcgccatgtccctgggatcttcggttcactatagggaggtgctaaaggttcttcttggtgagccggagatcagcatagatggactgctcacctactttcaacctctgcaagactggttgcagcaccagaatcaagaaaacaacctggaagtgggctggacataagatttggtgcaggggatattttggaaatttaatcactagtaaattatttaaataaaaacataataatggaagggtatttagcacagtctttcataagacttccaccataaagttgtgtgtggaaatgaactctttgaatttaatcatcggaaaagtaatgctatgcttaaatataaagtagacgtgacttagatagaaaaatgagataaaacacattttaaagttattttctagtaataaaaactatttatggatcaattggtttcaactacccaaaagtatgccacaatcaaaaggcaaataatgaatatttttacagatgtagaataaatgtagaattacatatttacatatgagtgtcaaattggaattggccgttagtaataaatttgtgtatgttttttaaatttgcctagcctgtgttatatacttttcgtttttgttcaaaatgtgaaacgtaacgaaaatatagaataaatcaattttggatcccttttgatttcgtcgaaagtcccaaaaatttccccatattgggaaacgacagtagagacttcttcgcaatggcgacccataatgtccattcctgcgaattcgaggtatttggccgcgtgcagggcgtcaacttccggcgacacgccctgcgaaaggccaagacactgggtcttcgcggctggtgcatgaactccagcaggggcaccgtgaagggttacatcgaaggtcgtccggccgagatggatgtgatgaaggagtggctcaggacgacgggcagtccgctgtccagcatcgagaaggtggagttcagttctcagcgtgagcgcgatcgctatggctatgccaactttcatatcaagcccgatccgcacgagaatcgcccagttcatgaaggattgggcagtagttccagccaccatgatagcaattagcggatttttgacggaacaataaaattaaatgtgaaaaattgtgcttggtacataagggaattgagcaaaataatcag

SEQ ID NO: 37955 - DNA, 1836 bp, DROSOPHILA
atgtggatatttgcggttttgctcctggtgggattaacccaggctggatctcagcctgatgccacattggaaagatttctgaatgaaaccaatcagcaactggctgttatttacgatcaggctgtattggcacagttgttgaatgaactgcgcggcccgaatgatttggtggctctcctggagatcgaggtcaccgatgataagcttgtgaagtatgtgaggaccctaacgactcgcaaggccaagttcaagcgtttgggattgggtgactcccggcagcggagactactcgacaaaataccccaattgggctatgaggctctcagtggcagagatttgaagctggtctacgcattggcctccagcatgagcgataattaccacaatgtcaagctgtgtgcctacaaacagccggggaactgcactctaagactcatacccgaggttcagtccatagttcaaggaagccgagatctagacgagatcgaatattactggttcgagtggcgtagtcgcacgggcttggccaccagatctcagtttgttgactttatggatctgtacaagaagaccgcccagctgaatggatatcctcgtgccgaggactattggtttcgatccctggaactgaaaggccaggagaccatgaatctactagacaggataatgcatggcttgagaccgctgtttcttcagtttcatgcccatgtcaggggatcactgaggaagatgcatggggagcatttggtgcccagaaacagaccttatccccagcatttggcagaggtctttattggaaatgctttccggcgggttgaggcggaatggtatgtggatttgccgtcgccggagatcggattggccaatattacccaggagctgcaccgtcgtggattgagtaccactcaaagagttttctggaatgtggccgagtacttcagagctctgggttttccgcaattggagaactcactttggacatatgcccagaaagtgtcctccgatgatgatgatcgctgctggcacaaagcctggcgatactatgctctaccaaggacgaacttcacctactgtccactgaacgatgaggagcgtttcttcaatatgtttgaggcccagtcggatttgcaatactatcgagctgcatcgattcaaccaactttgctccaagaggagccctttcccaatttcagtgatgccatcgggaaatgtttctccatggcagccagttcaccgcgattccttagaaaactgggaatgctaagggataacaagtggaaggaactgcctgcacgtttgaatcgcttgtatattcagggcttgagggttgtgttcctgctacccgtcttctatgtactagatcgctacagagtcgaggtcctggcaggacacattaaggcggatgataatgaggcctattggaggttaacagaactttataccggagcggctgctccaacgaaaagaaccaatgaacagttcgatgtgccggctaagcttctcatggaggtagatgaccagtatgccagcaacttcctgagcattgttctgcagttccaattgttgaaacacttttgcaccataactggtcagtttgaaatgggcaatcccaggaaacccttggacatgtgtgatttatccgatcagcgaggcattggagagattctgaaacgcgccatgtccctgggatcttcggttcactatagggaggtgctaaaggttcttcttggtgagccggagatcagcatagatggactgctcacctactttcaacctctgcaagactggttgcagcaccagaatcaagaaaacaacctggaagtgggctggacataa

SEQ ID NO: 37956 - protein, 611 aa, DROSOPHILA
MWIFAVLLLVGLTQAGSQPDATLERFLNETNQQLAVIYDQAVLAQLLNELRGPNDLVALLEIEVTDDKLVKYVRTLTTRKAKFKRLGLGDSRQRRLLDKIPQLGYEALSGRDLKLVYALASSMSDNYHNVKLCAYKQPGNCTLRLIPEVQSIVQGSRDLDEIEYYWFEWRSRTGLATRSQFVDFMDLYKKTAQLNGYPRAEDYWFRSLELKGQETMNLLDRIMHGLRPLFLQFHAHVRGSLRKMHGEHLVPRNRPYPQHLAEVFIGNAFRRVEAEWYVDLPSPEIGLANITQELHRRGLSTTQRVFWNVAEYFRALGFPQLENSLWTYAQKVSSDDDDRCWHKAWRYYALPRTNFTYCPLNDEERFFNMFEAQSDLQYYRAASIQPTLLQEEPFPNFSDAIGKCFSMAASSPRFLRKLGMLRDNKWKELPARLNRLYIQGLRVVFLLPVFYVLDRYRVEVLAGHIKADDNEAYWRLTELYTGAAAPTKRTNEQFDVPAKLLMEVDDQYASNFLSIVLQFQLLKHFCTITGQFEMGNPRKPLDMCDLSDQRGIGEILKRAMSLGSSVHYREVLKVLLGEPEISIDGLLTYFQPLQDWLQHQNQENNLEVGWT

SEQ ID NO: 37957 - DNA, 2776 bp, DROSOPHILA
atggggtggggatggttggtggaactgcatcagtatcccccaagcggtattatcttcaacttcatcatctgcatcatcatgatagtcttcaacaacagctagctaaatgtttattattgcattttgatttccgtatgatgtttttgttatggccactcttttgcgtcaccttctctctcttcgatgctctcttttgcgtcatcatcccccaagtggaaatcattctgttttttcactctctcttaaagagtgtaccttacgctgttactgttaaacgtatcccatttaccactgttaatattgatatgcagttttttacatagcttatcgtagatcgtcgtttgttggccattattaaattagctttgtcttatctgcgaatgagcttcacgatacctggccatgtaaacaagtatttatttttaaacgcactgaataagtcacaaattgcgttgcagccaaatttttaatgcacggtacttgttaagtggaaggtatacggaacttaaatttatgagcaagtatagtactataatctgatctgttagaataagcatttcagttttgtttttccctagtcattgagatttaataaattaaatgttttacgacaaaaaatcttaaaacattcattatattatatatatagtttcactaaagatatatatatttatattttagtttggcacatattttacgaaatgcgcaatggaaattataaaaagcgctctggaatgtattttttatatgacgataaacgtcgcaaagtcactgggtggcttccggaagcagggggtatcgtgtttcctcgagtatctgcaacaagctgtcggggaatgggaaacctggcctccgagaccatttggtttacctgccgattacctttgcagctgctaacagcacgtggcaacagcgcagcaacagctgctgttggccaacagagcgctgttattcgttaaccctcctcgacgctggctctcgcatccagttgtgttgcgaccagcactcgatgtagacgtacgcacggatactcgatctcccagttgtatctgcgttagggccctcgcgtagtttttcgcgtaatattttcggcttcgcaattttgttggatacttgatgaaataacgtcagtcggattgtatataacccaaagcagcggcaaatcaatgtcgtcagttgtataaataccacaaataaacaaacacattcacaaagagtttttgtgctttcattgcatagtgaccaagtgtgttagtcacccatacagtttatttatgtgctaaaatgcaaattcaaaatcacaagaccaaacaagttgctaaaatgtggcagaggaagccaataagtgcgaataaaaataaataaatacgcgaagcgcagcaaaaccaaggcgcacaaaaaggattacaccagataaataacactgaagcggcgtaaaaatagcaaaaacgcaaaaacacatttcattgccaacgagcgcagaaagcagcagcaacaagaactaagccaacagggccaagaaaagccgccaagagcaacagttaacacagcagcagcaacatgttggcggttaagaacttcttcctgccggagagggcaaaagctccggagactccacaacgattctcccggatgccggaggcctttctccgctccatccggagacgatccctgagggtcaagagggccaagagtctggtggtgcccgatcgcagcgagaaacgtaaatcaggtgaggtacagtgtcgatgtaaagcgaccaaagatggggcatagcgggtcaaagttcatttttaagctaggaatatgctatactatacaatttaatcacctgcaagtgaagaaatccggtgacaattaagtcttaaatagctaacacatgctccattcgagagctccgcataaaaatgttcattgttgttgaatactactcaactgtttttctcacagtaccaccctaagtactccccttttgcagaccttttgccacctaatcaccattagccaaaactaagcttatttatttcgacactcgtgctcattaaaatatttgataactagttaattatgactcgaaaatcatttaacttttcatgcaaatcgttatttaccccagtcgaaattacaaaaaaatcataaaccaatgaccttgcacaggttatcttattaacattgaatgtgcaacagttgaaataaacttttgcctaactctattagagtgtaaaaaatagagaaaaaaatgttacaaccttttgaatgtgccacatcgcgtgtcatgtgtcaaagtgtgagccaaactttgggtgttgtaatcagccagcgcgaaaataatgcaatttggcatagttttttcactacgatacttcctcagttgtgggctttatgatgccaaagttatgacagcattatgtcttctttttttcatgctttttagcatgaaaatggaaattacatgcaaacaaaagtttggcaaacttctttgtttctatcaaaagctgtcggagtgaaaggtcaataaaatgaaatagacagcgaaagttagggtgttgtaatgcaaaagggaagagggaggtccatgttttgtaacattgactcacattcgtattgttcgacattgactttcagtagccgtgacaactgaatgtcgaaagtttgtgcacctctcactttggcacttttgttagtttgttagcttagtactttcgcatgcaattatcgattctcgaaaaatgcgggtccaagaagccaaacgatttcagcattgacacactgcaat

SEQ ID NO: 37958 - DNA, 776 bp, DROSOPHILA
cagcactcgatgtagacgtacgcacggatactcgatctcccagttgtatctgcgttagggccctcgcgtagtttttcgcgtaatattttcggcttcgcaattttgttggatacttgatgaaataacgtcagtcggattgtatataacccaaagcagcggcaaatcaatgtcgtcagttgtataaataccacaaataaacaaacacattcacaaagagtttttgtgctttcattgcatagtgaccaagtgtgttagtcacccatacagtttatttatgtgctaaaatgcaaattcaaaatcacaagaccaaacaagttgctaaaatgtggcagaggaagccaataagtgcgaataaaaataaataaatacgcgaagcgcagcaaaaccaaggcgcacaaaaaggattacaccagataaataacactgaagcggcgtaaaaatagcaaaaacgcaaaaacacatttcattgccaacgagcgcagaaagcagcagcaacaagaactaagccaacagggccaagaaaagccgccaagagcaacagttaacacagcagcagcaacatgttggcggttaagaacttcttcctgccggagagggcaaaagctccggagactccacaacgattctcccggatgccggaggcctttctccgctccatccggagacgatccctgagggtcaagagggccaagagtctggtggtgcccgatcgcagcgagaaacgtaaatcaggtgaggtacagtgtcgatgtaaagcgaccaaagatggggcatag

SEQ ID NO: 37959 - protein, 71 aa, DROSOPHILA
MLAVKNFFLPERAKAPETPQRFSRMPEAFLRSIRRRSLRVKRAKSLVVPDRSEKRKSGEVQCRCKATKDGA

SEQ ID NO: 37960 - DNA, 2510 bp, DROSOPHILA
catttactactgtctgtgcaacaagatggctctgattctgggtaagattactggagccaactaactgaaagcatagtacatcatgtttgcctatcctacagattgcaccctcgaacagttgccgctacgagaggtggacaacgcccgtgtgataaacgccaacgaccatgccaacaaactcacccacaatcccacaccgaggatggtctacatcaaacgcaagagcaggggcaatgggatcgagaagcagtaccgctacaaggtgagtagctgacttccactccttacccgtcattagttcacctaatgttttcctttaaccttcagtgccgaagctgcagtctgccgctttactatcgccacagtcccgactcccacgtaaccttcgtcatgtccaatgccctaatccgcaacaagggtgagagtcctctcacacagctgctgaattcggagatcaagggcagtttcaaggcaccggctgccaagccagcgacttccgccggtccagacgattcgggtattgtggatgccagtggcaagaaggtcgtcgtcaccagacacacgaagaacatgggcaagttcagctcggtcacggtgtctaccatcgacgaggaggaggatgaaatcgaggcggtaagtttgtcagctaaagttggtttgtaaatggtgcaggaaatccaatctatcattgcatcatctacgaacaaacctacaactctttcaaactaaccattttttttgttcattcaaacagcgcgagatcgcagacagctatgcgaacaacgcaaggattatcgagaagcaactgcagcgcaaaggcggaaaattgagcgatgtgggcatcaaaaccaagacagaggacgcacctccgccgcagaagaagcagcgcggcacgctactggaaagatagtcacactctgcctccttattacccacaactaaatatatttgacgacacaaatggctggcattcttggaagaaaaattgcaatttatctagttatagcatacgcaaatagtttgaccttctatgctgtcgttttggcagcaaactgggatgctgtgccagtagcttcttcagtcgctgctcggcgtgctggtgattgagaatcgagtccttgacaagcccacaactgggacatagattgtactccgactttgactttttgacgatcgctggacgcacgcgagtctccatgatcagcttcattcgattcgtggtacgcggcgagttgtgcagagcagtgagtggacggcacttacttcttggcgaggattcggtccgttccaaagcagccttctccttgctcctgaccagctcgagtgcacgattcgctcgggctttggccagctgcaattcgagaggcgcctttggcaggttaaaaaagaagtgggtccacttatcgcgcaactgttcgatggcctccgagttgaatagtgagctggaacgattggaggtatggggtccccattccgcgttcccgatgcaactcaatctataagcggacattgaaacctgaagtattatacactgaaaatttgacaacaaagtaaaagtgtacatatatgtgtatatgtatactatataccgtatagttatggtttttggatggattgtttttcaaatatataattatacgagggtatagaagcttcgacttctggaagctagctccctaactgtttttggtttttgtattctgttgcattgcattgctttcatatgtttaattgtttcaactgaacacattgtacttgttttcgatttagaagcgttgaaagcggatgtatcttacattatccaagtaaaataagggatgagtcgatatgtatgttgcatatctccttacgattttagataaggaaagacattttataaatataaatataaatttcttgaaatataaacattgaagagataattaaattcattttttttgggtaaattataatatattttaaacctgctcgttgcaatttaaattcaaaatgcttcttcttctgctaaaaaagccattcaacacgaatgctctctacattggattttttagtacattcttaagcatcgaatcagggctggtcgcgagcatttactggatttaggcagtgccgcactctggtcacaccgcgaaaaatattatattgagttgaagattatattatacatatatatatcgaagatacatattctgaaaacaagtgctgaagcccaagcgatttgcaaacgaaacggacgcgcgagccccgttcaagattcgaaacgagttcagtgcgtgcgcttgagtgtgtgtgactgccatgcgacgttcgcccgggtgatccggctgtgccaggtgccccacggttccaggtttccagtttccaggttccgctccactccactcgtcgctggattcagtgcacaacacagcgggcggggaggcggagggcaggcggccaacgaaggtgctccacggcaggctctcgtcggctactccacggcgcacagaatgttctcggggcccagcggc

SEQ ID NO: 37961 - DNA, 510 bp, DROSOPHILA
atgtccgcttatagattgagttgcatcgggaacgcggaatggggaccccatacctccaatcgttccagctcactattcaactcggaggccatcgaacagttgcgcgataagtggacccacttcttttttaacctgccaaaggcgcctctcgaattgcagctggccaaagcccgagcgaatcgtgcactcgagctggtcaggagcaaggagaaggctgctttggaacggaccgaatcctcgccaagaagtaagtgccgtccactcactgctctgcacaactcgccgcgtaccacgaatcgaatgaagctgatcatggagactcgcgtgcgtccagcgatcgtcaaaaagtcaaagtcggagtacaatctatgtcccagttgtgggcttgtcaaggactcgattctcaatcaccagcacgccgagcagcgactgaagaagctactggcacagcatcccagtttgctgccaaaacgacagcatagaaggtcaaactatttgcgtatgctataa

SEQ ID NO: 37962 - protein, 169 aa, DROSOPHILA
MSAYRLSCIGNAEWGPHTSNRSSSLFNSEAIEQLRDKWTHFFFNLPKAPLELQLAKARANRALELVRSKEKAALERTESSPRSKCRPLTALHNSPRTTNRMKLIMETRVRPAIVKKSKSEYNLCPSCGLVKDSILNHQHAEQRLKKLLAQHPSLLPKRQHRRSNYLRML

SEQ ID NO: 37963 - DNA, 3242 bp, DROSOPHILA
actggaacaccacgaagtacaagtcgtttggcgaggcggctgccgctcccgacggcctggccgtgctgggtgtgttccttaaggctggcaatcaccatgccgaactggacaaggtgaccagcctgctgcagttcgtgctgcacaagggcgatcgcgtcaccctcccccagggctgtgatcccggccagctgctgcccgatgtgcacacctattggacctatgagggttccctgaccactccaccgtgctcggagtcggtcatctggatcgtgttcaagacgcccatcgaagtgtccgacgaccagctgaacgccatgcgcaatctcaatgcctacgacgtgaaggaggagtgcccctgcaacgagttcaacggcaaggtcatcaacaacttccgtcctccgctgccgctgggcaagcgtgagctgcgcgagatcgggggccactaagtcggtggatgttggacaactaagtccttggatagtcaacggattcgagtgtcgtatgattagcttttcgcacccacacatcacatccgtacgccacgagctggaccggcacatctccattgttcaattctcgtctttagttcgtacgcccagcaagagcatacctcctatatgtgcatccgtatccgtattcgcatcagtggatgcttagctgtaaccttaattgtacatgtacgcctgttcgtttgtttgtctgttaaacgtttgcaaaatgacaattagatttatgttattatggtattataaactaaatataacacgcttagatgttgcatatgataacctaactgactttcaattctgtggaaatagttactttaaagggaagctataatccgaagttatttcatctctgataaggacattttcagcaactacacattttcaagaaagcaattgaaggagcttagaccagaagttccacttcatcccaactttagcaataaaatacttgcttggtctgcatcttatcctcgtttcactggcacgaagtgtcatttatttgacattggattaaagtctagcaactcgtgtggttttttggtccattggagaaagtatttctctttgatttcccgccaggcaaactggtaatctctggccaagtctttacaggaagcataggcgatacgctcaggatcggaaagctgttgatcgaacatttcacttagcttcggattgaactttaccaactctagaaatgtaaggaacagcttgtacttgctgatcgccagtgcagcttgtgaagttttcatctttttcttagttactccttgacgctttccatttacggaaatttcatagggcctgcgtgttaggaatatatgtttagatctgaaactgtctagctaaaaggacccttaccttaattcttctgggacctgggaccaaatcaggccattgggggatggctgccagtcggagcgttgggaaaattcaaatcttatgccaggatcaatgtttatctgtggcctttgaggctggaagcgcgtgtgcttaaatgtcctacaatcgaaacgtttaaagatggcacgttccaaagattccagctgcgcatcgtcacagcaaaagttcaggctgctaaagtagatgggtttggagatcaatacatccagtagtgccccctgcacgcctatgacattccatcgcgctatcttatcactgcaggacatggatagagtgcgctctccacgtccgggcttcgttcgcagagctcctggcgtctgcaacattggatcatcgctaaggtcacttattagtttggcacccgtatagaccatctcggaatcctcatccagccgctggcgtttggcccgcgccgctggttgctcttcctcaaggatgcaggcatccccacaaggcgtttgtgtgctcagaaagtggaactccacgtgctcatccatgtcgtacgtacttagcgtgctgttccaatgaaagattctatcctgcttgagctcctggtatagaaagcgaagaaatccacgacgtgccagcacctcggcatgggaatcattcaggatgaggccattgggacaaagtttggattctccaatgcactttgttccgcatccaagcgaaactagttgacatgcttccgtgttccggttgaactccacgattcccgccaaaattgtccattgattggctgtgggctttcctgtttttggcaaggactcgaatttttttaaacaaagttccgcaatttccttaacagtcggttttttgttatcacacatttttgtttatattcgcaaatgtgcgaaccgataagttcggtaatcgaatagcaatatcgattggcgtgttgcattgtttaccttttgcttgcacactctggtctcactgtttatttatttacttgcggtgtttaatgaaataggaaattactttaattttataagtttcataagtccgaaacccacaaataaccatgcccaaagtagtgtcgcgcagtatcgtctgctccgataccaaggatcaggaggagtacaacgaggaaaagccgctaaacatttactactgtctgtgcaacaagatggctctgattctgggtaagattactggagccaactaactgaaagcatagtacatcatgtttgcctatcctacagattgcaccctcgaacagttgccgctacgagaggtggacaacgcccgtgtgataaacgccaacgaccatgccaacaaactcacccacaatcccacaccgaggatggtctacatcaaacgcaagagcaggggcaatgggatcgagaagcagtaccgctacaaggtgagtagctgacttccactccttacccgtcattagttcacctaatgttttcctttaaccttcagtgccgaagctgcagtctgccgctttactatcgccacagtcccgactcccacgtaaccttcgtcatgtccaatgccctaatccgcaacaagggtgagagtcctctcacacagctgctgaattcggagatcaagggcagtttcaaggcaccggctgccaagccagcgacttccgccggtccagacgattcgggtattgtggatgccagtggcaagaaggtcgtcgtcaccagacacacgaagaacatgggcaagttcagctcggtcacggtgtctaccatcgacgaggaggaggatgaaatcgaggcggtaagtttgtcagctaaagttggtttgtaaatggtgcaggaaatccaatctatcattgcatcatctacgaacaaacctacaactctttcaaac

SEQ ID NO: 37964 - DNA, 1185 bp, DROSOPHILA
atgtgtgataacaaaaaaccgactgttaaggaaattgcggaactttgtttaaaaaaattcgagtccttgccaaaaacaggaaagcccacagccaatcaatggacaattttggcgggaatcgtggagttcaaccggaacacggaagcatgtcaactagtttcgcttggatgcggaacaaagtgcattggagaatccaaactttgtcccaatggcctcatcctgaatgattcccatgccgaggtgctggcacgtcgtggatttcttcgctttctataccaggagctcaagcaggatagaatctttcattggaacagcacgctaagtacgtacgacatggatgagcacgtggagttccactttctgagcacacaaacgccttgtggggatgcctgcatccttgaggaagagcaaccagcggcgcgggccaaacgccagcggctggatgaggattccgagatggtctatacgggtgccaaactaataagtgaccttagcgatgatccaatgttgcagacgccaggagctctgcgaacgaagcccggacgtggagagcgcactctatccatgtcctgcagtgataagatagcgcgatggaatgtcataggcgtgcagggggcactactggatgtattgatctccaaacccatctactttagcagcctgaacttttgctgtgacgatgcgcagctggaatctttggaacgtgccatctttaaacgtttcgattgtaggacatttaagcacacgcgcttccagcctcaaaggccacagataaacattgatcctggcataagatttgaattttcccaacgctccgactggcagccatcccccaatggcctgatttggtcccaggtcccagaagaattaaggccctatgaaatttccgtaaatggaaagcgtcaaggagtaactaagaaaaagatgaaaacttcacaagctgcactggcgatcagcaagtacaagctgttccttacatttctagagttggtaaagttcaatccgaagctaagtgaaatgttcgatcaacagctttccgatcctgagcgtatcgcctatgcttcctgtaaagacttggccagagattaccagtttgcctggcgggaaatcaaagagaaatactttctccaatggaccaaaaaaccacacgagttgctagactttaatccaatgtcaaataaatga

SEQ ID NO: 37965 - protein, 394 aa, DROSOPHILA
MCDNKKPTVKEIAELCLKKFESLPKTGKPTANQWTILAGIVEFNRNTEACQLVSLGCGTKCIGESKLCPNGLILNDSHAEVLARRGFLRFLYQELKQDRIFHWNSTLSTYDMDEHVEFHFLSTQTPCGDACILEEEQPAARAKRQRLDEDSEMVYTGAKLISDLSDDPMLQTPGALRTKPGRGERTLSMSCSDKIARWNVIGVQGALLDVLISKPIYFSSLNFCCDDAQLESLERAIFKRFDCRTFKHTRFQPQRPQINIDPGIRFEFSQRSDWQPSPNGLIWSQVPEELRPYEISVNGKRQGVTKKKMKTSQAALAISKYKLFLTFLELVKFNPKLSEMFDQQLSDPERIAYASCKDLARDYQFAWREIKEKYFLQWTKKPHELLDFNPMSNK

SEQ ID NO: 37966 - DNA, 3377 bp, DROSOPHILA
ggtaagcagccggtgcctatcgataccatcagagttgccgctgtgagcttaacggacttatggcttataagagcctagagcgctccaattggcatttagacggcaagtgaaatatttatttttttaaattggttgaattgtagttacaaagatattgacttaaaatctattcatatatatggcacttaattgaaataaattaactacattatgttactatcgataccagtccaaacaaatatagtatttatgtctattacggtgatttttctggttggcgtttttggtatttctcgtgcacttcatagtacagtgcttactccataagtgtaatattccgaattaatcccgtgattacatgtgtgtctggtgtaatgaaatcactgtacactatctaaccattacttgtaaattaatagtacaaaatcttgttagttaaaaattaatcacccacttgagttggtggaagttcgctctgtagagtgaccactgtacctgctcttcatccacagtttgttgtggaacgcctcgcaccaactacatacttttacatactcggctgcgctcgacgtaaattctcgcacttttctgttggtttcgtagtaaattttcgccttttcgctgtcaaataaagcgcacgcatcgggaaaaacggagaaaagtgcaaaataactaaatataaagtgtatcaaatataactgttagaaaaatgccatttgattgtgtactgtaatagcgtaaacaaaagtgttttgattgtttgtgcaggtgcaaaatcgatctagtgaactgaaaactgcgactccaaaatcggtcgagttagcgcatttattgccccgattgttgttattggaaaatgttgttcgtttgggaaaactgtgccatcgcaattttgtagtgttcgtgcctgtgtgtgtgccgtgtgtgcgtgacgagtgtatgtgccagtaaattaagttaattaaaaacttagctaactctcgattccaccgcccccgccatgagtaactaccatccgcattcgcatccgcacgcgctctcgcatccgcatccgcagcaggtccataatcagctgcagaatccccaccagaaccagttgccgcccccgcaacgccataaccatgccgcgcccactgcagcagcctccgcctccggagcgccatcatcatcagcatcggcatcggcatcagcatctatcctggtggcccatcctccccagccgctcatcagcaactcgctggccatccggcaggagatccagcgattcgagagcgtccacccatccatctatgccatatacgaactgatcgatctgctgcccatggccgatgcccagatagcccagtccattcgggaccatgtggtctgcattgaaggtaagtccccctctattagtgcacctagtttaatgattataattagttacactagagtttagccattgaatggtaaagcggtttctgtaattagttttgcaatcaaagtttatgtttgtccacctgtttatactgtaaatattgcaggcttaacttcctattaaatggcaataaggagatcaagtggcctaattgtccaattagatattgctgaaaagtttatgatgtttagcttaggtttcgagttatagattctcatttccacctgttaatactaagtctatccaatttgggtcgttacactctttgtaataaataaataaatgtgattagtatagcatataatgtttataagatgtacgaccaaacccgacttaacctgaaagtattttaatgaatatatttcaacgcttaagtgcttgaaagcagctgcacaaatgttttgctagaaaataggcttttaaacgtaaaatgtgtaagtgctagattccaaatataacagtactcttattatatatttcgtttgttttttaatggcttgcaaatttatgcaccataacaaggaaatgctctgcttgtgaattcgaaacttttgctcaagggtcactggttttaatggagcattcggaggtgtgccccagaaatgatgagcaactaaatgtgctataaattatgcaaagacacagtaaagaaaagggtttcaaagtcggaaagtggagtctatcgtgactttcgatggactgactggtcgtcccattgagtgtgtcaagtcggcgggaagagatgcgaatcctttgattaaacatgtttatcgctgcaattgtatccacaccttcattgtgccccttatcgcgagcgtctggacttgtggttgcctttgtttggagtgctttatgctaatcttagaccgaaaatctatgaggcaacatcaacccccggttgatggcgaggattattgttgccaaaatgcccattcaagcggatcgcagcgggcccattgaaagtgttgtcgctctgttcatggaaaagaaagagcttcgttttttgtttaaaacaagcttttctgcccaattttcagcatgtgtgtgtgtgtgtgtgtgtgtttgtatgcggggactgaaatttgatgccctcttcctctttgtggcaggcagcaaaactgaatactgaaaactgaaaaccgttcacgaaatcaaaccgaaaaccggttcctgaaatggtttattagaaaatctctggcagaggcagcaacaacgaaaggctcaccaaaaatgtaaacaaaattgtcagaggcagcggcagcggcagcaacctcatgaatactcgaatactccactctgtgtcgtgcaaaccagatatgtacgaaacccgagaatacgagagcgtacgatctcgtaaaccgtttcgcacgcgactttcttattggcattgacccgcaacacgggcacattggtccaatatgtacaaatatatacatatataactatatcgaataccgattctaattcgctgtcagcgtgatgaacgatgctttcgttggactctggttgccgttttcccgttccaaatgcttatttataggtttcggtaacggtctccaataaatcgagaaggtcaaaagtatctaacgaaaataaataaaagaaattctgtgctatctgttcgttaaccttttcatttgaaatcgatttagaagctatatagcataaataatcatacagcagcttactatacatagcttactacttaacaaataaaaacgtttatggacaataatctaaagaatcgatataatctcagaacttaatgcccgttttttttttttttttggttaagagctcttgcgtttaaagtgcccccttaatattgtaagctgctgactcaccgaaatcagttcgagtcttaaaccacatttaactgctaagatgtcattgaacttttagcgaatcaaagtttagttacatatttaaaaggcactcaagaaaaataatgtgttgctga

SEQ ID NO: 37967 - DNA, 471 bp, DROSOPHILA
atgagtaactaccatccgcattcgcatccgcacgcgctctcgcatccgcatccgcagcaggtccataatcagctgcagaatccccaccagaaccagttgccgcccccgcaacgccataaccatgccgcgcccactgcagcagcctccgcctccggagcgccatcatcatcagcatcggcatcggcatcagcatctatcctggtggcccatcctccccagccgctcatcagcaactcgctggccatccggcaggagatccagcgattcgagagcgtccacccatccatctatgccatatacgaactgatcgatctgctgcccatggccgatgcccagatagcccagtccattcgggaccatgtggtctgcattgaagaccgaaaatctatgaggcaacatcaacccccggttgatggcgaggattattgttgccaaaatgcccattcaagcggatcgcagcgggcccattga

SEQ ID NO: 37968 - protein, 156 aa, DROSOPHILA
MSNYHPHSHPHALSHPHPQQVHNQLQNPHQNQLPPPQRHNHAAPTAAASASGAPSSSASASASASILVAHPPQPLISNSLAIRQEIQRFESVHPSIYAIYELIDLLPMADAQIAQSIRDHVVCIEDRKSMRQHQPPVDGEDYCCQNAHSSGSQRAH

SEQ ID NO: 37969 - DNA, 2990 bp, DROSOPHILA
gaaaattcaaatcttatgccaggatcaatgtttatctgtggcctttgaggctggaagcgcgtgtgcttaaatgtcctacaatcgaaacgtttaaagatggcacgttccaaagattccagctgcgcatcgtcacagcaaaagttcaggctgctaaagtagatgggtttggagatcaatacatccagtagtgccccctgcacgcctatgacattccatcgcgctatcttatcactgcaggacatggatagagtgcgctctccacgtccgggcttcgttcgcagagctcctggcgtctgcaacattggatcatcgctaaggtcacttattagtttggcacccgtatagaccatctcggaatcctcatccagccgctggcgtttggcccgcgccgctggttgctcttcctcaaggatgcaggcatccccacaaggcgtttgtgtgctcagaaagtggaactccacgtgctcatccatgtcgtacgtacttagcgtgctgttccaatgaaagattctatcctgcttgagctcctggtatagaaagcgaagaaatccacgacgtgccagcacctcggcatgggaatcattcaggatgaggccattgggacaaagtttggattctccaatgcactttgttccgcatccaagcgaaactagttgacatgcttccgtgttccggttgaactccacgattcccgccaaaattgtccattgattggctgtgggctttcctgtttttggcaaggactcgaatttttttaaacaaagttccgcaatttccttaacagtcggttttttgttatcacacatttttgtttatattcgcaaatgtgcgaaccgataagttcggtaatcgaatagcaatatcgattggcgtgttgcattgtttaccttttgcttgcacactctggtctcactgtttatttatttacttgcggtgtttaatgaaataggaaattactttaattttataagtttcataagtccgaaacccacaaataaccatgcccaaagtagtgtcgcgcagtatcgtctgctccgataccaaggatcaggaggagtacaacgaggaaaagccgctaaacatttactactgtctgtgcaacaagatggctctgattctgggtaagattactggagccaactaactgaaagcatagtacatcatgtttgcctatcctacagattgcaccctcgaacagttgccgctacgagaggtggacaacgcccgtgtgataaacgccaacgaccatgccaacaaactcacccacaatcccacaccgaggatggtctacatcaaacgcaagagcaggggcaatgggatcgagaagcagtaccgctacaaggtgagtagctgacttccactccttacccgtcattagttcacctaatgttttcctttaaccttcagtgccgaagctgcagtctgccgctttactatcgccacagtcccgactcccacgtaaccttcgtcatgtccaatgccctaatccgcaacaagggtgagagtcctctcacacagctgctgaattcggagatcaagggcagtttcaaggcaccggctgccaagccagcgacttccgccggtccagacgattcgggtattgtggatgccagtggcaagaaggtcgtcgtcaccagacacacgaagaacatgggcaagttcagctcggtcacggtgtctaccatcgacgaggaggaggatgaaatcgaggcggtaagtttgtcagctaaagttggtttgtaaatggtgcaggaaatccaatctatcattgcatcatctacgaacaaacctacaactctttcaaactaaccattttttttgttcattcaaacagcgcgagatcgcagacagctatgcgaacaacgcaaggattatcgagaagcaactgcagcgcaaaggcggaaaattgagcgatgtgggcatcaaaaccaagacagaggacgcacctccgccgcagaagaagcagcgcggcacgctactggaaagatagtcacactctgcctccttattacccacaactaaatatatttgacgacacaaatggctggcattcttggaagaaaaattgcaatttatctagttatagcatacgcaaatagtttgaccttctatgctgtcgttttggcagcaaactgggatgctgtgccagtagcttcttcagtcgctgctcggcgtgctggtgattgagaatcgagtccttgacaagcccacaactgggacatagattgtactccgactttgactttttgacgatcgctggacgcacgcgagtctccatgatcagcttcattcgattcgtggtacgcggcgagttgtgcagagcagtgagtggacggcacttacttcttggcgaggattcggtccgttccaaagcagccttctccttgctcctgaccagctcgagtgcacgattcgctcgggctttggccagctgcaattcgagaggcgcctttggcaggttaaaaaagaagtgggtccacttatcgcgcaactgttcgatggcctccgagttgaatagtgagctggaacgattggaggtatggggtccccattccgcgttcccgatgcaactcaatctataagcggacattgaaacctgaagtattatacactgaaaatttgacaacaaagtaaaagtgtacatatatgtgtatatgtatactatataccgtatagttatggtttttggatggattgtttttcaaatatataattatacgagggtatagaagcttcgacttctggaagctagctccctaactgtttttggtttttgtattctgttgcattgcattgctttcatatgtttaattgtttcaactgaacacattgtacttgttttcgatttagaagcgttgaaagcggatgtatcttacattatccaagtaaaataagggatgagtcgatatgtatgttgcatatctccttacgattttagataaggaaagacattttataaatataaatataaatttcttgaaatataaaca

SEQ ID NO: 37970 - DNA, 744 bp, DROSOPHILA
atgcccaaagtagtgtcgcgcagtatcgtctgctccgataccaaggatcaggaggagtacaacgaggaaaagccgctaaacatttactactgtctgtgcaacaagatggctctgattctggattgcaccctcgaacagttgccgctacgagaggtggacaacgcccgtgtgataaacgccaacgaccatgccaacaaactcacccacaatcccacaccgaggatggtctacatcaaacgcaagagcaggggcaatgggatcgagaagcagtaccgctacaagtgccgaagctgcagtctgccgctttactatcgccacagtcccgactcccacgtaaccttcgtcatgtccaatgccctaatccgcaacaagggtgagagtcctctcacacagctgctgaattcggagatcaagggcagtttcaaggcaccggctgccaagccagcgacttccgccggtccagacgattcgggtattgtggatgccagtggcaagaaggtcgtcgtcaccagacacacgaagaacatgggcaagttcagctcggtcacggtgtctaccatcgacgaggaggaggatgaaatcgaggcgcgcgagatcgcagacagctatgcgaacaacgcaaggattatcgagaagcaactgcagcgcaaaggcggaaaattgagcgatgtgggcatcaaaaccaagacagaggacgcacctccgccgcagaagaagcagcgcggcacgctactggaaagatag

SEQ ID NO: 37971 - protein, 247 aa, DROSOPHILA
MPKVVSRSIVCSDTKDQEEYNEEKPLNIYYCLCNKMALILDCTLEQLPLREVDNARVINANDHANKLTHNPTPRMVYIKRKSRGNGIEKQYRYKCRSCSLPLYYRHSPDSHVTFVMSNALIRNKGESPLTQLLNSEIKGSFKAPAAKPATSAGPDDSGIVDASGKKVVVTRHTKNMGKFSSVTVSTIDEEEDEIEAREIADSYANNARIIEKQLQRKGGKLSDVGIKTKTEDAPPPQKKQRGTLLER

SEQ ID NO: 37972 - DNA, 2828 bp, DROSOPHILA
accagacggcggacatctggtcggtgggctgcatcatggctgagctgctgactgggcgcacgctgttccctggaaccgatcacatccatcagctgaacctcatcatggaagtgctgggcacgccagctgatgagttcatgagccgcatctcctcggagagcgctagaaactatattcgttcactgccggtgatgccgcgccgcaatttccgcgacatcttccgcggtgccaatccgctggccatcgatttgctggagaagatgctggaacttgacgccgacaagcgcataaccgccgagcaggcgctggcccatccgtacatggagaagtaccacgatccaaccgatgagcagaccgccgcgctctacgaccagagcttcgaggagaacgagctgccggtggagaagtggcgggagatggtcttcagcgaggtgacggccttcaagcccacagccgccttcgctgagctcctgcccaaagagcagtaatcccggccgccatccctctccgttcaatgatgctatatacaattagaacagtcttttctacacctagttcaagcggatgcgctcagtcgtgatttctctactcgtcgagtgtaaacaatcggggatatttattctagagcgatttatatttagaaactcttcagtggctggatttcaacaatttgttttgaccacaaacgtaaggtgaaatagtattgtattttcgaaccttcgatttgcattcgatggatatagaaatagcgattgaactaggtgcatgcctgaaatgtagccattcggaaatgtttccaaaaatcaatcagagtcacagccttaatgtccagttcaactttagatttggtgtcggttttaacacgcagttcttgtgaataatcctgtaaatgtgagtgtacatgtacatcgtagttcgtaagcgaacgcatctagcggccagtaactataaaaaagagcactagtgtctacgttgaatccaaataaatgtgctatgtattttaaaaaatgagatcctctagatatcgctcgaattcctgctctctggaggcttgctctcggcttatatcgggttgttgttgccagatctgttcgtctgccgtggtggcatcctttgagtctgtgggctccttgctggcttctggatgggattcggatgctggttcgacaggctcctcctcctcttcgccagaactttcgtgaccaacatcgagttttcgacgcttacgtttcttttcagcgcgccgttcctccttttccctgcgtctccgcttcttgcattctctcttcttggtgcggtagttcagctgatccgtgtgggtgggacacagccgcacctatggaattcccattagtgacacaatcgcggaaacccatttggaacccaccttgaccagcgcatttaggggctcacccttttcgatatacctaaagtttacctcccagctgcgcagattatcccgctccccgcaatgccggctgccgcactggaactgcccggttccggtgaccacctcctgctccgttcgccagcgcagcgctatcttgttctccttgtagcgggacaggtccgcgatgcagtactccttaaatagcttcctgtagtatcgcagggccaagcgctgctcccagcttagggtgtcgctatccaactcgtcgtcctcccacaggaagcggtgattctctcggattacatcgatgtctcgcttgtgccgacgtgattccgtctcattcggtaggttaagcacgtaattactaagtatatagttgtgtcgctccttggcactcaggttgttcagattcactgggaataattgcgagccgctcattatgataaaaaatttataataaacagacttcgatttcagggcactgcctatcgatatatcgaagactgtggtcctactctggctatttttacgctatatattaaacgataaataaaatgaagctgcaaaatttaatcacaaattgaaattattccaactgaatataataaataaattttaatatatattattgttattaaccaaaataaaatggctataacaagtttagaagaatggcccgtaatggcgaaactgcatggtattaatcttagccaatacatatactgtttacacactgtggaataagttaaatttcttactttaaaggtacaaattaagagttctttgcttaattaaatgcaactttttatgaaatataattaaacaatatttattttacttataaatcaaaaaaacaaattaaaaatgtgaaatatacaagaaaataaaaaacaaattccaagtttacacactttttaaaattattttatgacccccattggctttggctacgagtagactgtacacttatcagtaaacaataattatttgtagcgttcctccgttttttactacaagtccaatgttattgaattcattcccacagtgactcaagtctcaggagcgggtgcggttcccatttcgataagtattactatcgacgttgatagagaaaaaatgccattcaacaaagcaaagtaaaattagggaaaagttgatgttaaacagaaaatggctgggacttttaccccgctgttcttcgtctttctgcggaagaatttgctctacttgcaacgcaacttgctgcccctgctccttatctgctccggatttgccggagtactcaccgcgtacctccactggtccgtcaagcccgtgcttcaccaaattaaccagtttgaagcaaagaatgaagtaagtttccctcgcactgctactttatctgctttttatatttgtacatacgtatgcatgtgataacaaacctgtgaccacacta

SEQ ID NO: 37973 - DNA, 777 bp, DROSOPHILA
atgagcggctcgcaattattcccagtgaatctgaacaacctgagtgccaaggagcgacacaactatatacttagtaattacgtgcttaacctaccgaatgagacggaatcacgtcggcacaagcgagacatcgatgtaatccgagagaatcaccgcttcctgtgggaggacgacgagttggatagcgacaccctaagctgggagcagcgcttggccctgcgatactacaggaagctatttaaggagtactgcatcgcggacctgtcccgctacaaggagaacaagatagcgctgcgctggcgaacggagcaggaggtggtcaccggaaccgggcagttccagtgcggcagccggcattgcggggagcgggataatctgcgcagctgggaggtaaactttaggtatatcgaaaagggtgagcccctaaatgcgctggtcaaggtgcggctgtgtcccacccacacggatcagctgaactaccgcaccaagaagagagaatgcaagaagcggagacgcagggaaaaggaggaacggcgcgctgaaaagaaacgtaagcgtcgaaaactcgatgttggtcacgaaagttctggcgaagaggaggaggagcctgtcgaaccagcatccgaatcccatccagaagccagcaaggagcccacagactcaaaggatgccaccacggcagacgaacagatctggcaacaacaacccgatataagccgagagcaagcctccagagagcaggaattcgagcgatatctagaggatctcattttttaa

SEQ ID NO: 37974 - protein, 258 aa, DROSOPHILA
MSGSQLFPVNLNNLSAKERHNYILSNYVLNLPNETESRRHKRDIDVIRENHRFLWEDDELDSDTLSWEQRLALRYYRKLFKEYCIADLSRYKENKIALRWRTEQEVVTGTGQFQCGSRHCGERDNLRSWEVNFRYIEKGEPLNALVKVRLCPTHTDQLNYRTKKRECKKRRRREKEERRAEKKRKRRKLDVGHESSGEEEEEPVEPASESHPEASKEPTDSKDATTADEQIWQQQPDISREQASREQEFERYLEDLIF

SEQ ID NO: 37975 - DNA, 4117 bp, DROSOPHILA
tggcacgttgaagtcagagtttcctggtctggaactgcgcgagagccatgccggcacactcacctactttgttagcacgcaggagagtgtggtcctttggtcaagtgttttcaagatagctgaggaatatctgggcgatcgcttaagcgctctcgtggccgactattcggtgaacgagtgcacactcgaggatattttcctcaagttcgagagagaggcgaaatcacaatcgacgtcacgtcaaacctccgtgcaacgcaggccggaatgcagctacgtttaggccagatagtcggagtgtcggagtatcaagtaagataagcagaagacgggcgtcgtacatttcattatttccctcaaatatggaacttttatgaatctctatccggtgggaataatctacttaatgtatttagggactaataaaaccaaacaaacaccttcgacatgggtatataaaactaaaatataaaagtaagatataactagtacgacaaataaataatattttttatttatattataataaatatttctacataatatttgatgtgcattgattatgggattaaggtaaattatcataattcaaaagaagttaaaaacagttttatacccttctattggtagaggaacaggtatctgattgacggggaactcgactatagcattctcccgtttttttttttttttaatttaaaatctcccgccttagtatttttaaaataccactcataataataccaaaaggaactttaaacgatctatatttggaatttaacgattcattcaagaattaaaagtaatacataatgtaatttttttatccagcttgactattgaatatttaattatgagaaaaataaatataaaactattattacttggacgacttaggcgctaatggaaatgtcaaattctcaaaaaatctcccacttggccacactaatgtagcgttatttacaaaatattcatttttttcgtcgttaatttatcgtttatgccgaatatgtcgcgtagcagaatatggaagttctacgacaagttggatcggaattccgcgcagtgccagctctgcgagaaagtaatcaagacaagcggcaacacgtccaatctgatgaagcacatgaagacccatccgcagatgtaggaaaggctcctgagttcaaaaacctttcacaatgaaaattttcttgaagaaacctcttcgacgacgatgtggtggtggagcggggcatatacaagcggcgggagcaggatgacaagctgcgattccggaaggttgttcccttcaaggaagagagctctgatttccacagcgagctgttgttcaaggctgccaaggatgcgagcggcattatcgagctggatgatcaaggaatgatcaaggcggctgctgaggatcgcatctcaacaaagagcgtcgggtatgcgtgggtctctccggaggccacagtgtcccgaacggagacggttggcggcgacgatatcatcgaattcgaacccaaggaggagctcgatgagtcggagaaaagcccacttccccaaattcatgctgtaccatttgccggccatgagtaagttttaatcaaaagatagaaggtagaagatagatacaattgtagtaaacttcatttattacccagcaacttaaaaatggaagaacctctgccgagcgagagtccgtttcacaaggacattgccttctttgtctgccgtgaccgccagtcattgcagattgtgcagggcgagggattccagcacctagtgaaagtactgtgccccacctacagaccaccgagtgcggcgaaactggaggccattatctgcagggagtcggaagcgcagaggtccaagctctgccagcagttggccgacatctcgacactcagcctaagttgctcggtgcacacgaatgcggagagtcgaagctggatggagctggtggcccactttcacgaggggcggcaacgaatctcccgaactctttctgtgctgcgccttcccgatcttttcacctccaacgatctggtggatcgcatggaccaagtgtgtcagcgcttcgacattccaaagtcaaggatctgctgcgtgtcgacaaggagcagtcaactactggaggatgcggtgacatcgttcatgggcgctcatcatcatgttccctgcttcgcagaccaattgaattctattttagaggaggtggtgcagcgcccagaaatacgtcatttgcgcgacaaggtgcgttcccatgtgcagtccacattgcagctgaatccccaactggattccatacaccgaccgattagtgtgtacaatatgctagacttatacctgaaacagactctcgttcaagagccgctgccgctttcgacatcggaggtggatttgtgtcagcaattgctggacgtgctgaggccgttgaccagctccatgcgtgagctaagtcgaacaccatatccggcggccagcacagccctgcccattgcccaaactctgatcaacgaactgaagcaggagaagagtgcggaacacatggttgccagggaaatacgcttgttcctggttcagcagctggaggagatcttcgaacgaatggagcgcaacttgcacctggcattggcaagtctgctggacccacgctttcgaaatattcccttccggagtggggccctggtggcccagtacatgactcaactctatgacatgatgcaggcgcatgtggacagcggggagcaagctgttgcaaagcatccggagaaccgtgatcactacgatatctgggcggcattcaaatccttttcgcatgggaagcaaaggattgtaaacggcagcaacggtcccgaggcggacgatgagatagccagatacttttgcgccggcatgagtaccctgcgagccgatccctttcagctctgggaggaactggccgaagctcaccccttcctgcacaacgtagcacagaggtacctgcacgttccggccaccgcagagccggcggatcggctatttacggccgaaggagcggcggttgcggcgcagtacgccagactaatcgaaaacaacatggaaaacatactcttcatggcggaaattccaacgaaggagtggcagttatagcgtagtccataatcaatccaaacctaagttgagcactgtgtttttgtaccccttttattaactaatttattaatttacatttacaataatgcgaactataaaatacattttttaactttttagcttctcaagcgttaaggaactatttttgtattagaaaattagaggtagggaacgaataacgaacacatattcattaaagatttgtaagtactatttactacacatatttacacaaataatttattttaaatataactttattgtttacttttttcttttgttatcacaaatcgccgttacaaattcaaataacaataacaccagcaaattagcaaaaataccaaaaccgagagaataccaaaaacttcccaacactgccgacagctcagtaattttcgcttacacggtcacacttctgatgacgttttttcgtattttgaagggaatgtaaatgtggaaaaactgagagatttgcaacatgcaaacatccacgacacgctaaaaactcaccgagtgccgccacacgacaatccaaccgagaggagcactccgcacagctggcggagcacccagaaggcagcaggcgaaagttgcgtggctgttgtttccggaagcggtgggcagagggaaatccgaagcagtggtagtagggaaagaggcatcgaaacccacccagcgaaggcgaccttgggagtggcagcggcccaatatgcacaacaactccacaaaaaccaaggaaatgttcatcgtgcgtgctctagaaaagatccttgccgataaggacatacggcgctcccatcactcgcagctgaagaagtcctgcgattcggcgctggagcagattaaggcggagctaatcagtgccggccagatcgcagagggcaatgagctgccctgtgccgcactcccgctgcccaagaatgatgcagcgagcatcataaatgcggagacctactttctccccttcgagcttgcctgcaagagccgctcgcccagg

SEQ ID NO: 37976 - DNA, 1995 bp, DROSOPHILA
atgccgaatatgtcgcgtagcagaatatggaagttctacgacaagttggatcggaattccgcgcagtgccagctctgcgagaaagtaatcaagacaagcggcaacacgtccaatctgatgaagcacatgaagacccatccgcagataaacctcttcgacgacgatgtggtggtggagcggggcatatacaagcggcgggagcaggatgacaagctgcgattccggaaggttgttcccttcaaggaagagagctctgatttccacagcgagctgttgttcaaggctgccaaggatgcgagcggcattatcgagctggatgatcaaggaatgatcaaggcggctgctgaggatcgcatctcaacaaagagcgtcgggtatgcgtgggtctctccggaggccacagtgtcccgaacggagacggttggcggcgacgatatcatcgaattcgaacccaaggaggagctcgatgagtcggagaaaagcccacttccccaaattcatgctgtaccatttgccggccatgacaacttaaaaatggaagaacctctgccgagcgagagtccgtttcacaaggacattgccttctttgtctgccgtgaccgccagtcattgcagattgtgcagggcgagggattccagcacctagtgaaagtactgtgccccacctacagaccaccgagtgcggcgaaactggaggccattatctgcagggagtcggaagcgcagaggtccaagctctgccagcagttggccgacatctcgacactcagcctaagttgctcggtgcacacgaatgcggagagtcgaagctggatggagctggtggcccactttcacgaggggcggcaacgaatctcccgaactctttctgtgctgcgccttcccgatcttttcacctccaacgatctggtggatcgcatggaccaagtgtgtcagcgcttcgacattccaaagtcaaggatctgctgcgtgtcgacaaggagcagtcaactactggaggatgcggtgacatcgttcatgggcgctcatcatcatgttccctgcttcgcagaccaattgaattctattttagaggaggtggtgcagcgcccagaaatacgtcatttgcgcgacaaggtgcgttcccatgtgcagtccacattgcagctgaatccccaactggattccatacaccgaccgattagtgtgtacaatatgctagacttatacctgaaacagactctcgttcaagagccgctgccgctttcgacatcggaggtggatttgtgtcagcaattgctggacgtgctgaggccgttgaccagctccatgcgtgagctaagtcgaacaccatatccggcggccagcacagccctgcccattgcccaaactctgatcaacgaactgaagcaggagaagagtgcggaacacatggttgccagggaaatacgcttgttcctggttcagcagctggaggagatcttcgaacgaatggagcgcaacttgcacctggcattggcaagtctgctggacccacgctttcgaaatattcccttccggagtggggccctggtggcccagtacatgactcaactctatgacatgatgcaggcgcatgtggacagcggggagcaagctgttgcaaagcatccggagaaccgtgatcactacgatatctgggcggcattcaaatccttttcgcatgggaagcaaaggattgtaaacggcagcaacggtcccgaggcggacgatgagatagccagatacttttgcgccggcatgagtaccctgcgagccgatccctttcagctctgggaggaactggccgaagctcaccccttcctgcacaacgtagcacagaggtacctgcacgttccggccaccgcagagccggcggatcggctatttacggccgaaggagcggcggttgcggcgcagtacgccagactaatcgaaaacaacatggaaaacatactcttcatggcggaaattccaacgaaggagtggcagttatag

SEQ ID NO: 37977 - protein, 664 aa, DROSOPHILA
MPNMSRSRIWKFYDKLDRNSAQCQLCEKVIKTSGNTSNLMKHMKTHPQINLFDDDVVVERGIYKRREQDDKLRFRKVVPFKEESSDFHSELLFKAAKDASGIIELDDQGMIKAAAEDRISTKSVGYAWVSPEATVSRTETVGGDDIIEFEPKEELDESEKSPLPQIHAVPFAGHDNLKMEEPLPSESPFHKDIAFFVCRDRQSLQIVQGEGFQHLVKVLCPTYRPPSAAKLEAIICRESEAQRSKLCQQLADISTLSLSCSVHTNAESRSWMELVAHFHEGRQRISRTLSVLRLPDLFTSNDLVDRMDQVCQRFDIPKSRICCVSTRSSQLLEDAVTSFMGAHHHVPCFADQLNSILEEVVQRPEIRHLRDKVRSHVQSTLQLNPQLDSIHRPISVYNMLDLYLKQTLVQEPLPLSTSEVDLCQQLLDVLRPLTSSMRELSRTPYPAASTALPIAQTLINELKQEKSAEHMVAREIRLFLVQQLEEIFERMERNLHLALASLLDPRFRNIPFRSGALVAQYMTQLYDMMQAHVDSGEQAVAKHPENRDHYDIWAAFKSFSHGKQRIVNGSNGPEADDEIARYFCAGMSTLRADPFQLWEELAEAHPFLHNVAQRYLHVPATAEPADRLFTAEGAAVAAQYARLIENNMENILFMAEIPTKEWQL

SEQ ID NO: 37978 - DNA, 2429 bp, DROSOPHILA
tttaaacgagtctcactttgctaatcaaaccttccatgcgcatttttccagcactctgatggcgggcatcttgccctttggcgccgtcttcattgaactcttctttgtgttcacggccatctggcagaatcagttctactacctgtttggctttctattcttggtgttttgcatcttagtcgtaagctgtgcccagatctctatagtaatgacttatttccagctctgcggtgaggtaagctgatatagtgagcacttaaaaaaggtgatggttaatcacttatttatttcttttcatgcaggactaccgctggtggtggcgcagttttgttgtgtctggcggctcggctgtttatgtacttttttatagcatcttctactttttcacaaagctggagatcacagagttcataccgacgctgctctacctgggctatacgggtatgcttgtgcaaaacctcgcatattccaatagatttaaccatccaatttaacacccaggtcttatggtgctcacattttggctgctaactggctcgattggcttcttcgccgcctacgttttcattctaagaatctacggagctgtgaagatcgactaagctgtgtcacccactcgtcacgctgtacaccaaactatccttgcaatatcattcgatcataaatatatttatagagcaactgaacccagtctcgtccagctgcagaaatcaatataaacaaaacggaaactaagcgaaaactcgacgactcagccatgtgagctaacttccccttcttgtccccagctgcagaaagtcacccactaagtaaccatttactaagtcaaaacgctaaattcagcaagtacgttttggaaccccggaagtgactcgatttgcaggagcgtgagcgttgcgttttagaatcaatctagaaatgcctaatttatatatgtatgtaaagaatctaatctaagcaactgatataaaacaaacaaaaatcaaataaactaagcttaatgtacgacacaccgccggtgagtgtaagtttcttagcaggaatccaacttgtcgcttctgttcgtgttttatgaactcggaaacttgaagtttttagctcagttgcatttctacttcgctgcaagctagttcaacaaaccatatctaaaaatgtttcgcttgcttttggcattaatttgtgcattttctttgccatatttcctaagtacgggaagtcgagaagtaagactgacctttttaaaaagtctgaggctaacgatatatgtataatcccccaggcttggagaaagacagtgaagggtcgagtgatgtccaacgtcagcatgacactctactggtggatccagcaacacttcccgtatgaattggtaaagaacgaggacgaatgggatgcaattggcggcgatgtgtacgagaggccagaatagtttgaatatcataaaaaggccgaatatatactgtgaaatatttgtaatctgcaaagtttcaagtacatccttttgattttaaagttacaattacattgattatttaattaattggtacatataattgcttttagtatattacacatattagctttaaaacattatgtaagttatctatattcaatcgtatacaacttcttgattgggtgctgaccagagctagtagtgcccattgctcataacattatttcgcgtatttttgctgagtgtaggtaagattccgaagcaaaaagtgaggtcatcacaatggacgcagatatcttgtatggtaaccaagatttaatgctactttttaggggatcgttccattattttaagatccagctctttcacttcctaatccgtaaaacttaatgtaactactatcaatgcacaatttcctttaagtaggcacaaactaaggatgataaacaaagttaagtgtactattcattatcattttctgcacaacacattgctagattacttaagagatagattagagtctagagaccgtgcgggaacaaccctccttctgttcatcctgattctccgccagctactccggacgcagatgctcatctgtggaaaagtgcgctttgacatggttgcgaatcggtttacctcatcgggttccgattctttaaacgctagcgattccgcttggtcttgcgactcacattgccctcgatgataatctgatagcatgcaaagtaaagaatttgaattggaatatggtggtgtcttgatcgactctagtcgtattgtaagaagttggttagatagtttttcttcctgcagctggatgggtctatggtatagggacacttgaattgctgggtgtgggaacaggtgtggttgttaggatgggttagatggggttactccagcaccggctgctctacctgaaggatctggctggcctcgaaagcggtgcccggcagcaggatcaccggcgatg

SEQ ID NO: 37979 - DNA, 174 bp, DROSOPHILA
atgtacgacacaccgccggtgagtgcttggagaaagacagtgaagggtcgagtgatgtccaacgtcagcatgacactctactggtggatccagcaacacttcccgtatgaattggtaaagaacgaggacgaatgggatgcaattggcggcgatgtgtacgagaggccagaatag

SEQ ID NO: 37980 - protein, 57 aa, DROSOPHILA
MYDTPPVSAWRKTVKGRVMSNVSMTLYWWIQQHFPYELVKNEDEWDAIGGDVYERPE

SEQ ID NO: 37981 - DNA, 2879 bp, DROSOPHILA
ctgctacacaaaaccaaccacccgttctgttccccgcttttctctcggtgtaggctcacaaaatcgaaatgttaaaaaaaaaaaaaatgtaaagagcgagaaaaggggagcaaattttgtagctggtaggcaaaaagctggcaacaaatgatgaaatgctaaaatgcatatagcagcaatggagtgggtatgtttttttcgcaggggatgatgggtggctgggtggcttgttggctggaaaaggactgggaaggactcctgaagtgagcgcttgattacactgaaatgcactcaaaagtggcgaacgaagcgatgccgccggcgaaagcaatcgaatgggcaacaacagccgtacatacatatacgaacatgcatacatacatatttacaaacatacatacgttaacccaacgcccctgcgaatatgccacgcccactcgcacacatagaaagccgacaggctgagccaaaaagttccacaaattacatttaagtgacgcaaaagttaagtgaaactcattgcgaaaatcgcggatatatgcaatgtggcatgactgcctgtgaatgaggtggcgaatggtgggtggcaaaggggcagtgggtgtggcaagtgggcggtggtgcaacacgactaagtgctttggcttgccgaatgtaggcacttgaactatttttgttctctcgcccacttacatacgcgtcgccagttgtttatggctttgggatgtttctgaaggaaccaatggcggatttatgtgtgcctcataaagtgcacagaacagatatgatttatatattcgtactcgtactttttggcagtaatatgcagcagctataagatataaataatcaacatgcttcgaaaatcccaattgagtgtacaaaatattgcgatacttgtataagattgaaagcatcaatgatctgatatgaaaattataaaaatgtttcaaaatttattcttaaaattgtatcttatgttaccaatctgcgtactatgttaattcaatttcaatatgagagtgtggcaacaatcgagactaggatttggcgaggatttctctgcccgtttcttgacatctttcccccgctgctttttttcctttgcgggcattttatccgatcccgccgatgcccggactggtggttcactgagaataatagccggatacacgatagcccgaagtttgccgccgtggagaatcacctcgaaatgatggtaatgggccagcaccacgtgcggctttccggcgtcgagaaagctcttgatgggagtcaaggatattccgtggcagttaatatacactactgaaatatccagttgcaaagccgcctcataaacggtggccatatggcttccccaaacggcgacacttacaaacggcacacgttcggtggccaaaagacggggtaattcggttgcattgcgaaaagtgtgcaaagtcaccaccgaactgggtcgcgatcctccaaagaaactatgatcgaattcgcatacaatgaccggcgaagcatcggacattctgaactggaaacgaatgtcgtctggcgtcagcatgctgaccacttccgcctggaggcaattaagcatttccactgccttgacatagctggagtgagtggccgcctggtgatgcattcgttccatagagttgcgcactagatcacaaaacgaatccctcatcgtctcgtggacaaagacactgaccaccaggccaggagcaaagggctgcttcagggcgtgtaagagcggctgcatcgccttggccacatcggcattctggcagatgaccagcagggtgggatccttccagaccacgtcgctttcatcaccgggaaagtccggttggcgccatgtgtatggagtgtgtttcggcatgtttatatacaaaaaaaaaaaaaacaaaaacaaaattttagcaaggaaaatacgtataattttgaactttgtttaggtcctttcggaatgaaactaaactgttatgatttcagctaaagcaaaaagtcattgcttcctaaggctactgttgaattcgtctataaaatcagggtggtgactaattgtcgataaacatgctaaaaatacatcctaataaatttcacatagctaacatgtttattttaccacttgattaaaacaacatctactttttagcctaactaaatggttaggcaattgtggattacaacatgcattaagctcaagtaagcgttagtttcagaaccacatataatgccctgtgctatgtcctgtccaatccaattgataactaaatacgcttggacgaacgaattctgtcaactgtacagaatccggaatgtatatctttttcgtcatctgcttggatattagtttcccggccaggaaatgaacgttgactgctgtcctataccatctacatccatccatcagcgtcacttggcaacggagacagaaactgaaatacagacagagaaatggggaaatggatatatggagaatcggagaggaggatgtcttctctggcattgcctggatttgcttgtgttttagcctcatttgccacatggtttcgtttcgcttccctcgagagtggtatactccgtatttcccagtgggttattgcagttttccgccagcaacacgtggcttttcctgcactaatgatgcattctcacttgcaatattgccacattgcagcagaagcagcagcagcagcaacaaattcacatgcagcatcctcttgtctgttatcctgcgccccagtttacttgagtaaaatgcaatctcccagctcagagcactgagctcttagctttctggatcccaactccctgctcccaacattccgcactcatgggagcagacaaccaaccacgtcaccaagtcatccaggcat

SEQ ID NO: 37982 - DNA, 879 bp, DROSOPHILA
atgccgaaacacactccatacacatggcgccaaccggactttcccggtgatgaaagcgacgtggtctggaaggatcccaccctgctggtcatctgccagaatgccgatgtggccaaggcgatgcagccgctcttacacgccctgaagcagccctttgctcctggcctggtggtcagtgtctttgtccacgagacgatgagggattcgttttgtgatctagtgcgcaactctatggaacgaatgcatcaccaggcggccactcactccagctatgtcaaggcagtggaaatgcttaattgcctccaggcggaagtggtcagcatgctgacgccagacgacattcgtttccagttcagaatgtccgatgcttcgccggtcattgtatgcgaattcgatcatagtttctttggaggatcgcgacccagttcggtggtgactttgcacacttttcgcaatgcaaccgaattaccccgtcttttggccaccgaacgtgtgccgtttgtaagtgtcgccgtttggggaagccatatggccaccgtttatgaggcggctttgcaactggatatttcagtagtgtatattaactgccacggaatatccttgactcccatcaagagctttctcgacgccggaaagccgcacgtggtgctggcccattaccatcatttcgaggtgattctccacggcggcaaacttcgggctatcgtgtatccggctattattctcagtgaaccaccagtccgggcatcggcgggatcggataaaatgcccgcaaaggaaaaaaagcagcgggggaaagatgtcaagaaacgggcagagaaatcctcgccaaatcctagtctcgattgttgccacactctcatattgaaattgaattaa

SEQ ID NO: 37983 - protein, 292 aa, DROSOPHILA
MPKHTPYTWRQPDFPGDESDVVWKDPTLLVICQNADVAKAMQPLLHALKQPFAPGLVVSVFVHETMRDSFCDLVRNSMERMHHQAATHSSYVKAVEMLNCLQAEVVSMLTPDDIRFQFRMSDASPVIVCEFDHSFFGGSRPSSVVTLHTFRNATELPRLLATERVPFVSVAVWGSHMATVYEAALQLDISVVYINCHGISLTPIKSFLDAGKPHVVLAHYHHFEVILHGGKLRAIVYPAIILSEPPVRASAGSDKMPAKEKKQRGKDVKKRAEKSSPNPSLDCCHTLILKLN

SEQ ID NO: 37984 - DNA, 3998 bp, DROSOPHILA
cccacagaggcggcagcaacatgaaagctccgttgcatgcaaccgcatgagtaccgcatttgtgcctttgtatcacgcggccaaaaaggggttgatgatggagcctgatgttgggtggtaagtgggtggtgttgatggagctggctaggatgcattcgggcatgaatcgcttttacatggatcgcttttgtaccgctacccaccgagcttcttcttcatcttcgcctccttcgccgccacctgccacttgagccaccacccccaaaaaaagggggatttctctcccccttcatgtgcacttgtgtttgtgtgtgtgtgtgtgtgtgtgtgtgtgagatgcccaaaaagctttcctacaacatgtgtgcgagtgtgtgggctcatatctgcgaacaactatcaacaatgatggccagcgaagcgttgccatatctctcacttacagccgattccacttttttgtcttctcctttcgagaggaggttaattaacagaacaagatagaaacacgaaaaaaggctctagaagcatccttgactcctagatactcactggctatcaaaacatctatctctttgatgcattcattcaccatagtaccacattcccactaaaacttgtataatttggcatttgttcattactagtattattctaatggaatcttaatgtgattgggatcgtgccatagcagattcaatatatttatagatttaaactataattttctattttaaagtgagagaaaatatataagaatgattataagttcctgctttccgctgccgtatgatcattattataatgtgttaactatgtgtaatcacttaaaacttttcaattgcgcgttgttggtagctaagcaaacttctaaatacctgttgcatatgcaaagcattatttaccaattattttaagattttaaaagggggacaaataacctgatatatggggcacatcccaatcaatgcaaatgaatttattttaagcaaatcaatactcacttgttcagtcgatccgtatcgttatccgccaggttcaaaaggtaggcaacgaactccacatcgttcttgaactgcagccgcgtgcgcatgtgctcccacttctcggcgttcttggtgcctatgtagatgtttttactgtagttctgatggcggtactttctcctttcgctggccgcactgctgcccccgctgccgccaccatgttgctgctgttgctgctgctgctgatgctggtgctgcagcgccgctgcactggatgagttgatgcccaggctgagggaggaacctccgcgggagttaccgccaccggtggccatcagatcgttgctgcaattggtgccctgtccgcccggacccaagctgccgtgcgtcgagcttagcgcatggttgctgttgttgttcgtggagaagcttgtgttgctgttaccgcccagcaagctacttggcggtggcggcgctatgggcgtggcactgctcccgctggccatgtccaaggcattggcactctgctgctgctccagctgggcgttcagcttggctgcggaaacggctgctgccgccgctgctgctgcagctgccgctgctgcaacgctcatgtgcaggccgctgctttcggcggcggccgcactgttcagatggccggaggagagggtggcgcggctgtccagatgactgctggccacctcgtcctcgtcgtcatcatcctcgtcctcctcctccccctcatcgtcgtaggcagccggttcctgttgctgctgcgtatgctgttgctgcaagttgttgctagccggcatcacatgtcgcaggtccgtgggcgtgagatcatgcccattgccctgatgttgctgctgctgctcctggtgctgctcctcgtcatcctcatcctcgtcctcctcgccctcctcctcgtcgtcatcctcgtcatcgtcgtgctcttgctgctgctgcgactgcagatgatgatcggcgcgatcacgtgacttggtgttaccgttattgttgttgttattattgttgttgtagtgctgctgcttgttgccgttgtgcagcgcactaactgctgctgcaactacagctgccgctgctgcagcccgttgctgctgctccgccgccaattgttgttgctgctgctgttgctgcgacacatcctgctcctcctcctcctcttcgtcctcctcctcgtcgtcctcttcctcttcgtccatgctgctctgcgagctgctgctgctgtggccatagttattgttgttggcgttgctgttaacggagttagccccattgttattgttgttgttgttattgttgttgctactgctgctcgtgctgtgcggcagctgacccgctgatcccgccgaattgttgctgttgttactgatgctgagcgctgctgctgcagctgctgctgcggctgccgttgcagcggcgcgactcaggaacggtgggcgtggcacgaggggagtgtcggagttatcggaactatcgttaaaatcgaaagcactgaagtcagcggcattcgcggcatttgttgcacctgctgctgctggattaccgctacttgttttggacatgctgctgccgacgctagcgttgctgctgctgctgctgctgctactgcagctgctgctgctgctgctgctgcgactgcagcgtttgctgttgttcttgtgattgctagtgttgttgttgctgctgctaacttgccgccgcttggttgttgttgttgttgatgctgctggtgctgcagttgcaattggtgttgctgctgttagttttagtgttgcctttgttgcttttgctgcgctttgccgaacgctgctaagtttttgctatttgttgttgttgctgccggcgctgctgcgacgcgaatgcttgttgttgctggtgctgctgctgttgctgccggggcggtctgcctccgattccgcttcagatggcgccttgctctgcctctgctgctgctgttgttgttgcttctgcttctgcttcttcttcattattcacacacacaagtcgcgcgtgcgacccactacactttttgttgttgttggtgatgctgtcgttgttgtcgttgctgttgcatcgcttttacaaagattctcgcttttcagttgtacactgcaggtttctgtattttgttattttattcgagaaataaaaagcatacgtgtgaagcaaaaaggaaaaactgaaaactgacagagctgtcactgccaacgtcgacgcagacgccgactgcgactgcgacagcgacagcgatggaggcgctacgcgagatatgtagcagtaaaaaaaccgttcaccgaaagccactcgctgaagtttctgtcctttcgccgggtggcaactctgccactttgatttttcttgtttttaatatttgtatttttttaataatgccaccagcacttttttttattatgtatattgggaatgtttactttatcggcattttttcgctagcccggtggaatttctttattggtagttattgaatattcaataagtcaaacaacatgggatctatcactcgaacgtgtcgtttagaatcaatctgcttattttcgtggcatattcttggcttgcggttgggtttttgtggccaagagagctgcttgttatgaaaactcagactccaaacgcacacacacagacacgcacacacaacgttagtttgcgaatttttgagaattgtatttccacaatagtcacgaaaaaaaaaaaacaaaaacagaacagtttttttagattttgacaagtgacttgcaagctgcctggatattttgttgttattgttgtgttcgctgtttcaataatttcgttactatttcttttttttggaggacgagggtgtgcgtgcaagtgtattggtttgacacccaacgaaaggactaaaaagagagtgggagaaaagagggcgatagagagagagagagagcacgcgaggcggtggcggttttcgccttgtgccaatacacgttgagtgacgagggggac

SEQ ID NO: 37985 - DNA, 1875 bp, DROSOPHILA
atgaagaagaagcagaagcagaagcaacaacaacagcagcagcagaggcagagcaaggcgccatctgaagcggaatcggaggcagaccgccccggcagcaacagcagcagcaccagcaacaacaagcattcgccaccagcagcatcaacaacaacaacaaccaagcggcggcaagttagcagcagcaacaacaacactagcaatcacaagaacaacagcaaacgctgcagtcgcagcagcagcagcagcagcagctgcagtagcagcagcagcagcagcagcaacgctagcgtcggcagcagcatgtccaaaacaagtagcggtaatccagcagcagcaggtgcaacaaatgccgcgaatgccgctgacttcagtgctttcgattttaacgatagttccgataactccgacactcccctcgtgccacgcccaccgttcctgagtcgcgccgctgcaacggcagccgcagcagcagctgcagcagcagcgctcagcatcagtaacaacagcaacaattcggcgggatcagcgggtcagctgccgcacagcacgagcagcagtagcaacaacaataacaacaacaacaataacaatggggctaactccgttaacagcaacgccaacaacaataactatggccacagcagcagcagctcgcagagcagcatggacgaagaggaagaggacgacgaggaggaggacgaagaggaggaggaggagcaggatgtgtcgcagcaacagcagcagcaacaacaattggcggcggagcagcagcaacgggctgcagcagcggcagctgtagttgcagcagcagttagtgcgctgcacaacggcaacaagcagcagcactacaacaacaataataacaacaacaataacggtaacaccaagtcacgtgatcgcgccgatcatcatctgcagtcgcagcagcagcaagagcacgacgatgacgaggatgacgacgaggaggagggcgaggaggacgaggatgaggatgacgaggagcagcaccaggagcagcagcagcaacatcagggcaatgggcatgatctcacgcccacggacctgcgacatgtgatgccggctagcaacaacttgcagcaacagcatacgcagcagcaacaggaaccggctgcctacgacgatgagggggaggaggaggacgaggatgatgacgacgaggacgaggtggccagcagtcatctggacagccgcgccaccctctcctccggccatctgaacagtgcggccgccgccgaaagcagcggcctgcacatgagcgttgcagcagcggcagctgcagcagcagcggcggcagcagccgtttccgcagccaagctgaacgcccagctggagcagcagcagagtgccaatgccttggacatggccagcgggagcagtgccacgcccatagcgccgccaccgccaagtagcttgctgggcggtaacagcaacacaagcttctccacgaacaacaacagcaaccatgcgctaagctcgacgcacggcagcttgggtccgggcggacagggcaccaattgcagcaacgatctgatggccaccggtggcggtaactcccgcggaggttcctccctcagcctgggcatcaactcatccagtgcagcggcgctgcagcaccagcatcagcagcagcagcaacagcagcaacatggtggcggcagcgggggcagcagtgcggccagcgaaaggagaaagtaccgccatcagaactacagtaaaaacatctacataggcaccaagaacgccgagaagtgggagcacatgcgcacgcggctgcagttcaagaacgatgtggagttcgttgcctaccttttgaacctggcggataacgatacggatcgactgaacaagtga

SEQ ID NO: 37986 - protein, 624 aa, DROSOPHILA
MKKKQKQKQQQQQQQRQSKAPSEAESEADRPGSNSSSTSNNKHSPPAASTTTTTKRRQVSSSNNNTSNHKNNSKRCSRSSSSSSSCSSSSSSSSNASVGSSMSKTSSGNPAAAGATNAANAADFSAFDFNDSSDNSDTPLVPRPPFLSRAAATAAAAAAAAAALSISNNSNNSAGSAGQLPHSTSSSSNNNNNNNNNNGANSVNSNANNNNYGHSSSSSQSSMDEEEEDDEEEDEEEEEEQDVSQQQQQQQQLAAEQQQRAAAAAAVVAAAVSALHNGNKQQHYNNNNNNNNNGNTKSRDRADHHLQSQQQQEHDDDEDDDEEEGEEDEDEDDEEQHQEQQQQHQGNGHDLTPTDLRHVMPASNNLQQQHTQQQQEPAAYDDEGEEEDEDDDDEDEVASSHLDSRATLSSGHLNSAAAAESSGLHMSVAAAAAAAAAAAAAVSAAKLNAQLEQQQSANALDMASGSSATPIAPPPPSSLLGGNSNTSFSTNNNSNHALSSTHGSLGPGGQGTNCSNDLMATGGGNSRGGSSLSLGINSSSAAALQHQHQQQQQQQQHGGGSGGSSAASERRKYRHQNYSKNIYIGTKNAEKWEHMRTRLQFKNDVEFVAYLLNLADNDTDRLNK

SEQ ID NO: 37987 - DNA, 2792 bp, DROSOPHILA
gacgttgccttgctgcttttttggcactcgggacatggttaacgttaaccatgatgttgcacatggggcaccgcagacatgggtggcaggcagatacagggaggtgatttccacggggagagaggcggttggtttctctggggtggaccggcataaaaacccgttatgattgttgcattagccgagacagtggcgcgtaattattggagatcgaacagagaagtacggcctcgctgcagaccgccggaagttaggaccagttggacaggtagccatgccacaccaactccaaggggcacccaacttcgcctccgatccgccagaaatctccaactccgactccagttcccaagcccagcccaacccactgtttgtgttatgagaattcctcacgaacccaattccgaaggctaagtccaagtgccaccgattcatgcactcaaagaaatattatggtacaacctctgtcagctaaatgagctaaatgagctatgtggtaagttatagcagcctgattttaattgactacttggccaatcaattttatagctcgagatatagtaacgaattttaaatggtcatatttgcatggtaaattcattaagcagacagtaaaaactggttgctcgttttttttgtgcactttaatggcattacaattatgatcgattgattgtgcataaaaagctaaagaggaagtgctttcaaattgaaaatttttccaaaagcattacgtactaggctaaaatagtaactaaaagttccatttctaggcaatcgaatatataattttcaaatttcactgtaaattcttgttataagcatgttaaccaagttttgaagattatagcgtttttcaagtgcttcgatgatgtttactaatgaatgggcttcataacgatcttaagctgttggtcaacttcaatgattgtattattggggattccattaagtcattttttaattttcgaggcttgtcgaactttccgttaacccgaaaatgtttgccatatcattgcagctgctcagctcgctggccagcgatttggacataatgctaaacgatcttcgatcggcgccgagtcatgctgcaacagcaacagcaacagcaacaacaacggcaacagttgcaactgcaaccgcaacaacaacggccaaccggcagcagcaacatcataatcaccataatcagcagcaaatgcaatcaaggcaattgcatgcacatcattggcagagcattaacaacaataagaataacaacattagtaacaaaaacaacaacaacaacaacaataataacaataacattaataacaataataataataataatcattcggcacacccaccttgcctgatcgatattaagctgaagtcaagccgatcggcagcaacaaaaataacccatacaacaaccgccaatcagctgcagcaacaacaacgccgccgtgtggcacccaagccactgccacgcccaccgcgacgtacccgcccaacgggacaaaaggaggtggggccgtctgaagaggatggggacacggatgccagtgacctggccaatatgacatcaccgctgagcgccagtgcagcggccactcgaatcaacggcctctcgccggaagtgaagaaagtccagcggttgccactgtggaatgcgcgaaacggaaacggaagtaccaccacccactgtcacccaaccggcgtctctgtgcaacgccgtctgcccatccaaagtcatcagcagcgaattctaaaccaacgatttcatcaccagcgaatgcatcatgggtaagtctaaatgaaaatctgccttcattctcgatatcctgataaagatatgtatcatcgtgctgctttataagcacgaataacattggaatcagggaaataaacaaagaggggcaagtctaagcgatctgctgccccatttaagcgaaagtggttggttggtcaaaacaataattcaggtttcaaccgtatctgcctcgctgttgttcttggccataataaagggagttttgtttttttttttgcggaatgaagccaactctactgaccagaggaagttgaagacgaagacgaaggccttggaccttgggcccctggaagggttagccatgttggcaatgggctgtgaaaggttcatgctccgttgagcgcttcatgggaatcggtggcatgcttcggtggcatcggaaagagctccgtaatgggttaagccaggtcagtttaaccggcgggtgggtgtgacggctgaatcatcaacgtcacggtcaccagttgaacggggccgggtgaagaagtgaggatcacttcgaggtcaccaccggatgaagttcgtttttcaagaaagtcttcgtcaaatggggttgcatttaaaaaccgtgatggtgcatgtgcttttataatattgttttaccattcaaatagtcaaactatgctagttgaaacaaacttccaaaagaaaattttagctgatcatgtttctagcatatcttgtgtttattctcaagcgtattaaggatagtgcatcagatttttcgctattcattgcttggtgacaacttgacgagggtgcagatcggggtcaccactccgcttgacaccagccacctagtaagccatggaaacctcagccttaaccttttcattagccactcctccagctcaacgaagagtcgactactgctgctgctgacagttgcggttgtaatgggccgaaaagccaactaaaatgtataacatgtaaatatgcgagcatgtacatgtatatcgatattttggtaatcctt

SEQ ID NO: 37988 - DNA, 792 bp, DROSOPHILA
atgtttgccatatcattgcagctgctcagctcgctggccagcgatttggacataatgctaaacgatcttcgatcggcgccgagtcatgctgcaacagcaacagcaacagcaacaacaacggcaacagttgcaactgcaaccgcaacaacaacggccaaccggcagcagcaacatcataatcaccataatcagcagcaaatgcaatcaaggcaattgcatgcacatcattggcagagcattaacaacaataagaataacaacattagtaacaaaaacaacaacaacaacaacaataataacaataacattaataacaataataataataataatcattcggcacacccaccttgcctgatcgatattaagctgaagtcaagccgatcggcagcaacaaaaataacccatacaacaaccgccaatcagctgcagcaacaacaacgccgccgtgtggcacccaagccactgccacgcccaccgcgacgtacccgcccaacgggacaaaaggaggtggggccgtctgaagaggatggggacacggatgccagtgacctggccaatatgacatcaccgctgagcgccagtgcagcggccactcgaatcaacggcctctcgccggaagtgaagaaagtccagcggttgccactgtggaatgcgcgaaacggaaacggaagtaccaccacccactgtcacccaaccggcgtctctgtgcaacgccgtctgcccatccaaagtcatcagcagcgaattctaaaccaacgatttcatcaccagcgaatgcatcatgggtaa

SEQ ID NO: 37989 - protein, 263 aa, DROSOPHILA
MFAISLQLLSSLASDLDIMLNDLRSAPSHAATATATATTTATVATATATTTANRQQQHHNHHNQQQMQSRQLHAHHWQSINNNKNNNISNKNNNNNNNNNNNINNNNNNNNHSAHPPCLIDIKLKSSRSAATKITHTTTANQLQQQQRRRVAPKPLPRPPRRTRPTGQKEVGPSEEDGDTDASDLANMTSPLSASAAATRINGLSPEVKKVQRLPLWNARNGNGSTTTHCHPTGVSVQRRLPIQSHQQRILNQRFHHQRMHHG

SEQ ID NO: 37990 - DNA, 2471 bp, DROSOPHILA
gagaagcttggtcatttggcgggtgtcaaagttccttcaaacaggaccggaagattcgtctcgcctttgactcgcctgagcgacattcaactggttttcaagtgctgaaccgaattgcagttttatttccattcacgtagctccacacacggaatgtgctcctttcccaaaataacaaagaagtaaagaatggttgtcggcggctgtagcgactaactaactacccattgacgtactaccacaattaaacgctttctttgtgtctactttgtgtcttttacaaacaaataacaaacacaattctgtaattagctaatgagcagttatattattttgattgtacactacacgtatacaatatcccaatatgctccacaaaaaaagaggggtgcaaagggcacgttaaaaaaaggggacaccaaaaatgttacaaaagatttacaccatccaaaacctcaacgccatctccgcatccgcaatcgacgcctccttctttctgcttgtgggcaataccattactttttcagtttgctggtttgagtaatggattagatttttactcacttgttttgggtttccgtgctaccgctattggttggatagtgtattcgttttttatagcacgccgcccacaccccccaaaaaaaaaaaggataacaccgccgttgatgaagggatgctagtgggaaactaaaaagaacccacaactcttgtctcacctaaaaactttagttcatggttttgaaaaaaaagaaaaaaaaaaaggcgaaagattcttaaagttggccttttcttttcatgtaaaattcttttgtcctcgtagtaggcccataattttaaatcgattagacttattcgaaaagtcctaaggtacacacgtgtttgttgtgagtacgaaatccaaatcgatatcttggtagtttaataattaacaaacgtaattttgaatagttctgcgataatgtttactacactgatgtatcgaactgcagcggtctcgatgaccgtctacataaccaatcgagttggagtttggggtaagacagaggagacggaccacctgctcgatcagatcaccaatggtcttcaaccagtatttggacttctgcgacgaacgctgaagttagatgagagcgatctgagcgtgggtgagctatcccggaaatactacaatgaaggagtgaagggcacttttcgtatcattcgaaacatacccaactattcggaggaattggccgacggtgccaaggtcacctgtctggatttggtggaaaaggccaaggaattgcgtcacaaagaatattcaaaatggtggaatacttccacaaataaggagcaactgattattgattcaccagattctgcagctggcgatggatctttcgaggatttagtcccatttgagaaaccaaagaccgtagataattttgcgggggaagagggaaatggagctcttgaacagagggtttaaacaactgtctataaacaagaaaaatcagccttactctctacaaaatcttattgttaaatctttgagtaaagaccatgtatcatgttagaatccccaatactctgcaataggccaataaatattttagattgccaaagaattcgcctttcgaatcattactctaaccaaacaatttgttgaaaaattattaatccaattggaattagctgtagagcagcaataatcgtacttatcaaaattttcctcatttttttcctcaactgtttcttcgcccagacactcggtaaacagtgagaattgtcaacagtctattaaaatgccagtcgagccgcattgccaaccgaagtcaagccgtgcgaaaaaggattttccaaccccattcccgggaaaaggaaaagctgaagccaagcgagccaaaccaaatcaatccaaccctttttcccatttcctttatccagttgttttgcgtgttgcttaacatgcgttttaatgtgacccttgcgggtgcataaaaaatttagtttttttttcacctatgaaaatccattttctctggaattttctttatggtttggatacctgttacttgtagcattatattggttttttttttggttacatctacaattaatataagagacaaaatatcaaatttaaagtatctttatgcatccacattatccggcatttttattgaatatttttgaaataaaaactaaacgccctttttcaccaacttcgattggttttccttctttattgttgaattgtaaacaggtgggtgggtcataaaaacggggactacagatgttggagggttagtaaatcccttcttcaagccgagcgaaataaactttatgaacagccctaggcaattggcactttgaaaatatctagaaacgagcggttgattgaaaaactagcttaaattttaattagttctagcttatttacatacatttaattagaagttcgctatgttcttacctggggactcact

SEQ ID NO: 37991 - DNA, 471 bp, DROSOPHILA
atgaccgtctacataaccaatcgagttggagtttggggtaagacagaggagacggaccacctgctcgatcagatcaccaatggtcttcaaccagtatttggacttctgcgacgaacgctgaagttagatgagagcgatctgagcgtgggtgagctatcccggaaatactacaatgaaggagtgaagggcacttttcgtatcattcgaaacatacccaactattcggaggaattggccgacggtgccaaggtcacctgtctggatttggtggaaaaggccaaggaattgcgtcacaaagaatattcaaaatggtggaatacttccacaaataaggagcaactgattattgattcaccagattctgcagctggcgatggatctttcgaggatttagtcccatttgagaaaccaaagaccgtagataattttgcgggggaagagggaaatggagctcttgaacagagggtttaa

SEQ ID NO: 37992 - protein, 156 aa, DROSOPHILA
MTVYITNRVGVWGKTEETDHLLDQITNGLQPVFGLLRRTLKLDESDLSVGELSRKYYNEGVKGTFRIIRNIPNYSEELADGAKVTCLDLVEKAKELRHKEYSKWWNTSTNKEQLIIDSPDSAAGDGSFEDLVPFEKPKTVDNFAGEEGNGALEQRV

SEQ ID NO: 37993 - DNA, 2126 bp, DROSOPHILA
ataaactgttgtccacgctttatcaggatttccattttcgctcttttagttttccagcatgaaaattgttcaggttttccatcgctttttttttgtttttgagtgtggagtttcattaacgtgcattgtacgcctgagtgaattttccattttatttacatatcaagcggatggtcagcaatggggaatattttttctttattttttctttttttttgttgagttttgttgtcatgacaaccactcgaatgaattgagagaatgactgtggggtaaacgattctgcggcagaaaaaaccataattaattctttaatattctcgattttatctgtttcaattcaacgaacgaataacaaaaagtgcaaaccgtgaaaatgccatcgaagcatcggaaaatagtgcaagaagttgcattttaaacaattttaatacgaaactctttcaacagtcaacgaacttgtcgtcgcagaaagagacggaaagccacagagagaaagagagggacagcgtctcttctccgcctctgaaaatttgcatagagaaacacgacacagcaagcaccagcatgtaagtaatgcaaaaatgcaaaaaaaaagaacagaaaaaatacaaaatgaaaaattgtttcgctaccaacacaaaaactgcactcaataatgaagataacaggattcttttatggtttttatggtaggacacttactggagaagaattgcttgaaaagaattgccacaagaacgcgacgttctatgttatgttaaatattttcgggctgttaactggaatgttaaatattaaagatacaatgacccccctcccatggcaataagtatctaatagatgaagagagttcaaagtgcctgggctgttgacttattgactatttgaaccccccgtttcaaagtcgtaacaactaaaactccacatgtgcaacaaatacgccggcttttccttatcaactgtcgtgcactgcgcaaaacacaaacaaaccgaagggatggggcagcagttttggtcagatagatggacaaaacatgacggaacatttaaggcacttagaacaaatgacccctcccctcccacattctccgacatcatccacccaatcaaagttgccacctgaaagcgataaggggaaagcatttgttggaaaagttctgcgatgtggcgaacagggggctgcgatgaggcggggaggattggcgccttcgatatcgacggtcaatcgatgatgtctcccaaaaaaaaaataagcgacaatgacaatttctttgtaatttgtttgtctgctccccgaagttgtggtttccccccttccactatcacaactttatctacactgacaaataggcagatatcaaatcagaaggcacaaagaaaagatgcaagaatcaattatcaattgaatctgttaataacgttaaagctgactagattctacagagtacaaaaagaataggcttcccgagttcccatatttatatcatcatatttgtatattttttttcactgtgcatttactggacaaacattcaaatagattttgaaaagcaaactgatgataaataatgaatttaaccgcaggccaactgaaaagtcaatagcaacaaattgcagtctttggaagagaatacgtacgtttccccatttcctttttgattttttcccccgattttgttatcagctgcgggccaatttgaacaactttcgttctcgttcattcatttgctttcccaagagcaggggcacccacctgtcttatcaacagagtctccccttctattcgaattcataacccattttgtaggaaacagtagtgcccattacgagtcttacatccaataagcgattacgaaactcctcgctggtatctcaataagttttacatacatatgtacatagtacattgcgtaattcctcagagaaataatgggatttcaatgcgtatcgcaattgtagcaatcggcgttcatttaattgtttaagaatttgatggggaaacataagaggatttgtgcagcttaaattgtttttaaatagtggttcacaattttgattgacagatttcctaagagttcagttgaatgaatttcttgcatatatttagaaatacactataaata

SEQ ID NO: 37994 - DNA, 126 bp, DROSOPHILA
atggggcagcagttttggtcagatagatggacaaaacatgacggaacatttaaggcacttagaacaaatgacccctcccctcccacattctccgacatcatccacccaatcaaagttgccacctga

SEQ ID NO: 37995 - protein, 41 aa, DROSOPHILA
MGQQFWSDRWTKHDGTFKALRTNDPSPPTFSDIIHPIKVAT

SEQ ID NO: 37996 - DNA, 2762 bp, DROSOPHILA
gtttacacaagccagcgttctaatgggagtccattgccacaaatatgggccattccatccagacagcggtcacctttggttcttcattttgccttttttccccccaagaaaaaaaccccacttatgccaagaaatgtttaataattttgttttcaacaaaatgtaatggatacgtgcacacggaagtcggcaatgcaggtcaaaaaaaaaaaaaataaagcgacagacacttgcgttctgacagaggaattattgttaaaagttcatgaaaaccataaaagtctgcatgtcaatcggtcgaatgttaaatgctcttaatggacatgagtgttttgagcccatttgaagtagctaaaaacgacataaaaaatctagaaatttataaataaaaagttacagcacaagtaacttccatctaagaagatggaaattgcataaatgaaactaatagtttttgaactatattaaaatctttagagaacttccatttcaaatgactttaaagggtattggaggtccttatttttgcgacgtcaagtcgtttgactaaacctatcatttcaccaagatgggcagtccaaaattgtccccgacttccattcggttggcaggtgttgcccttttttttctttttactgcagttacataataccaccgcagactgcgaatgtgtttgtcttggcactttttattagtaataacattttgaaagccacaacgtggccgggtggtattaaaattcatgttctgagtggttcatcggatgtgtaggatatacatatgtacatatgcacgatattcgatatggcatttatggaggcggtgcctcgccttgggtatttaatgtcggaatcaataaaaaagattgacacatgtgggggtgtagtcttcatttatgagttgcatgtttgttggtagcatcaattttccattttacccccatgtcctgtcagttcgatttggcagcacagtatctaaattgaagcgactttgcagcaggatgtcgcacgaaacagcagcagcagcagtgccaggaggagcaggagcatcggcgggctcaatagtgtcctgtgccgagaatgcctcgaaggtggaggtcatcgtatacaccaccaagtcggataagacgctcaaacagaatatgaatgccaaggatgatacgcttaggaagcgtacttccttgatcatagtgccgcagcaggtgcacgacatcgaagtggaggatgaggacaccaagaaggtggaccagacaaaggtcagggagaatccgaatcggaactcgacggccagcatggatagctgcgtctccaatacgaccagtcagagcaatcagtcgagtggctcctcctcctcgacgaccagcagtagtggcagtagcagtggctccgaggatgcccatgccgcctatcaggacttgcagaatggcaatgctggccaggatttgaactcgccatcgccggtgcccagatgccattcatccagctcgacatcctccgtctcggagtccacctcatgctccagttcagcggattactcattaagagagcagctcaagaattttgccaataggaattccgagggcggtggcaccatcgattccactgcccgcctgatcaagggcatgagtcttccggtgggcgatcagtcggttcagtcagtggctcctgccctctgcgattcgctactcagtccacaggaggttccactgggtcgacgctacgccgaggtggcacagttcaaaggtcatccaaaagcaaggtgagtcaagtgattccatcgaagtcttctttagggtaaagaacgaaaataaatatattatattaatatatttatatattagcctttgaaagaaaggcaatgcaatatgtaaaattttgaaccaattcacctgtatcaactttaatgtttttcatttgcacttcctgtttaatgcgtggtaacccaatcccatatttattcattcaatatcgcttggggtgcaacaaaaagtgacctagtctctggccgccaccggcactcacttcgatgacatcctccaggttatctaaccacacacacttgccagtcgctcctggagtagtgcatttggaatcactgcattgttcggcgagtgctcaactaaacgatgtcaactggctgctcgagagtcgagtgcccatccaccacatcccactgacgtaccatcgagctgtcagggagttgaactcccaaacccaaaaaccagtcccactgcgaatcccatttctcatctagctgcacatgcataatacacaacttaattagtattactactttatggcactctcgacgctgcttgccccttttcgccccgcaacttcgtctttcactgggctccattcaacttggagcttagactgtgtaaaaatctaataatggagcattccacacacgcactgccattgccacattaccatatcaaaaacggttgagttttccgagttgcctttggggcacagacagggggttaaactccttgcctccttgcctacgacttcttttctgtttctgtttcggttagatcgcaaatgcagtgcagcaacactgagaggaaaatatgtttaaatcaattggaatatgctaatccataatccaaaaaaaaaaaaaaaaaaacagaaccaatagctaataacctcacttcactaatatatataacatattttatggttattttatcaactgaatgtagatttttaaagaaataaactgatacggatatggcacaacatacaacttaaatgcaa

SEQ ID NO: 37997 - DNA, 762 bp, DROSOPHILA
atgtcgcacgaaacagcagcagcagcagtgccaggaggagcaggagcatcggcgggctcaatagtgtcctgtgccgagaatgcctcgaaggtggaggtcatcgtatacaccaccaagtcggataagacgctcaaacagaatatgaatgccaaggatgatacgcttaggaagcgtacttccttgatcatagtgccgcagcaggtgcacgacatcgaagtggaggatgaggacaccaagaaggtggaccagacaaaggtcagggagaatccgaatcggaactcgacggccagcatggatagctgcgtctccaatacgaccagtcagagcaatcagtcgagtggctcctcctcctcgacgaccagcagtagtggcagtagcagtggctccgaggatgcccatgccgcctatcaggacttgcagaatggcaatgctggccaggatttgaactcgccatcgccggtgcccagatgccattcatccagctcgacatcctccgtctcggagtccacctcatgctccagttcagcggattactcattaagagagcagctcaagaattttgccaataggaattccgagggcggtggcaccatcgattccactgcccgcctgatcaagggcatgagtcttccggtgggcgatcagtcggttcagtcagtggctcctgccctctgcgattcgctactcagtccacaggaggttccactgggtcgacgctacgccgaggtggcacagttcaaaggtcatccaaaagcaaggtga

SEQ ID NO: 37998 - protein, 253 aa, DROSOPHILA
MSHETAAAAVPGGAGASAGSIVSCAENASKVEVIVYTTKSDKTLKQNMNAKDDTLRKRTSLIIVPQQVHDIEVEDEDTKKVDQTKVRENPNRNSTASMDSCVSNTTSQSNQSSGSSSSTTSSSGSSSGSEDAHAAYQDLQNGNAGQDLNSPSPVPRCHSSSSTSSVSESTSCSSSADYSLREQLKNFANRNSEGGGTIDSTARLIKGMSLPVGDQSVQSVAPALCDSLLSPQEVPLGRRYAEVAQFKGHPKAR

SEQ ID NO: 37999 - DNA, 2874 bp, DROSOPHILA
gctctggctaacttgctactcctgattgtgtgaataaagattgagatgaaagcgacattttcaaatacttgcagttttataaattgtctagccgagttacaaagggaaaatatgtgtattttcttgcatttttaaatcactactatatacaacttatcttaaagtttttcacttaaatttgttcttgtaatctatagtagttgttaagctttcccactattggccattcgccaatcaagttgtttacatttgttttatggcctgtgttgaccttctgttcgcagaatggtcaaagtctcaaggtttttggccactggacacctcgacctcgaccgttcatatatatagtcgccagttaatcttaattgccatgagtgggcgctatggaaccgatgcctactttcgattctcctacccggctgtcattttcctgttttgtttatcgttcgccgtttgtttgttttgtaaatccccataaattttagcgtgtttttctttgcggcttggcgtgtccttgagcctgccccaagttttcccaaagccgcctaattctttgcgagtgttttattatccacccagccaaccaaccaaccaaccaaccagccgacgaaccaacgaagtcggtagaaaggttgacatcctgtttgttccgtgttaatttgacatgattatgtcagagtgtttgacaacttttcatatgtagtcgacggcgaagtagggcattttttgccatctccttcttgtttatggcaagaggtccttttgtgtgtggaagggcgctgatccatcaacagccaggccggcctgtggttgggaagtccttgaagttgaaggcggaagcacatgctggctctcaatttgttttttttttatttttatttttttttttcctttctgtttcgctttctttagccatttctctagccattcattaataacatttgtgccctatcgtagaaatattgttaaaatggcgtaaaattgcccgctttgaggcgtcatgacgatgcgagtcctgcgtccttcatccttgtcgtgaattcagccactttggcgacggcattggaggcaacgaaaaaaaaatgtgtcacaaattaaccttttgacagctgactgagggtagaccattgacaaatgggtttgagcgtagtaggatggagttttttttttcacttgccaggactttaagacacccccaaaatcgaaggatggaagtccactttactaatgttatcagtatttattaaaatgaacatgaataattttaggaactctggtaatatcattatcatttatgtttatgagaagaatatactattaattaatttaattcttaaacataagaactggaaaacgcttaggcatttttcttaacagtttgcaatatttgcaataataatccagactgattttcattttcaatttttatttgcagaacaagtgaacccattccctctggcgtagccacgccctcgtctctggattccgcctctgtggatggcggtaaatcccacacgggcaacaataataacataaacaacaatcacaatggccaacagtcacaaaaatctcagcaacaggcgggtctcgccgccaaactgaatgtcctggcccagtcaaatctcaacaacaataatacgaccaatcagccaggatccatgacaccagcctcaaatcgaacgggcctggactcgaatcaaaatcagaagcaaaatctaaatgcagatagccgacggagcagcagcgtcgatccggatgcggatgcggatgatgtcgtggacgcggcgcatggtggcgccttcgaggatgacatgcaggccctgctgcccaagtgctcgcgtcgctcccgggatgagctcagtcaggtgaactaactattcatttcaaataaacaaaaagttcctttaaagcacatgaatgaatgaatatgataaattctatagttgttattataaagatcaatgcaaacaaggcaaaatttgccatggacaatgaaattccctcgcaggaaagtcgaaaccaacaagtcatctcattttatatcagccatatttaatgcagactcctggggcttccatctcgggctgctcatgtaatttgccaccgttcattgcgcagtttactcagtttgcaatcccttggagaaccaactgaaatttgtcgcctccattcgaaggacttgccacatgtgtggcagccaagtggcaattaccactggtgccgggctttcattcataatttgctacgtgttgcctcgttgatgggtcttaggtccttacaatggtaatgataattttgtttcggggtccattaaatgatgaaatcaaatgacttcgcttcggtatatatacatatatatatgtatatatgtatacaaaaataaaaattacaatacacgtcgcttttcgcactccacgctccattttccgccatttccattttcccccattgcattttcctcattattgtgagctggtcgtgcgtgcttttccctgggatttcttcattaataaccgagaatgctttgtgtgttgaatggccgcagtctcgtcatgtctgccaaatggcttgtaatttccttttaccaaagcagtgggcgttgccgtggggcagaaaagagtttgacaagtcaatttgttagttaatttgatatgcgttgctatgccacataaattcgggaagcatttgaaaatgccagaaagtcagtcatgctttctaattgcataataatttacggactacatacaaaaagggggccatttcaagtacaactctcgttgccaaaattcgattttagcttagctctgcaggggcaactcttaaaattaggcaataaaatcgttggcaactgaattcaaaatgttccaaatgggg

SEQ ID NO: 38000 - DNA, 474 bp, DROSOPHILA
atgacgatgcgagtcctgcgtccttcatccttgtcaacaagtgaacccattccctctggcgtagccacgccctcgtctctggattccgcctctgtggatggcggtaaatcccacacgggcaacaataataacataaacaacaatcacaatggccaacagtcacaaaaatctcagcaacaggcgggtctcgccgccaaactgaatgtcctggcccagtcaaatctcaacaacaataatacgaccaatcagccaggatccatgacaccagcctcaaatcgaacgggcctggactcgaatcaaaatcagaagcaaaatctaaatgcagatagccgacggagcagcagcgtcgatccggatgcggatgcggatgatgtcgtggacgcggcgcatggtggcgccttcgaggatgacatgcaggccctgctgcccaagtgctcgcgtcgctcccgggatgagctcagtcaggtgaactaa

SEQ ID NO: 38001 - protein, 157 aa, DROSOPHILA
MTMRVLRPSSLSTSEPIPSGVATPSSLDSASVDGGKSHTGNNNNINNNHNGQQSQKSQQQAGLAAKLNVLAQSNLNNNNTTNQPGSMTPASNRTGLDSNQNQKQNLNADSRRSSSVDPDADADDVVDAAHGGAFEDDMQALLPKCSRRSRDELSQVN

SEQ ID NO: 38002 - DNA, 2480 bp, DROSOPHILA
aaaatagctgctaatatataaaatcttatcaccgccagaaaccatttacaaaattgtaatttaagaggtagaatgcgaaaattgttgaaatattttacttattgcaagttatttccacatgcagccacctttcctactatgaaataaatttttgaatgcataagcattagctgtgggttctattttggcatcgctgcctgttggcaaacattatcatctttgacagagagagggatgacagacacacacccacgtacacacactcctgtacttagcgtataaacccccaaataacctccgcccactgctgaaaagtatgctacatcgcaaaaataaagagatgggaaacttcaaagccagcccttggcaattttcaattaaaaacgcctacaacgaacgtcgcggctgctgctgctgctgccatagaattgttgtgtttttgtttcgctttgtttgccctgcaaaccctgcctgcggcaaaattttccaccggaaaactttgctggaaatttctagatgggccgggccgagcacgaagctttaatgctgagctgcttggagccattctagaaaatatcacgacatggaattgcactcgcactggatggagattacagagaaatgtgaccagaggcaatgtgtcaagtgtcgcagattcgcctgccgggcctggtttttcattcacaacgaactggtgtccccaaacttggtcaagtgtgcgttccagcagctgctcaggaagttcttaccccactcggtgctctttccatggccataatgtggtacattagcctaaaaaggggtttgtcaaattggaatccatcaaatcggcaaaagctcggtattttccaagttccttgtcttcatagcttggcttgaatctgacaaattacagttttatacagctattgaccagtttccttaaaataaatttttaaaaatttttttgaatttttgagtcattactaaaattgaaaactcctagaatttccaaacttgaatgcaaatcgatggggttttttgggtatagcttgatcaaaagtggtcagctattttatattttttatttcaatgctgaaatcactatttatatttatacaaaatactaaaaacgtatttttaatagtgcaaccaactattggtcacacaattgtaatctgttaatatatttttttaatttttcaccatcctgtttcccttgcagtcacgcacatctctggtgtccagttcggagggcggcatcctggcagagggcgagacgtccagcgaggacgatgaggaggagcccgtggaggcggaggacgagggcgaggagagcagtcgcgattccagcgacaattcgccgccatgcgatctgggactcatggagcgactcctggtcacccatccgatgtggttcctgccgggcattcagcgttccggagccgttcatctgctccagggcaaggaggaaggggtgagtgcgtcctgctggcgataattattaatttattgatttagcttaataacgcaatttggtgaatcgcaaaacgatggcgtcgggtgtgtgcggtaaattaacaaacacatgtgaccacacaaatttgcacaacaatgagggcagaaaaacaaaaatagggaaaaaaaaagtataaatgaatggtggctcattcatacgctgcaaaatttacatatacaaattgcaatcaattaacgagcagcgggtcctgtgcgatgtcctctgatgtcctgcgtatccagcaaaaacacaaatacacataagtggcgggggaagattcattaatattacgacaggacaacaatgccgagcccttttaattgtaaatgtataaagataaacaaagaaatgtaaccaggaacaggaccgggaccaggaccaggacgaaaacgaggactagaatcgggaatctctgctgcgttcgcaaattcattgaaatttatctgactcgagcagcaaatggtagacaatgggtgcaaagaatgggatttggacaggagaagaaccatgtaggatgagcaacgggcactcgttcacaaaaggcgggaaaaacaaaggccaagccagcaatggtcagcaggcagggattgataaaaaggagctggagccggactatagatggtccacgtcctggaatctgcactgaggaaaaatgggaacatcttagttatcttagttaaatagtattcaattaatttcacaacttacagggaagtctgcgtgcatattgtacaaagtttaggacaaatattataattaaatcatatttatatgatctcattcgcaagccagctcatagttttttccagtgcacaaggaatcagactgaccattttgtgattcaaagccttttgcatagacaattgaaattacgagaacctgggtggaactggcagatagaatagaatagaacaggtaatggctgaaagccaggataagggatacaagggctataatataatggaatgtccaacaaattgta

SEQ ID NO: 38003 - DNA, 300 bp, DROSOPHILA
atgcaaatcgatggggttttttggtcacgcacatctctggtgtccagttcggagggcggcatcctggcagagggcgagacgtccagcgaggacgatgaggaggagcccgtggaggcggaggacgagggcgaggagagcagtcgcgattccagcgacaattcgccgccatgcgatctgggactcatggagcgactcctggtcacccatccgatgtggttcctgccgggcattcagcgttccggagccgttcatctgctccagggcaaggaggaaggggtgagtgcgtcctgctggcgataa

SEQ ID NO: 38004 - protein, 99 aa, DROSOPHILA
MQIDGVFWSRTSLVSSSEGGILAEGETSSEDDEEEPVEAEDEGEESSRDSSDNSPPCDLGLMERLLVTHPMWFLPGIQRSGAVHLLQGKEEGVSASCWR

SEQ ID NO: 38005 - DNA, 4840 bp, DROSOPHILA
tctcccttctcgaatttgttgtcgctttttaattcctcttgaatttctggtagtcaggtggaggagatggaagtggagctcagaactttataaaattgattggagaaagattatgaatggaaattataataaaattgcgtttgaaagaattataaaaaagggagcaattttaaaatgcagggtaacgaaagtgctgtgggcataagcactggactaatataatatttttctttaaaacggcagattttgatggcttcttacagactttttgaagaaatacaagatgtaggcatttattagttctataagtacgagttcttttagaattcgattccatgaagtgtatgcctttaagttaaacgctcattatgaaagttttcaatggcgattagcagggctgaattttggccctggtcttggccagacttgaccaggttttggcgactaaagaggcattacccatttaccattcaacgcgatttgtcgcagcgtctgcaaagtttttgccgacaacaagaagtggcaaggcatgggaaaaataacgagaaccagtggagaaaaagcattgttgcaagaatggaaagaaaggcgggagggcgaagtagggtacgatttatcatccataagtgggaattcatgggcgaattgtgaacgcaacatttaacgcgcagtcacagggaaaagactcacttaaggacttaaaccacctcgaaagaaatgaaaagataacactgaatatttttgatctatagcctgtgggttggcagtgaaatcttatggttgatatatgtgctttcaggcaatgtgcaaccaaagttttgttaaaaactttgccttaaaatggaaacttaaatcctcgaatgcaaagaaatgaatgtcggtgttttaaattaataaatgatttaaaaaacagtaaaaccattaagactcattgctaatctgtgcattttatttttaattgcagaccttcatagtgcgtggttctagccagccgaatacaatggccgtttcggtgagattgccccaggatacaggaccctacatcgagcattatctcatccagtcgcacgataatgtcctaagtttggagagctcgagattcacattcggatcgataccttcgctaattgcccactatgcccaatgttgcgatgagttgccggtgcagctgatgttgccacgtgtcctgcgcgaggcgaacaatcgaaagaagctgagttcgctggccctgttgggtcaggagttctggagctatgtgagcagtccggctctcttgggtccattaacgccatcggtggctccgtcaaaggatcagcaattgcttgatgcaaaatcgccgctctcactaacggaaaccagtggtcttggcactgccaccttctttagcgatactgtgtcgaagccaccgcccactggagcaccgccactgccgggtggtggtctcttcagtcccaccggaagtggtcaattgctgggcttctttagccaggcgggcactccatccgatacgacaaattcgagccttagctccttcaccaccagcggaggtcaacatatgcagctgctgagtccgaattctgtagattcggtaatactcaccatgtcgccagtggacaatcctgggcattatttgcccggttcgacgggtgctcccatggcacctttatgcccatcggttgtggatcaacagctgagcacctttaaagtggcccaaactgcgccggaagtagatcaagtgcgtccacagagaccgaagccaccaaatacgttgaatctcaagccgccggcaccaccactgcgctggtcaaagccccattctccggatcagaatggaagtgccaatggcaattttacggtaaccaccacggttaccttctcgatggagaacggaggtggcggcggtagtggaccgacggttggtaatggtaatggaaaattcgtggaggttactacgccggcggccagtaatccctttaatgccctactcaacggccaggcgagcacttttcagacattcgccaagcgattgtcgccggagggcgagtgtaaggacacgctgtcctcgcagggatcctcttctaacgatagtcgctggccgccgccggcccgcaagttgctcacctcaccaatgacaccgctaacgcccagtggcggcagcagcagcagcggcggcaaatcccgaaagtcgcgagcgggcaaggagtcgcagcactacaaggagtcggacatcctcgagagcccgccgatgcagtactgcgccagtgcgctaagcgacaagatcagcgactacgaggacgtctggtcgcacgatcccagcgatcgggccagcctgctgaccagtttccgcccggcattggacacggtgggcggtgtgatgaaccgacggccagatctgctggccgagactcgtacgttttttattcgcttcgattgtgttttcttgtttaaatattcatttgttccgtcctcttttcagcgagcactccaacaccgacgcagcaatctcaccttacgccctgcgaggaggaaaccactgccacacccaacgaatcctccagtcaatctctgcttcagttctccggcgatgtgccagctcgctctcgagccggcctgctcttgccaaatctttcgggacaggtgccccctgtggccatgactaaatccatgacggcggcggaggacgatggtggcgataccacgcccacggccgaaggacaagccaacggagccagtcgcagcaagcaaggcagtccgttttatgcggaaccagcggatgcactgcgtcaggcgggcctgaccagcgcagccacggccatcttgcgtcgccagcatcgcagtcaaatgttacacgccagccaaagacactcggaaccacttaaagcgggcttcggaggatccggcaatggtgcaatgctgcagcccagcgatctggagaagttagctggcagcctggacgaactaaagcccaaaccgaaggtttcccagcagcaacagcagtcccaacaacaacagcagcccaccaagcgggcacgcaatcgcatcgatcactggcaattggacagcagttgggagtttatggccaagcaggatacgggcagtcatgctggcggggattacgatacggcagcaatcgattggcaggagaaggaaaattcgctgggccgcgatagccgtgcagatgggcagggaaagaaacgaacgttgaccattcatcagatcattgccaatcgattgcccgacctcaatctgccagagctggtacgttgctcaacgcccccgcaaacggccgcactgcagccgcatgtcctgggacaggataaggcgggagtcgggtgcgatggtagccaaaagtcattccagagccagatcggttgccggctctcctcctacgacaacgtcttctgccagaactcgttcggaggcattgattcggcgcagtccgacgatggcaccattttctcggagccctgggattcttcccaatgggacaccttcctgccccacgatggtaagcaatatatatatatatataccagttatattcccaattatttttatattgattctcttttagacgccaccatcaattcggacaccattcatctgtccaagtgccgacccgctctctcagaggacgacactattgtcgaggaactacaaagcaccaaagacggcagcaatggcagctgcaaccaggacacactcaaggcgaacaggaatggtgctggacaccacaagctcaacaatggcaatggcaatggcaaggccaacaatcgacctaaagtggccacaattctgcggaaccccagcatgcgggatcgtgaagtcttatgtgagtagttattgcattcttttgggttgtaatcaagcaggaaaataatgagtatataagcaaatataagtgtaaaatggttatcagtcataaatcgaagttctctaagagcgaattcaattgatagagcattgaaatcgtgtcaattgttcgccagcacctgccagcacatcgccttcagaagtcgtctcgtgtgcttgggaagtggagtaatgatgatgatggcgctgatgatgatgatgatgatgatgatgatgatggggatcacgctcaattgcaatctgttattattattgttgcatcatacgcgttcatgtgccccatggtcatatgcttatcagcggcacatcgtcatcgattgacggaacgattgagtgcacggaacttaaagatctggaaccaaagccaatgaatcaatcagaatcgaactcgaatgactttgttattacagcaaatgattttgatttgttttgcttaaaaagtagtttacaaataagattactttgaaacacaaatattatgagtaataacaacaaaaataactacatatagtgatagccagtaaattcgaaatgaaagcatctttagtttgtttgcagaaatcatcaaaaaaataatagaattatattaatccaattgggaactatatttgtatatttatcagtgagaatgtgttagcttttgaggttgacttttatagtgctgataaaactatatgtaatataagaaaacagagcatattcgcttctaactgtgcagatctgtgcttcaaaatggcttaggtctgacatacgatgtcgtctgcgggcggttcaaactggattgcagcgacatcggctgaaagcggcgtatagcctatagcctatctggaaaaaaaaaggaacactgctccgctgcctccgccagatgactacaaagccttgccgaaacttatctgctgcacaacagccttccagtcgaacccaattccgatcccagctaatcccgcccctttccttatccgctggt

SEQ ID NO: 38006 - DNA, 2706 bp, DROSOPHILA
atggccgtttcggtgagattgccccaggatacaggaccctacatcgagcattatctcatccagtcgcacgataatgtcctaagtttggagagctcgagattcacattcggatcgataccttcgctaattgcccactatgcccaatgttgcgatgagttgccggtgcagctgatgttgccacgtgtcctgcgcgaggcgaacaatcgaaagaagctgagttcgctggccctgttgggtcaggagttctggagctatgtgagcagtccggctctcttgggtccattaacgccatcggtggctccgtcaaaggatcagcaattgcttgatgcaaaatcgccgctctcactaacggaaaccagtggtcttggcactgccaccttctttagcgatactgtgtcgaagccaccgcccactggagcaccgccactgccgggtggtggtctcttcagtcccaccggaagtggtcaattgctgggcttctttagccaggcgggcactccatccgatacgacaaattcgagccttagctccttcaccaccagcggaggtcaacatatgcagctgctgagtccgaattctgtagattcggtaatactcaccatgtcgccagtggacaatcctgggcattatttgcccggttcgacgggtgctcccatggcacctttatgcccatcggttgtggatcaacagctgagcacctttaaagtggcccaaactgcgccggaagtagatcaagtgcgtccacagagaccgaagccaccaaatacgttgaatctcaagccgccggcaccaccactgcgctggtcaaagccccattctccggatcagaatggaagtgccaatggcaattttacggtaaccaccacggttaccttctcgatggagaacggaggtggcggcggtagtggaccgacggttggtaatggtaatggaaaattcgtggaggttactacgccggcggccagtaatccctttaatgccctactcaacggccaggcgagcacttttcagacattcgccaagcgattgtcgccggagggcgagtgtaaggacacgctgtcctcgcagggatcctcttctaacgatagtcgctggccgccgccggcccgcaagttgctcacctcaccaatgacaccgctaacgcccagtggcggcagcagcagcagcggcggcaaatcccgaaagtcgcgagcgggcaaggagtcgcagcactacaaggagtcggacatcctcgagagcccgccgatgcagtactgcgccagtgcgctaagcgacaagatcagcgactacgaggacgtctggtcgcacgatcccagcgatcgggccagcctgctgaccagtttccgcccggcattggacacggtgggcggtgtgatgaaccgacggccagatctgctggccgagactccgagcactccaacaccgacgcagcaatctcaccttacgccctgcgaggaggaaaccactgccacacccaacgaatcctccagtcaatctctgcttcagttctccggcgatgtgccagctcgctctcgagccggcctgctcttgccaaatctttcgggacaggtgccccctgtggccatgactaaatccatgacggcggcggaggacgatggtggcgataccacgcccacggccgaaggacaagccaacggagccagtcgcagcaagcaaggcagtccgttttatgcggaaccagcggatgcactgcgtcaggcgggcctgaccagcgcagccacggccatcttgcgtcgccagcatcgcagtcaaatgttacacgccagccaaagacactcggaaccacttaaagcgggcttcggaggatccggcaatggtgcaatgctgcagcccagcgatctggagaagttagctggcagcctggacgaactaaagcccaaaccgaaggtttcccagcagcaacagcagtcccaacaacaacagcagcccaccaagcgggcacgcaatcgcatcgatcactggcaattggacagcagttgggagtttatggccaagcaggatacgggcagtcatgctggcggggattacgatacggcagcaatcgattggcaggagaaggaaaattcgctgggccgcgatagccgtgcagatgggcagggaaagaaacgaacgttgaccattcatcagatcattgccaatcgattgcccgacctcaatctgccagagctggtacgttgctcaacgcccccgcaaacggccgcactgcagccgcatgtcctgggacaggataaggcgggagtcgggtgcgatggtagccaaaagtcattccagagccagatcggttgccggctctcctcctacgacaacgtcttctgccagaactcgttcggaggcattgattcggcgcagtccgacgatggcaccattttctcggagccctgggattcttcccaatgggacaccttcctgccccacgatgacgccaccatcaattcggacaccattcatctgtccaagtgccgacccgctctctcagaggacgacactattgtcgaggaactacaaagcaccaaagacggcagcaatggcagctgcaaccaggacacactcaaggcgaacaggaatggtgctggacaccacaagctcaacaatggcaatggcaatggcaaggccaacaatcgacctaaagtggccacaattctgcggaaccccagcatgcgggatcgtgaagtcttatgtgagtag

SEQ ID NO: 38007 - protein, 901 aa, DROSOPHILA
MAVSVRLPQDTGPYIEHYLIQSHDNVLSLESSRFTFGSIPSLIAHYAQCCDELPVQLMLPRVLREANNRKKLSSLALLGQEFWSYVSSPALLGPLTPSVAPSKDQQLLDAKSPLSLTETSGLGTATFFSDTVSKPPPTGAPPLPGGGLFSPTGSGQLLGFFSQAGTPSDTTNSSLSSFTTSGGQHMQLLSPNSVDSVILTMSPVDNPGHYLPGSTGAPMAPLCPSVVDQQLSTFKVAQTAPEVDQVRPQRPKPPNTLNLKPPAPPLRWSKPHSPDQNGSANGNFTVTTTVTFSMENGGGGGSGPTVGNGNGKFVEVTTPAASNPFNALLNGQASTFQTFAKRLSPEGECKDTLSSQGSSSNDSRWPPPARKLLTSPMTPLTPSGGSSSSGGKSRKSRAGKESQHYKESDILESPPMQYCASALSDKISDYEDVWSHDPSDRASLLTSFRPALDTVGGVMNRRPDLLAETPSTPTPTQQSHLTPCEEETTATPNESSSQSLLQFSGDVPARSRAGLLLPNLSGQVPPVAMTKSMTAAEDDGGDTTPTAEGQANGASRSKQGSPFYAEPADALRQAGLTSAATAILRRQHRSQMLHASQRHSEPLKAGFGGSGNGAMLQPSDLEKLAGSLDELKPKPKVSQQQQQSQQQQQPTKRARNRIDHWQLDSSWEFMAKQDTGSHAGGDYDTAAIDWQEKENSLGRDSRADGQGKKRTLTIHQIIANRLPDLNLPELVRCSTPPQTAALQPHVLGQDKAGVGCDGSQKSFQSQIGCRLSSYDNVFCQNSFGGIDSAQSDDGTIFSEPWDSSQWDTFLPHDDATINSDTIHLSKCRPALSEDDTIVEELQSTKDGSNGSCNQDTLKANRNGAGHHKLNNGNGNGKANNRPKVATILRNPSMRDREVLCE

SEQ ID NO: 38008 - DNA, 4691 bp, DROSOPHILA
atatgaagcttatagttaattgaggccccaggcaataaggaatgaagaaaaaaaaaagaacttacatttcgaatggatatagctaagcaagaaggtcttaatcgaaatattcgaaaaacatatactactcaaatagaaagcactatacatcattaaataatctttgcaatgatgggtaaattactgtgatatatcgaagccacagggtttacagacctgattgtttatatgagtaatgtgatgggggggggggctctaaaaatgcttttcacatggcactcaaatgcgaacatctgggttttgttttgcaatggggtttccgactcgttcagcgatacacaaagggaccacaatgaatcagctcgcgaaggcgataacttgcgagcgattcctacaggtagtggcttggatggaccaatgtccaattacattacgctgggattgggctacctgtgggtagtgggtggaataccaatcgaagccagcggattgagtcattggcttgcgcaactgtacctggttggcgagggaaaagccggaaattcccgggattcctgtggttgtacaccacccaaaaaaggatacgcactacctgctttcgaagctgctgacctgctttgggtggaaaaggtcatgcaaatgaggccgccactgatcgagttgacacatttagcgacgccgccgtcgctatctttgtttttgcggactgcgacgtcgacggcggagatgccgtcgccgtcttataaactaatgcgtatgaagttcagaattagttttgcattggccgcgtttagagcagcagcctgcgagagcgagcatcgaatcgaaacttatttcgttgagcaaaaaattctcgagacgaagatccaacgatcgtcggaggagagtgagagttggacgcgaccgccatcgcttatcaattagccgcagcgtgtgccgatgagaaacctgcgtttccgccaattcgttttagctggcaagaatcgctaccggatataccatgagttggttcagaagatcgtcgcgtgcaccgtccgtgagccgcccgcattcacccgcatcactcaaccagccgcatcagaatccgacagatcagcagcatcagcgcgatatgtccaagtcgctaagctggctggatgagcgatgcattgaacggcaggagccggaggagttctttcacgatcctgaccatgtgcgacactacaaggaggaagcacagttcctgagcatcatgtccgaatgggagatcatcgagcatccgccgcagtccaattacttttcggcggactttgaagaggagctactgcagcaacgaacacagctgccaatcagttcattagaggatatcaatcacagggatactacggatatggttaaggataaagagtcaaaggctgaagccaaatcgaaacctaaacgcaaacgaaaattcctggaactgctgttcgtggacaacatacagactggaattgccctgccccaggacgagaatgaaagcccacagcgggctccatcttcgccaacagcggtgctatgcaaaaagtccagaaagtccaatagtaccaacagtattgccatcccatccaccattgtggctacatgtccgcaacaggtgctcaaagactgccgcatcaatcggaaacaactgaagactgaggccctggccagctccattatgggtgccatcgggaaatgtcccgccggggaggattccatgccggggccacttatcaacgagccggatcagtgccatcctggtgagcagaacacctgtgaccactacgacatcaaacagttctttcacttggacgaacagggcaacattctactgaacatggcgcacattgtcgaatgccaagcactgggcctgtgccttcaatcccagagtcgtcgtctctatcgacgctatcgacgtggctgtgaatgtgccgacgaggacttttgccagagccgtggttgctgtcgcatcctgcgtcgtttgctccgactgctgtgtgaattaatagctggtaaggggagggttctccaattgctaaagaaactttaggatctttgatactagggagtctcactgataatcgtctctatgtgaacccatgctatctagatagtttctacaaatatttacccttactatatatctgttagctaatctctatctcttttattcttgcaggtcacccccgcaacaagatgagcattcagagcagcggacccggtgattctttgagggcatacacccttcaattggcccaggatcccagctcgacgtttgcccgcaacattgagaactttatttgctgcaccaaggagtcccgggaggcggcgccacaagtggtgatgcgaaatatgcgccagttcatgagcggcatgaagaactatctggtgaagcatggcgagggcaagttccatgcggaactagagacggcgagggcgcgactcaagtcggatgagttcctcaacctggacgccatgctggagacggtgatgcaccagttggtggtgctgccgttgcgggagcacctctatggcattttcgtcgatcactatcagcgcagcgaggatatccaattgttggcgcaaaatgtacgctacgcctgcgaacgggaggctgccgactttggcatcaggcccacggtaacgccgccatcacaggctgccctgcggctcatcgctaatctgctgtggcgcctccaggaggccgaattgccgctcgacaagttggagctcttcctgtgcgtcatctcgaccgtatttgatgccaccggctgtccgcgtggccagcagctgggcgccgatgacttcctgcccgtactggtctatgtggtggccaagtgcggatttgtgggcgccgagatcgaagcggaattcatgtggggcctcctccagccgacactgcttaatggggagccgggctactacctgaccgccctctgcagcgctgtccaggtgctcaagaccttcatggcgtccgagggggaaagcggcagcggatccctggacgtaagtagcaatcacaaatgagctgagtttccttactaagtaccttgaatctagacttcatacataggataatagataatgcattggttgctaataacccacataaaatatacattgactattggattttgtatttaattaatagtacatattaaaacaataaatataattttcatacatcagtattaatagttcaagcagttcagtagttcatagcagttcaactcgcgatctagaatattttactcaaaaaggaaaagttagatttgatcttgtggtatgaaaatatggaaaacttagctcacgctctaaaaccccaatagttgtgcagtgactaacaatatacctctgcttttagtggcgctccagctgccttccagcctgctccagcgtgctgcgcgtgatcataccggacgagtgcaacggatccctacaaacgaggacacttccggtgcgaccacacaccaccacccgtgaagtgtgccgcatcattgcgcacaaggcgcgcatcacaaatccgcaggactatgcgctctttaagctggtcgatggcgaggagacgctgctgacggacgcagagtgtccgcaggatgcccgattggcggccaagggaaagcattgcatgctggcctacaagcggatcgatgccaagatcgcctggccgaccgcccagctggcaggacactgaatcatcagctcggggatgcacccgatgcaaatatacgacataccgccccgcccgctctgcccttcttgctcactaaccaagcatatttgattaataatttattattattacattaaaatatacttagtagcctgtaagtaaagctaattaatgctaattagaaaacatctaatgtgtactaaacatcagtattgagttaagtgtgtttttttttcctgacccacgggtcaagccccctttttttttgctaataaatgtactatgcgaatacatatacacatatatacgatatataaacttttagcaagtagagttgcaattactgcacaaagaaagcgatggagtcatctaaacgaatctacactctaaacatatatgcaaacacgagcatgccatctgggggtataatccatttggtgtggatcgtgtgtgccaccctggagaccaaaagcacagttcaacaatcacagcaacaatcaattattcattcaatcaaacattttaacgattatgcgtgcatcatcatcatcaaactacacaaaaggcatttaggtgtgaatgggtttcgtgttttttttttttaagaatcaaaaccatataatattgaagtataaacaattaaattttaatatttatgttcaactaaacactgctatcaacccttgagatatacataaatacataaatattttttgtatactttgtaaaatatgtgacacgtaatccaaatagcaagcaaataaataaccaaaataaaacaagggtcttttaatgtattattattagtgattggagtaacatggactggtgccactggttcctcaaaataggcctctacactccccattgcttatatgcaacatactttggggctaagaattcaaaataaagcttcatttgtattatatttgcaaaaaagaaaagcaacagatgtccagaaaacacacatacagccaatgatcgccacgattcccggattgtttttggttttttttttgag

SEQ ID NO: 38009 - DNA, 2166 bp, DROSOPHILA
atgagttggttcagaagatcgtcgcgtgcaccgtccgtgagccgcccgcattcacccgcatcactcaaccagccgcatcagaatccgacagatcagcagcatcagcgcgatatgtccaagtcgctaagctggctggatgagcgatgcattgaacggcaggagccggaggagttctttcacgatcctgaccatgtgcgacactacaaggaggaagcacagttcctgagcatcatgtccgaatgggagatcatcgagcatccgccgcagtccaattacttttcggcggactttgaagaggagctactgcagcaacgaacacagctgccaatcagttcattagaggatatcaatcacagggatactacggatatggttaaggataaagagtcaaaggctgaagccaaatcgaaacctaaacgcaaacgaaaattcctggaactgctgttcgtggacaacatacagactggaattgccctgccccaggacgagaatgaaagcccacagcgggctccatcttcgccaacagcggtgctatgcaaaaagtccagaaagtccaatagtaccaacagtattgccatcccatccaccattgtggctacatgtccgcaacaggtgctcaaagactgccgcatcaatcggaaacaactgaagactgaggccctggccagctccattatgggtgccatcgggaaatgtcccgccggggaggattccatgccggggccacttatcaacgagccggatcagtgccatcctggtgagcagaacacctgtgaccactacgacatcaaacagttctttcacttggacgaacagggcaacattctactgaacatggcgcacattgtcgaatgccaagcactgggcctgtgccttcaatcccagagtcgtcgtctctatcgacgctatcgacgtggctgtgaatgtgccgacgaggacttttgccagagccgtggttgctgtcgcatcctgcgtcgtttgctccgactgctgtgtgaattaatagctggtcacccccgcaacaagatgagcattcagagcagcggacccggtgattctttgagggcatacacccttcaattggcccaggatcccagctcgacgtttgcccgcaacattgagaactttatttgctgcaccaaggagtcccgggaggcggcgccacaagtggtgatgcgaaatatgcgccagttcatgagcggcatgaagaactatctggtgaagcatggcgagggcaagttccatgcggaactagagacggcgagggcgcgactcaagtcggatgagttcctcaacctggacgccatgctggagacggtgatgcaccagttggtggtgctgccgttgcgggagcacctctatggcattttcgtcgatcactatcagcgcagcgaggatatccaattgttggcgcaaaatgtacgctacgcctgcgaacgggaggctgccgactttggcatcaggcccacggtaacgccgccatcacaggctgccctgcggctcatcgctaatctgctgtggcgcctccaggaggccgaattgccgctcgacaagttggagctcttcctgtgcgtcatctcgaccgtatttgatgccaccggctgtccgcgtggccagcagctgggcgccgatgacttcctgcccgtactggtctatgtggtggccaagtgcggatttgtgggcgccgagatcgaagcggaattcatgtggggcctcctccagccgacactgcttaatggggagccgggctactacctgaccgccctctgcagcgctgtccaggtgctcaagaccttcatggcgtccgagggggaaagcggcagcggatccctggactggcgctccagctgccttccagcctgctccagcgtgctgcgcgtgatcataccggacgagtgcaacggatccctacaaacgaggacacttccggtgcgaccacacaccaccacccgtgaagtgtgccgcatcattgcgcacaaggcgcgcatcacaaatccgcaggactatgcgctctttaagctggtcgatggcgaggagacgctgctgacggacgcagagtgtccgcaggatgcccgattggcggccaagggaaagcattgcatgctggcctacaagcggatcgatgccaagatcgcctggccgaccgcccagctggcaggacactga

SEQ ID NO: 38010 - protein, 721 aa, DROSOPHILA
MSWFRRSSRAPSVSRPHSPASLNQPHQNPTDQQHQRDMSKSLSWLDERCIERQEPEEFFHDPDHVRHYKEEAQFLSIMSEWEIIEHPPQSNYFSADFEEELLQQRTQLPISSLEDINHRDTTDMVKDKESKAEAKSKPKRKRKFLELLFVDNIQTGIALPQDENESPQRAPSSPTAVLCKKSRKSNSTNSIAIPSTIVATCPQQVLKDCRINRKQLKTEALASSIMGAIGKCPAGEDSMPGPLINEPDQCHPGEQNTCDHYDIKQFFHLDEQGNILLNMAHIVECQALGLCLQSQSRRLYRRYRRGCECADEDFCQSRGCCRILRRLLRLLCELIAGHPRNKMSIQSSGPGDSLRAYTLQLAQDPSSTFARNIENFICCTKESREAAPQVVMRNMRQFMSGMKNYLVKHGEGKFHAELETARARLKSDEFLNLDAMLETVMHQLVVLPLREHLYGIFVDHYQRSEDIQLLAQNVRYACEREAADFGIRPTVTPPSQAALRLIANLLWRLQEAELPLDKLELFLCVISTVFDATGCPRGQQLGADDFLPVLVYVVAKCGFVGAEIEAEFMWGLLQPTLLNGEPGYYLTALCSAVQVLKTFMASEGESGSGSLDWRSSCLPACSSVLRVIIPDECNGSLQTRTLPVRPHTTTREVCRIIAHKARITNPQDYALFKLVDGEETLLTDAECPQDARLAAKGKHCMLAYKRIDAKIAWPTAQLAGH

SEQ ID NO: 38011 - DNA, 3491 bp, DROSOPHILA
gacctgccaactggctgcaaataaatttcagctgaccatcattgtcggtgtgttagtcaacactaatgaacacaatttggcgggacaatttgaaatattgaataatattaataaatattaaataaacaatatatatatatttcctaaatcatacagtaactaaaatttatatttatttccatatcataacttgtaacaatatattcacataacatataataccaaaaatatactttaatattataaactaaatagacttaatcctggacggcaaaacaaactttactttggtccacaagccatcggacggcaaattgtcgagtccttatcaaaagtcaacgacagcattacgaattgcgaatctaattaaggagccaaaaatagacgcgccacaactattgctcgtgtcgctcaaatctgcacagactcattaaaattataatgcacttcctgggaactaaaggctgccatttgattgtcaggacaagcgagtgaaagggccggcattaaatagaatgcggcgaaaggcagaaaaaatcgtgtaattagagccataaatgcacttcaagtccacccaggtccacacccatttaacccgcaaaccaatgcacaaaggaagcatattaaatgaaagtagtgccaaatcctccgactcaacaattagtgaaaaatcaaaaaaaaaaaatatatatatatatacagtccgaccatactaaactcgattctatgacaagttgaacttgttggtattaagacaatattttaaataataaaaagttctactttgcttgtacctaatcaaaaaaacgcccattacattgaaatattctaaaaaaattctaaaaaaagattgccagagtatccaaagataagtaaggaattaaacaattattattctttatgttctgagcttgactgcatttttgacatgacattaacttccacgccccctctgtggaaagtataagaacccaacgactgtacagtccgccagttaaagatgagcgacaaggtgaagggaaaaaagcaggaggaaaaggatcaatccttgcgggtgcaaattctcgtttatcgctgcatgggcatcgatttgtggagccccacgatggcgaatgaccgcccgtggctgacctttgtcacaatgggaccacttttcctgtttatggtgcccatgttcctggccgcccacgagtacatcacccaggtgagcctgctctccgacaccctgggctccaccttcgccagcatgctcaccctggtcaaattcctgctcttctgctatcatcgcaaggagttcgtcggcctgatctaccacatcagggccattctggctaaaggtaagtttctactaattaaaaaaaaatttatataacataaaaatatattttataatttgcagaaatcgaagtgtggcctgatgcgcgggaaatcatcgaggtggagaaccaaagtgaccaaatgctcagtcttacgtacactcgctgttttggactggctggaatctttgcggccctgaagccctttgtgggcatcatactctcctcgattcgcggcgacgagattcacctggagctgccccacaacggcgtttacccgtacgatctccaggtggtcatgttttatgtgcccacctatctgtggaatgtgatggccagctatagtgctgtaagtttcctaacatacataaaaaaaaaccaaaaaaaaaggtgcttattaccattgtaatttttcgaatttaaggtaaccatggcactctgcgtggactcgctgctcttctttttcacctacaacgtgtgcgccattttcaagatcgccaagcaccggatgatccatctgccggcggtgggcggaaaggaggagctggaggggctcgtccaggtgctgctgctgcaccagaagggcctccagatcgccgatcacattgcggacaagtaccggccgctgatctttttgcagttctttctgtccgccttgcagatctgcttcattggattccaggtggctgatctgtttcccaatccgcagagtctctactttatcgcctttgtgggctcgctgctcatcgcactgttcatctactcgaagtgcggcgaaaatatcaagagtgccagcctggatttcggaaacgggctgtacgagaccaactggaccgacttctcgccacccactaaaagagccctcctcattgccgccatgcgcgcccagcgaccttgccagatgaagggctactttttcgaggccagcatggccaccttctcgacggtgagtttccgtaaacatgccacgtgccgcagaaatacacctggagaaacaattcaaaaaactagtacttcttttcatttttaatctgccaatatgtagatttagattttggagacataatacttgcaaatttattaattaaatattaaagtctgcctgatattatccattgcagattgttcgctctgccgtgtcgtacatcatgatgttgcgctcctttaatgcctaaaaaggacatcaaaatgtgtcaaaggaggctgcattttaagcaggtgtgccaggtgacaaggcagtttaagacaaacacagctgaaatcgttctaaacgttctaagaacaagcattgttcatcaacaatatacatttatatatatttataaaagatatatatggcacggttaaatatttatattaaacccataaaccaattagaaaaatgtttttgttttatttaattatacaaaaatgtggctaagtgcactaagtttccagataaatttcgaggtaaatacttaactacaaagttttcagattatcgacaatcagaccgacaaattcactttcaatttcattcaacaattgtgtattcccatctttgaatctccagctgcgacgagcttgttggattaatttgtgttttatttttataacgagccaggcaaaatacccaacattggggtgctgggaatgagttgggacaaatgtgaaggccagacgtcactgccattcactgccacccattgccacccatcatgacgagacttcttttttaaacttgagctgtttttcctacctcaaaggaaaataagcaaagttcagatgcgaggcgtgtgttttttcttcttcttcttcttcattttttttttgttttttttgataggggaagtggagcagattgcaagcgatatcgctgcaaactacaagtatacgtatcttttcgcgatttcgcagtcagactcagtcgtgctcagtcagtaccacttgcacccatgttcgacccattttctagctggctgtaacgatttcctgttcgaaccgtgattgatgacaggcgaccatggagcaggaaggtggatatctgttggatgcaaaagtcttaagtacacgcaacagtgagctgcttgattggatacctggatacatggatacttcggcagttcggcacttgcgagtagtgcccagtaacattcaccgcatttcacgcccgttgcactttaattgccaactgtt

SEQ ID NO: 38012 - DNA, 1179 bp, DROSOPHILA
atgagcgacaaggtgaagggaaaaaagcaggaggaaaaggatcaatccttgcgggtgcaaattctcgtttatcgctgcatgggcatcgatttgtggagccccacgatggcgaatgaccgcccgtggctgacctttgtcacaatgggaccacttttcctgtttatggtgcccatgttcctggccgcccacgagtacatcacccaggtgagcctgctctccgacaccctgggctccaccttcgccagcatgctcaccctggtcaaattcctgctcttctgctatcatcgcaaggagttcgtcggcctgatctaccacatcagggccattctggctaaagaaatcgaagtgtggcctgatgcgcgggaaatcatcgaggtggagaaccaaagtgaccaaatgctcagtcttacgtacactcgctgttttggactggctggaatctttgcggccctgaagccctttgtgggcatcatactctcctcgattcgcggcgacgagattcacctggagctgccccacaacggcgtttacccgtacgatctccaggtggtcatgttttatgtgcccacctatctgtggaatgtgatggccagctatagtgctgtaaccatggcactctgcgtggactcgctgctcttctttttcacctacaacgtgtgcgccattttcaagatcgccaagcaccggatgatccatctgccggcggtgggcggaaaggaggagctggaggggctcgtccaggtgctgctgctgcaccagaagggcctccagatcgccgatcacattgcggacaagtaccggccgctgatctttttgcagttctttctgtccgccttgcagatctgcttcattggattccaggtggctgatctgtttcccaatccgcagagtctctactttatcgcctttgtgggctcgctgctcatcgcactgttcatctactcgaagtgcggcgaaaatatcaagagtgccagcctggatttcggaaacgggctgtacgagaccaactggaccgacttctcgccacccactaaaagagccctcctcattgccgccatgcgcgcccagcgaccttgccagatgaagggctactttttcgaggccagcatggccaccttctcgacgattgttcgctctgccgtgtcgtacatcatgatgttgcgctcctttaatgcctaa

SEQ ID NO: 38013 - protein, 392 aa, DROSOPHILA
MSDKVKGKKQEEKDQSLRVQILVYRCMGIDLWSPTMANDRPWLTFVTMGPLFLFMVPMFLAAHEYITQVSLLSDTLGSTFASMLTLVKFLLFCYHRKEFVGLIYHIRAILAKEIEVWPDAREIIEVENQSDQMLSLTYTRCFGLAGIFAALKPFVGIILSSIRGDEIHLELPHNGVYPYDLQVVMFYVPTYLWNVMASYSAVTMALCVDSLLFFFTYNVCAIFKIAKHRMIHLPAVGGKEELEGLVQVLLLHQKGLQIADHIADKYRPLIFLQFFLSALQICFIGFQVADLFPNPQSLYFIAFVGSLLIALFIYSKCGENIKSASLDFGNGLYETNWTDFSPPTKRALLIAAMRAQRPCQMKGYFFEASMATFSTIVRSAVSYIMMLRSFNA

SEQ ID NO: 38014 - DNA, 2444 bp, DROSOPHILA
aatgtttgtatagtggcttaaataaagtttgcgctgaaaagcatgctacactttttgcttaaaccccgagtggggttttgaatccctttaacaaataaccaaatccacaaagtggcgatgttcttactccttttttaattacttgaattgtccggtgcttcactatatatatgtatgtatatatgctttaatccgctctgggtgatcaattgtaatcggcaggatgttgacgcattaagccccttgtccgtcacagccactggctcttagcctttttgctgcttttccattgcggctcaaaaacagggagatatttctgctctgcaaattaacagattagtgggataataaatatagatttttaaagcatttaagtagcttcccagctaaaataaatcatccaaaaattaactcaacttgctctatttgcgctttgccactcattattggtaagggagttaattttatataaatatgaacgttattttaatgggtcttcttcagtccaacgcagtttctaatttactcgcccgaagcgttgaaataatattatagtttctctcctaccttcgccacaatttaaaatccagtaaggagaactttttgctttttattttaacattgcggctaatttggtccgaccatcaaaccaacaacagacaaaaagaaaatgtaaatgaaaaaaaaacaccaggaaatgaggaagaaagtaagaaaagtgagggctgggtgtaagaggctttccaccagccacagcaattaatttacattaattttcctttgttcgcatggcattgttttgtttcgtttcatttcttcttttccattttatttttttacttcatgcctgggcagccgcagcggcagcagcgattttattaaaaaacaattacaacacttgggcatctgctctgtaccatttcatcgcgacctggaaaggacccgtccatattagcaggacctagaaaaaagaaaaaaacccgaaacggaaagagccaggatgtcggacaagcagcaggaaaaggagccaatccccgaggaggagcagcagcaggagcaggagcgggagcatgaggctcctggcagcagacatgcctgttgcggatctggaccggatccggaagcggaaccggaagtggagatggatgtcgaggtggaggaggcatcgggatcagcaattggcgctgcagctgctggcgaatcggatgcacccgctccggccaatccaaatccggggctggaacgcgacagggacagggactcgcacggcgacaggtgagtgaagcgaattccgatacagattcccattccgatagccattcccgttccgaacactccatcgacatccagcccatcctcgcgctccgagcgaccttgtcaatatccattagctaattgggcatgcgatgttgtggaggcaagtcgggccaaaagttgggcctagtctggcccgaaaagtgaagccaactgtcccaaattaaatcaacaccattacaatatatcgaatagcatgcccatacatacatacataatttaattatattaaccgatatgtatatatatatatatatattatacggaaattagttcatccaatacaacaagtaagacattataaatatgtaaagttataggtcttctaatgtatgtttaacaaatacctattaagtataaccctataatatagtatttattatacatattatgtatataatccttgtaaaatctttgaaatctccagcttgaaacaaacgcttaatatacaattaactccaagtgttttaaaaacacagagtcataatataattacaccactccaaatgacttcggtgtcaattagcccaagttgacccactctttagatcgcaatccttaacctaatctcataccctaattttctgggtaaaaacctttgttgactgctatgtacaacgaattaacacattttgcagtttggtgggggattccaattggggaagctttataaatagataccagccactccccgaaaatagaccttaaagcgagtcctttgggaactttttggatgacaagcgcacccttttttgtcattttttttttctggatgtcaacttgcccgaagaaacttctttcataattaaaaagttgtttattggaatgtaatatttagtgtgccacgtcttcgaaatattaatataatattcgatttttgcgcttatatgtaaattatagttcatgaatgaaattaggagatcttatctctattggctctattgcccgctgattgtgcactccatatcgcaatgtaatttatgatcggattaaaagaaaatttatttctaaagtacacctcgtggcctaatcaaaagtttgtgctcgaatcgattggatagaattggaaaaatttcctaagtacacaaaactctctagattaaatgacttatatttttaaataacttgat

SEQ ID NO: 38015 - DNA, 369 bp, DROSOPHILA
atgtcggacaagcagcaggaaaaggagccaatccccgaggaggagcagcagcaggagcaggagcgggagcatgaggctcctggcagcagacatgcctgttgcggatctggaccggatccggaagcggaaccggaagtggagatggatgtcgaggtggaggaggcatcgggatcagcaattggcgctgcagctgctggcgaatcggatgcacccgctccggccaatccaaatccggggctggaacgcgacagggacagggactcgcacggcgacagcccatcctcgcgctccgagcgaccttgtcaatatccattagctaattgggcatgcgatgttgtggaggcaagtcgggccaaaagttgggcctag

SEQ ID NO: 38016 - protein, 122 aa, DROSOPHILA
MSDKQQEKEPIPEEEQQQEQEREHEAPGSRHACCGSGPDPEAEPEVEMDVEVEEASGSAIGAAAAGESDAPAPANPNPGLERDRDRDSHGDSPSSRSERPCQYPLANWACDVVEASRAKSWA

SEQ ID NO: 38017 - DNA, 2232 bp, DROSOPHILA
acggaacgaagaggaagtgtagacgatggtggagagaataggagaagagaagtgaagagtacttggcatataaatgcatacaaatatatgtaaaccatttttacattcaattcattcaaattaatttttagtaatactgaattttcgataaaccgggccagcaaacgctacgcccaccgccccgcccccctcaaaaaagtccctacccacgaaaatgaggaaatttaaagcaagtttgaaatgaaataaaaactttaaataaaatattaaaaacagaaaaccaaaaaggaaatggaacccgaagtttggtagatgtgttgctagactaatgaaaaccactgcttactccattcgtcgattttagtttgggatagatggaacaggtggtttcatggaaggtgttcatagatgtctttcgattttcaatttcttcttttgctgtagcttgcgccgcaatcattggatcattacgttcaactttgttatggattcaaaaaactagagcttccattttcggggcataagaactgcacagaagtagacagcatacatggaattagatatctggtaatattgtgagaagtggaacatacgttctgaatgaactgaaggttattatggaacatcatcttactgctaggctgaacctcaattaacaagtgatatccgcactggacgcaagctaatctctctctcttctagaaccacttattattacttttagcccggttgcgtatgcattgccgtgagtaccttgcagcccatagatcggtgtggttagggtatccaccgcagtgatgcccacaaatcatgtggcagtcgcaggatcgttacataatgcacttcgtgggtacagtgtgttacattctcagcttatttattccttcaaggtcttgcactacacataaaataaactgatccgcagtccagcgatggccccggatccaagacatcgattgtggcggatgagttgtagccgcgttggagcagttgcatccctctacttcttcttgggcttcagcacctggtaggcgatcagcaggcccatcacggcgtacgtggccttggccacctggacaaggacgggataaatggatggcataacaatcggattagcattaccacgggcacgacgttctggaatttcatctactcacatttgcacggccgctcatggtggtgccattgaagattttcgacaggccggtcagtttctcgccttcgccagccatttctgtgaattgaaggtgatgcgtttcaagtggaacttagtgaatggctgaagcggtaacttgggctactcacttaaaggtttatttgcacggaattcgagctgctagttgcctgtaaaaaatatttgcgagcagaggttatacaactgagtctatcgaggtctatcggtcttcgataacagaagggtatgccagtcgttgctcatcgatactatcgagctgggcgaacagtgttgaaagtgcctgacctgccaactggctgcaaataaatttcagctgaccatcattgtcggtgtgttagtcaacactaatgaacacaatttggcgggacaatttgaaatattgaataatattaataaatattaaataaacaatatatatatatttcctaaatcatacagtaactaaaatttatatttatttccatatcataacttgtaacaatatattcacataacatataataccaaaaatatactttaatattataaactaaatagacttaatcctggacggcaaaacaaactttactttggtccacaagccatcggacggcaaattgtcgagtccttatcaaaagtcaacgacagcattacgaattgcgaatctaattaaggagccaaaaatagacgcgccacaactattgctcgtgtcgctcaaatctgcacagactcattaaaattataatgcacttcctgggaactaaaggctgccatttgattgtcaggacaagcgagtgaaagggccggcattaaatagaatgcggcgaaaggcagaaaaaatcgtgtaattagagccataaatgcacttcaagtccacccaggtccacacccatttaacccgcaaaccaatgcacaaaggaagcatattaaatgaaagtagtgccaaatcctccgactcaacaattagtgaaaaatcaaaaaaaaaaaatatatatatatatacagtccgaccatactaaactcgattctatgacaagttgaacttgttggtattaaga

SEQ ID NO: 38018 - DNA, 147 bp, DROSOPHILA
atggctggcgaaggcgagaaactgaccggcctgtcgaaaatcttcaatggcaccaccatgagcggccgtgcaaatgtggccaaggccacgtacgccgtgatgggcctgctgatcgcctaccaggtgctgaagcccaagaagaagtag

SEQ ID NO: 38019 - protein, 48 aa, DROSOPHILA
MAGEGEKLTGLSKIFNGTTMSGRANVAKATYAVMGLLIAYQVLKPKKK

SEQ ID NO: 38020 - DNA, 2348 bp, DROSOPHILA
tacgtttcagcaaataattatattatttgctcatattaaccggtaaacatgtatttatttattttgattaaattaaaaggcctatggtcaactgtaaatttaatgtacaaaatgccaagttattcaatgtccttgtgtattgaacgattcctacgacattttgccaaatcgaaacctagtaaaactcgaggtttagatccttcctgatccctatacccgcatgccaggcttttattaactgtcaagattaacgaaatgctaccaaatatgctgcaaatatgtaaaaatgaacgaaattaaaacaccatttaacatttgtgtacaaagccaaacaagcgaaaagagcgacaggagtaaaagaaaaagagcaaaaaaactttctactttatgaggcattaaaataaaaggtcgtaaaaagtgaaatggcataaaaccgggaccaaatcatgccgcgaacaaaacaaaaaaaaaaaaaaaaaaaaaaacatactgcttcaatagacagcaacatacaaggggccaaagtaaacaaacaaacaaataaacagtcgtgcaaacaaagaaaacaaacagatatataatactaaaaaacactaaatatatatacaccccagccgcttaaggcaataaaaactcgaaccgcgctcagaccgaaatcaaatgaaacgaaatgaaacgaaaaatacgcgcatcagatgtccaggtatacagttgagatatgtacatatataaatagatatatatatgtaaaaaaaaaatatatattccccaaaacccatatatatccattcattttggcagcgtacatatgtaacacacacgtgtataaccaacttactgtcatttcttcacctccgacgtgtccgacttttgctctctgctcctgctcctgctcctgttccttctactactgatgctgctgatgatgattccaatgatgtttatgatacactgatgatattttattgcccaacgaagtccaaacagcagtagcatccacatgaacaccaaccacaagcgccagaatcgcttcacacagttaatggaccgcctgcccctgggagggctcagttcaagctcggccaaactgggcacaccggtggcgccacaaacccacaaccagaaccagtaccagtaccagaatcacagcctgaatccgagtccgaatcagaatcaaaatcaaaatcaagcatcaatgtcctcgtcgctgagcagcctgaatcccagcagttcgcagttggaggtgacttctgctggcgacaatcttcgccgctccgtgagctttctcagcgaggagctgttcctggacgtggagaccggcgaggagtttcatgatccgcacaggtagttggtacttcagtaaacaacataccgacccacacacgcacacaccgcttgggccactcgggcgcatacttaatgtcctgctaagcagcaggaggagcagcataataaaggaaaaaacaataaaaacggcgagctaaatattcagctgccaagtggatggccatgcactgacaaaaaagaacaggagttcaaaatttaaataccgtaattgttttttttaaaggtcctcaaaatgttcatagcacaaatttaatgactatgttcttatgacagaatatatttagcagttttccatttcattgtcttcaacattttttttattggctcttactaatttaacaaaagactctaattttatttaaaaaaacaaaactctcctcgatttaatataagatgttaaatgacaaattacacttatgccctttatcgccgtgcagaaatcagaggcgatgttaccttaagtagtaaaatcttatccagaatgctgtgctaggcatgtttaatgagtaaatatttaaaatgccattccacgagaaaaaccttgagggtgcgtccacttaaagatgccgggccccgattgaattatgtgcacaatctttgcatgcgaaagtgaataggacccctcctcaaatcacgacgacaataccgcacttaatatcaataaaacaatacggttgtccagaaatcagagtataaatgaagatttggggcaaccgaaataaccatttggggcacatacccgtactcatgctcaaacttatactcgattctcgatacttaggcacgcgaaacaactttgtggcgatgtgggatcgggattagaattcgcattgcagataattggattaagtggcagcggttgaccgccaactttaacgcccacctcagtgtgttacaccaagccaaattaagtttcgatttaccttaaaattaggtaattaagctatttagttcaggtggcaggacttaagtttattactgtttcactactaagcatctag

SEQ ID NO: 38021 - DNA, 348 bp, DROSOPHILA
atgaacaccaaccacaagcgccagaatcgcttcacacagttaatggaccgcctgcccctgggagggctcagttcaagctcggccaaactgggcacaccggtggcgccacaaacccacaaccagaaccagtaccagtaccagaatcacagcctgaatccgagtccgaatcagaatcaaaatcaaaatcaagcatcaatgtcctcgtcgctgagcagcctgaatcccagcagttcgcagttggaggtgacttctgctggcgacaatcttcgccgctccgtgagctttctcagcgaggagctgttcctggacgtggagaccggcgaggagtttcatgatccgcacaggtag

SEQ ID NO: 38022 - protein, 115 aa, DROSOPHILA
MNTNHKRQNRFTQLMDRLPLGGLSSSSAKLGTPVAPQTHNQNQYQYQNHSLNPSPNQNQNQNQASMSSSLSSLNPSSSQLEVTSAGDNLRRSVSFLSEELFLDVETGEEFHDPHR

SEQ ID NO: 38023 - DNA, 2471 bp, DROSOPHILA
aagcgtaaaagcgctaaatagtttacatttttgcaacctcttctaggtttcgaatgcgatatgcctttgccctggtgaaaacccaacatctgcgagggttgcttaagccgcttagtgcttgtctcgttttgcaagtgtcagccaatgtcgaagatacggcatgggacgggatgggcttttccgcttttccggggggcgggccgccgccaccatttggctttagctctgaccgacgccacggggaaattgcatttgaacattgcgattttcggtttttgtccatttccgcaatgagtttcgcttttcttcctccgattctgtctttcggtttcacttatttcttgcgctgatatgacacgacccaactacagtggtcattcgacggaagaacacagcggaaaaggaaaacggagaagaatcttttcagatatcggttatgtttctacgttatgaagtatgtaaatatatcatagaaagtatatttccttacttaccgtgttagctaccgagtgatcactgtaaaccactctcagctgccaaagcagatgggcgatgggcaaaaggggcagattgagcgagatggtcgaggtaggccacaaccatttgtcaaggtcatcgagtgggctaggtcatggcactacgcccaccaccccatcccccgaaaaatgccattaattttgatctatgaagcgtcgtcagcctctgtcaccggcagcaaaaaaaaaaaaagaaaataaaatggcaaaagcagcggcggcggcagataaatttcatttgtcaaattgcaaattgaaattgaatttttagggcacttagccgggctgtcgtgttttctggctctcgcttttccgagaaatatggaaatttcgccctccttttgtgttcttttatgcttttttcccgcaagcccactccacctatcccacaccccttagttttaatagatctctctctctatatatatatatatatgtgtacgtatatatgaatatatatgtatatgtgcatccattcgaaagactttaaaaaacaaaaagaggccgaagagcacgcccagaagctgctaatcgctcaacaattggccgccgccggcggagcatccggcgcatctgccacatcgcccacatccagcagcaattactcgtcgatggcggcggtggcctcctttggatccggatacggatcgggatctggtgctggtgctcctggtgccggcgctggcccaggatccagccatgatccgctcgacgatctcaccgaacagcagcgccgtctgctccagcaatactcgatatcgccgcccagcgagacgatgatatcggccgatggcgaccagatcaccgtccatcatccgcgcgaggagcccaagaaatccagattgaaactgcgcgattttttcgtcgccgagtttggtattaccactttcaatctaagaacaacctcccctattgatcactttgtcgatgtttgatgatcatccataagtccagtgcaaaagtaaaagccatactgcagtggtcaccatgaccatgagacttcatactctaagtagcgtgctgtcctctataaccccccacccacccacgtcaccagacccctggcgcttgttctcctccgtacagccaagccaatccaatccgaaagcaatccaatcccattcagctctgttccaatcaaatgcaacccacacttatcactttagggccagctcactcgcttgtcacacggctaaaagcttgggaagcacaaagggattgcaataccgaactaatacatatctccactcaatcagcactatgtatatccctgggtacactcagcaaaacaatataaactgccactgccactgcctccataactaggcattcacgaatgtatgaacgctattgataagacattgataagctcattctcagacagttcgaatgaatctttaactcattctgcgaaagtttaaactatttttaatcaagtaatccggtttttatgtggcggtataacttacccaactaattttgtttatttgccaatgtaattgcaatatgtttgattggggtttgcaatcgatagctcaaacaatattaactggaatcccatctgcacttcactagaatagctataagtagaaacaattacatctgttttgggacagaagagtttcataatatttatgatttggtgtggggctaccgtttacttttccggaactgcaatcgcgatgtcagtgccaacgcttgaccaacgcctgccccgattaggtacatataaatatatggtactttacagatgtgtatctctatatctatgtatgtgtccgtgtgttatgcaatcactccggccaatcccccccaccccgtaaaagccacaacccgcatcgcatcgccttcatctaattgttttcacacagcgcaaaatccactatcgtcaaatgtaatgcgaaacaaattaaatgtataaaaatccgagaagaa

SEQ ID NO: 38024 - DNA, 471 bp, DROSOPHILA
atgtgcatccattcgaaagactttaaaaaacaaaaagaggccgaagagcacgcccagaagctgctaatcgctcaacaattggccgccgccggcggagcatccggcgcatctgccacatcgcccacatccagcagcaattactcgtcgatggcggcggtggcctcctttggatccggatacggatcgggatctggtgctggtgctcctggtgccggcgctggcccaggatccagccatgatccgctcgacgatctcaccgaacagcagcgccgtctgctccagcaatactcgatatcgccgcccagcgagacgatgatatcggccgatggcgaccagatcaccgtccatcatccgcgcgaggagcccaagaaatccagattgaaactgcgcgattttttcgtcgccgagtttggtattaccactttcaatctaagaacaacctcccctattgatcactttgtcgatgtttga

SEQ ID NO: 38025 - protein, 156 aa, DROSOPHILA
MCIHSKDFKKQKEAEEHAQKLLIAQQLAAAGGASGASATSPTSSSNYSSMAAVASFGSGYGSGSGAGAPGAGAGPGSSHDPLDDLTEQQRRLLQQYSISPPSETMISADGDQITVHHPREEPKKSRLKLRDFFVAEFGITTFNLRTTSPIDHFVDV

SEQ ID NO: 38026 - DNA, 2420 bp, DROSOPHILA
tggggacatgcgttttttggcacacattttcgcaaaacgattacgcatcaccgcagatgcctttgtctcttttttttatttttttttttatttcgtgtcccaaccaatttaccccacgtcttgttttcgcataactttttttgttgtctctcgttttttatatatgtatatgccccacatttgccagggacgacatcaaattgagttaatcatttaaaaaggatgttcattttgcagcgagtgaattttttcgcttttaattactttaaaatctgctggtgtttttttggcacaaccataaactaaactaatcaaacgtacattttcatttgcatgtttcacaagtacgcttacgcttaacacaacgcaaagcacaccgttagtagttttcgcttgtttatacagccatgggggcaatatacccattatttgtttaagaaaatggggaaaataagaagtgctgtcgctcgtttggccaagatatatgtatatttttgagatgcgctgcaagtaaatcacttttcaccccacgtttttctcattttcggcgcgtgacaccagcacacatcgctcacacattttcaatgtgtctcctttcgacatcactcatatcatattcaccacaacccccattgcattttatcctgctcgaaggaccacaaacgtaaagagacaactttgattaaaggaaattctctcttcccaatgcccgccaaccacatccgcagattaccgatcgtcgcgagctatcagtctacgtcctgaacgaagcctaagccagggcttcacctctctggagctggacactgtgctggaggagcgctgcagcgacgtggagcaaacgcagacggagatgttcaacgcggagtcaccgatggacaccacctcctacaagatgtccttctcttcgagctaacagttagccaaacagcagcaactggagcaggcatcgccccaggtcgagatccgagatggccaagcagatggccaggagccgggtatgaagattccgccggccaggtcgccgtcacagttggctccaccggcacagctgcgcaagacggccagtgtgcgcgatgatccagctggtctggccaagcgacggagtcgcctccaggagatccgggctgccagcagtagtgcgggtggtggtggtggtggcggcgaggcagctgccgccttcaccaagcgggaatccaagcgggatcgtcgacgtggaggaggaggaggagcaggagcagcagcagcagcagcagcaggaagtggtagcagcggcagtggatcccagtcgcccaccatgcgcaaatcgcattccctggacgccgccgagagctacacgttggccagcatccaggcgccgctctgggtgaccctcaccaatgctcgcaccatcgacgagctggcccagcaaaagatgtgaactcctccagttgcagctgcatctgcatcttcatcaaattcgttcagttatcaaaacctccgacagtgtctacagagccccgcccacttagaaatcgtgtaaatgtttagatgaatttcgaattagtcacattaacgacacaaacgagctacttgcatcaataactaaagctaaatcaatttaatgaagttaaagaccaaacagaaatagtaaaacgaagctaataataaaatgtaaaaaatttaaattcacctaaaacacaagtcttttatcttgctctaatcgatgatttcatctgaggcttttaagtactggttaatttccattacagtacgttattttttttgttttttttttggggtcataaaaaagataaacatgccccaaaagtgggggctttggatgccaccctcatcatttgtttgtcaaaaatttgaacaatttatgcgttagctaaaaatacgcgtggtatgtgcgtgactctaaatgtcttatcagcacgcatattgtgcgtgccgcttacaattcccaatcagttctggccgcccatcgaccaagtgaacgccactgggcattcgaaatttaagactatacttcacaggatcatttctgtagtcagtcttcacatactttcacactagctgaaagccaagtgcacccgcgttgatgagttgaatcgttctgtccggcagcgtgaggatttgcccagcacccttgtgggatgcactgcatccttagcggggagcggggcttcgatgatcgctcggtttgaacggatagagcgaattctgagtggtgctcccattttatacaaatgaatttgaatatgttaagcttctcgaaagtgatatataaattattccgaagtcttgtggtttcaaatatcatacatacaaaatatgatatatattcagctgattaaacaaattgtggctttaaaattcgttgactatagcgttttatgtgttcccacaatttagcatttttgcataattcatcc

SEQ ID NO: 38027 - DNA, 420 bp, DROSOPHILA
atgaagattccgccggccaggtcgccgtcacagttggctccaccggcacagctgcgcaagacggccagtgtgcgcgatgatccagctggtctggccaagcgacggagtcgcctccaggagatccgggctgccagcagtagtgcgggtggtggtggtggtggcggcgaggcagctgccgccttcaccaagcgggaatccaagcgggatcgtcgacgtggaggaggaggaggagcaggagcagcagcagcagcagcagcaggaagtggtagcagcggcagtggatcccagtcgcccaccatgcgcaaatcgcattccctggacgccgccgagagctacacgttggccagcatccaggcgccgctctgggtgaccctcaccaatgctcgcaccatcgacgagctggcccagcaaaagatgtga

SEQ ID NO: 38028 - protein, 139 aa, DROSOPHILA
MKIPPARSPSQLAPPAQLRKTASVRDDPAGLAKRRSRLQEIRAASSSAGGGGGGGEAAAAFTKRESKRDRRRGGGGGAGAAAAAAAGSGSSGSGSQSPTMRKSHSLDAAESYTLASIQAPLWVTLTNARTIDELAQQKM

SEQ ID NO: 38029 - DNA, 3074 bp, DROSOPHILA
gcggtatacgtcttcgtgtagtcactctcctggccgcccttgaagagtccagcggttagatgaatcttgccacagttaacctgtcgggcgaaatcaatggtggcatccaattggctacggaacagcttttccgagccgggcacactggtggagccgaaacgcagctgatcgtcgctcttgtcgaaggccagattcaccagactgaccaccacacccgtctcctttacggcggacaccacgtcgctcgtctcgccttcgggataggggatctctaccgcacggaatccgttctggtgggccagacgaattcgctccgcgatcgacgtcgctctttccgtgaacaaaaagttcagattcgctgcaaacttgagtgccatcttccgttcactaatctccgcctgcgttcacgcttggcaaacaactgggggggaacgatgcgattacccgttttttatattatatctaccgacttttgatactgccaatgtcatatggagcaggagcttttccgaccaaagctttgcgtgatatatgtacatacatacgtaggttttaagttatttagctggcatcagaaccattatttagaattagtatattatttaatttagttcgtcgttagttaaataaaatactagttctaacactcgtagcgttaatatttttaatattattattattatttagtattattatttaatataaaacctgtgtgaaaagcattgactccacctagcggacattaagggaaccattaaataagacgcatgttttgggtcaacattttaattttcaatttccaaaccatgaaatacaaaagcagtggagaaaatgtgaatttggtttaaagagttcaaaactgttaattttgaaaagcaggcagccttcgtcttcacatccttactccttcgaggctaccgtgtgctttgactagttcttttgagagttttgagttgacaatgagcttggccaggaattaaaaaccgacgacgtcacgatatcagtggtctctttggagcaccatgtgaatgtcctggctatcctcgtactggctatcctcgtcttcgctatccttgccgtggctatcctcgtactggcaaccctggtcacggctatccttgtactggctatccatgccgtggctatcctcgtactggctaccctggtcacggcaatccttgtactggctatccttgccgtggctatcctcgtactggctatcctggtcacggctatccttgtactggctatccatgccggggctatcctcgtactggctatcctggtcacggctatcctcgtactggctatccatgccgtggctatcctcgtactggctaccctggtcacggcaatccttgtactggctatccttgccgtggctatcctcgtactggctatcctggtcacggcaatccttgtactggctatccatgccggggctatcctcgtactggctaccctggtcacggctatcctcgtcctttttatccgtgtgctggctatcctcgtcctggttagctttgcccgtgcaaaggctactgttaatcgtcgcctggcaagtcgcaactttacctcgtatagctgtcgtcttcaccttcaccaagcgaaaacgatctttggttgtcaattttgaggatccgataccgatgttctgatggtcacgagctaccagtgcatcgtagccagcgcatttatccttagtgtgattgacattgaaaaagtgtcggaaccacacggcaaatttaaaattttctaccctgtggcccttgatcaaatcattgacctcagctggtaggcttacatttaccttattgaaggctttttgaagttccttgaaattgttaacgtactcgtattcttgattcgaaaaaaacttaactcgcttcaaattgatcagtttgggataaagcatatgcatcaaattacaataggctgcaccggtgcacaactgttcgatattgattaggttgcattggagcgtctcgttgaaccaatcgagaatatcgccacgggaccactgaaccaacgaattatgcgtgacggtcacattgtgggccctcgaagtagccatcgcaagcgaattctctatgtgtctacaagctacttaaaaatacattagcgatgtcttacttggtcattcaacaatcacttacccaaagaaagttgtacaggagcacgtatggtttgccttgttcgattagttttttcgcaagaaagttgcttttggaaaattttggaaaaatgtaaaatatcatgcagcgcgcgtaagccaaagtgaatacaaagttgaccttttcgttttaccaaaatattttgaaaatgtatattggaaatgtgtagttctgttgctttgtttttacgaaattgtatgtacaaattgtttaacaatcggggtatatattatttgtgtgttatgttcacatatcaaatgctcacattggactaaggttttgtccagtctaaagttatgacacaaatgaaaattcatttcatggcctacatgatttgaaaatttttcggcactttttcatggcctgcccatcagattttactgtctagccatgtttgttcgtaaccgtcgtattgtccttttgtccttccgtctaaacggtcaagatattacgaaatggttacatttatatatacacatttatatactaattagcatttatatatatattcaagtgaagcgtctaggtctttgactaaatttcacattcattgagattcaccaaagtcctacacattttatacatccgtttaagttgctctacgtttctctacataatttctacattcttctacgttctttcagtactttcgacgtccttcaacatcgttctatacgcgccttctatgtttttctatgttcatttaccatttattaactacattaaaataaatcaagaatattaactaaaactagtagtaaacccgtcgaattattggctattattggctacaatttaagaaagaaactaacattcaaaactaactggcaatctaataacaattcgatatgcacatatgtacatatttgccaaaaagctgaacaaggattagggaaattg

SEQ ID NO: 38030 - DNA, 1074 bp, DROSOPHILA
atggctacttcgagggcccacaatgtgaccgtcacgcataattcgttggttcagtggtcccgtggcgatattctcgattggttcaacgagacgctccaatgcaacctaatcaatatcgaacagttgtgcaccggtgcagcctattgtaatttgatgcatatgctttatcccaaactgatcaatttgaagcgagttaagtttttttcgaatcaagaatacgagtacgttaacaatttcaaggaacttcaaaaagccttcaataaggtaaatgtaagcctaccagctgaggtcaatgatttgatcaagggccacagggtagaaaattttaaatttgccgtgtggttccgacactttttcaatgtcaatcacactaaggataaatgcgctggctacgatgcactggtagctcgtgaccatcagaacatcggtatcggatcctcaaaattgacaaccaaagatcgttttcgcttggtgaaggtgaagacgacagctatacgaggtaaagttgcgacttgccaggcgacgattaacagtagcctttgcacgggcaaagctaaccaggacgaggatagccagcacacggataaaaaggacgaggatagccgtgaccagggtagccagtacgaggatagccccggcatggatagccagtacaaggattgccgtgaccaggatagccagtacgaggatagccacggcaaggatagccagtacaaggattgccgtgaccagggtagccagtacgaggatagccacggcatggatagccagtacgaggatagccgtgaccaggatagccagtacgaggatagccccggcatggatagccagtacaaggatagccgtgaccaggatagccagtacgaggatagccacggcaaggatagccagtacaaggattgccgtgaccagggtagccagtacgaggatagccacggcatggatagccagtacaaggatagccgtgaccagggttgccagtacgaggatagccacggcaaggatagcgaagacgaggatagccagtacgaggatagccaggacattcacatggtgctccaaagagaccactga

SEQ ID NO: 38031 - protein, 357 aa, DROSOPHILA
MATSRAHNVTVTHNSLVQWSRGDILDWFNETLQCNLINIEQLCTGAAYCNLMHMLYPKLINLKRVKFFSNQEYEYVNNFKELQKAFNKVNVSLPAEVNDLIKGHRVENFKFAVWFRHFFNVNHTKDKCAGYDALVARDHQNIGIGSSKLTTKDRFRLVKVKTTAIRGKVATCQATINSSLCTGKANQDEDSQHTDKKDEDSRDQGSQYEDSPGMDSQYKDCRDQDSQYEDSHGKDSQYKDCRDQGSQYEDSHGMDSQYEDSRDQDSQYEDSPGMDSQYKDSRDQDSQYEDSHGKDSQYKDCRDQGSQYEDSHGMDSQYKDSRDQGCQYEDSHGKDSEDEDSQYEDSQDIHMVLQRDH

SEQ ID NO: 38032 - DNA, 2756 bp, DROSOPHILA
tctatattccagctcccttggcagtttcggtttcaagtgccattggagctgaagctcctccggattgctcacttgatggcttggccgattcaatgtttgcgcttttgcgtggccaacaagtgcggatgggaatggtagtggatgtgggtattgagattgggattgtgagtgaaacttgggtattggcgggaggtcaagagctggtcatttgggaatcgggtttagggttctctcgagtgggcacaaccacccgctgccgttccacaaagttgcttacatcatttcgggggagcctttaaaagtcatgttcaccaacacggtgctgggctgctgggctgagtaaatccagagtaatcaacgatgtcaggggaacttcgtaaatatgtatgagttttaatgcaaatccttacatttcccaatcgggggaacttcaggtacaaggaactcaaacatttcaaggggaattatcacaagcagctgagtttttaaagttatcattttcgtggcaaaatattaacttaataaatgttgcagcattccataaagcatacacaattttaattaaaaatttgcgattattctttagttacaaatcgcatgttaaatcaagcgataaaatttaatttttgtgcaggaatttactggccttatgcggttttatttctgttatcctaatgggttagtcccttgctaaatccctggggggagaacacttagaacctttacggggggttacttctgatcgcaatcaatcgttgtttggtccaactttcgccaaccgaaacttttactcctgcccacttttatccacccatcacacacacacacacacacaaacttagtgattcattaaagcaattagaaaagtccgaaatccgtggctgagtggacaaacatttagcaacacttctcttgcatgcagccaggatttacggagcgaatgcgagaccatctaatgctcattgaaatttacgattatgctgcgaaattattaaacaatatgaccgccagaggagtcaggaattcagtgggaaaatcagccgagagccgtactaaggaatcaacagggaaattgggcagcctgcttggccgcacactggccaaagtggccaaagtggcccgctccaatcccgcccagcacgtgaccaatctgcccgtttccgcactcctgctccaggccctcgacgtggcggacgtggcccgcggacagggaatcgattatcccatcactagcaccaccgggaccaccttcaacattatcaccaccaccaccaccaccaccaccaccaccacgggcagtgacccaacggatgtgctcggcagtcagccgccggcgttctcatttcccgccaacgtcactggagcaccgggaagtgcggggaatgcgaacgcatacctgcccgcgggcaatctcagcggtttcatcgaatcctcaacaacggcggtgatgagcacactgcccatacccaccagcaccatggccacgctccaggcccaaacggtggccactttcatcgccgccaccggcagcaagaatcgcccaacgaccatcgttgtctacccaacgggtgagtccttaaaaccagttgaattttttttttttttttttaaattcaatcttgcgcaaaatgcagcaatattttgtaatcagctatcaaaaattgcagtaaaaaatatttataatttgattttgtttttttatcacccaacaggtgagttcataaattatacaacaacaattttaatcagggtctaaccaattttgcttaaaaacatactttattttgtgtgtgaaaatgttgtggggaatattatataatatacgtagaaactgagcgcatatatatatactttaattacgaaaagcaaattacgagaagttgtgaaaaacacattacttgcggcaactttggccataaataataaaagtaatttgcaaaattcacgacttttcttaaattttacatcacatttgatgccaaattctgtttcgtcgagtgagttgagcgttttattgtcgagcacaacatgcacttaaggaagtaattactgtgcatttgccgtgcatttcatgaattttcgagcaactgaaaatcaaaataacttcctgttaatgcgcaactggcgcattaaatttgcatcagcagcatgctggaatcatctttaaaagttcgacttaaattgctttaataaatcgggtggtgcaacttggtgaagcgctcttaatcatgcttggccgctctgcaaaaattaataaccatcattatgtttattgattttttatccaacatattgtgtgtatatatcccttctgtttttttttttttttcgaaatgctgcagctacttgcttttcagctgccacatcgtttttaatcaaaagaagagcccaagtgggatttgtcaccgttttggggcaacaatcaattaaccccgcgtcgcaaatgaaaggactcgaggcgtcctcctgccttaagttaattaggaacatttgccggataaagacccgtgctccgctctagtaatcaaatcaagtcgctgcagtcagtcacccatcggggtcgcgtgccagtcctgcttccatatccatggatccatcagtccgtggatccatcagtctcgtcatccttcacatccttgcgcccatccgcataccaattagtcgccccgtttgccggcgttaatttgcatgagctgacaaccgagtcctcattatccgcattgactccgatttctcctccggctggcgcgtcaact

SEQ ID NO: 38033 - DNA, 612 bp, DROSOPHILA
atgaccgccagaggagtcaggaattcagtgggaaaatcagccgagagccgtactaaggaatcaacagggaaattgggcagcctgcttggccgcacactggccaaagtggccaaagtggcccgctccaatcccgcccagcacgtgaccaatctgcccgtttccgcactcctgctccaggccctcgacgtggcggacgtggcccgcggacagggaatcgattatcccatcactagcaccaccgggaccaccttcaacattatcaccaccaccaccaccaccaccaccaccaccacgggcagtgacccaacggatgtgctcggcagtcagccgccggcgttctcatttcccgccaacgtcactggagcaccgggaagtgcggggaatgcgaacgcatacctgcccgcgggcaatctcagcggtttcatcgaatcctcaacaacggcggtgatgagcacactgcccatacccaccagcaccatggccacgctccaggcccaaacggtggccactttcatcgccgccaccggcagcaagaatcgcccaacgaccatcgttgtctacccaacgggtgagttcataaattatacaacaacaattttaatcagggtctaa

SEQ ID NO: 38034 - protein, 203 aa, DROSOPHILA
MTARGVRNSVGKSAESRTKESTGKLGSLLGRTLAKVAKVARSNPAQHVTNLPVSALLLQALDVADVARGQGIDYPITSTTGTTFNIITTTTTTTTTTTGSDPTDVLGSQPPAFSFPANVTGAPGSAGNANAYLPAGNLSGFIESSTTAVMSTLPIPTSTMATLQAQTVATFIAATGSKNRPTTIVVYPTGEFINYTTTILIRV

SEQ ID NO: 38035 - DNA, 2234 bp, DROSOPHILA
gcggcgaacgaatgcaattatttccccccacacccttttattcatccgccgtatttttcactctcttcgccttcatttcaatcggtttgttgaactttgtctatggaacaggcgaaagaaaaatcatccgactattcccgaattttccaaatcaaaaactcaaatctgaagccgctcttatcgcaccttttttttcgttccacgcttcaatcggtgaccttgaacaatgttgataaacataaaaacagagaccccaactgccgaataaagtagaaacagaaccaaacaaagtctgagtttggaatcaaaaaaaaaaaaaaaaacaaaaacacagagcatatggtacatgtatattggttagtgcttgtgtatttgtgtagaactcgttttttaaatgcgtcgtgcgtttatttgctcttctcttatacaaatatataaaaaaaattcataaaatgtataaactgtagtctttagctctaaatacaaattaaatacgtacaaaatgcttagcttaattatatcgaaaaaaacactgcttaaatgggcaacaaaaaaatgaatggaacatgtgcttagtttaggttaaataataacaacacagaaaaaaattgggctgcgtttggacctgatattaaattatcaaatgcctgcttatacatagttactttctggcctgcttttagtagaccaatggtgcatttaaatgactttaaaataatgtctgaccggttattcacattcaactgaatattattatatcgttttatgtgtaacctttaaattcagatccttttgaatagaaaaatatgagtagcagcacagaaaaaatggtttgataaaggaaacatgtgtttgtctcttgaattcaaaactgtgttcggtgatttttatgattatttcccgtttcaattggctctccaagtgcgtcctctattgaagtggctgattacaggtgatggctgattgtgtggattgatgggtcacctccatggttttggggctactccctgtcggcggggtttattggctccttgccggagttcttgcactgcaaacaatagcgataggataccggctccggtggcttgttaacccctatgttgacctgggtggccgctgctgccgctccgccgacggaatcgaatggattcggcttactgtccacgggactgatggggaagtgctgccagtgggggcagggcatctgcttgggcggatggatggggaacggcattttcgcacttctttttcttgcactggttgtggtttatagttggccaaagaagctatattttgtatatgtagcctcgatccgcttaagtctgtatctatatctgtagttgtatctgtatttgtatctctatctgcaactgcaactggagcgactgccgctctgttcggagtctcgatgcgaactgtgcggattgctagaagcgacgccgcaacgtcaacgaccaaaacaaaaaacaaaaacaagccaagcacaaagagtagaaccttctcagacgagtgaggcgaccagcaaataccctgcaatagaaaagtatatcagtatcgagtggatgatggataacaattaaattctatttgtaattttgtaagtttagttgatatataaatgttttcattactttaacctatttattatagcacgggtagtagcaagaatttaagtcgcatttttaaccgcaactccgaaaacatctggcgctatccattttatttttagaataatacatttaaaattgtttgaactttttaggatggtaaatattggcttataaacctttacccgaccacttgtgtgactttttcaaaaacctagggtatgccaacaacttggagctacaacaaccagtgccatccacggcattgccatgcagcgcgcacgcacacaccctcagctggtctggtctggcgggctcgtctagtctgctcgacaaagaagagcgaatgagagggaaaacgaccggtctgatatggtacactaaaagaaacgtcaagctactttctgatttatatgccgaaaaatcacttttaatgcgaggtggccactggcatggtaaactatgtcggcaaagtcaaagctacagttttaaatccataaaatggtaaaatctttccctctgagagagatcctgttatatttctttgggtgtactctctcgcatgcttgttctcgcatttttttggaagtgggcggtgggtggcgaatgcaatcgccagttggcact

SEQ ID NO: 38036 - DNA, 234 bp, DROSOPHILA
atgccgttccccatccatccgcccaagcagatgccctgcccccactggcagcacttccccatcagtcccgtggacagtaagccgaatccattcgattccgtcggcggagcggcagcagcggccacccaggtcaacataggggttaacaagccaccggagccggtatcctatcgctattgtttgcagtgcaagaactccggcaaggagccaataaaccccgccgacagggagtag

SEQ ID NO: 38037 - protein, 77 aa, DROSOPHILA
MPFPIHPPKQMPCPHWQHFPISPVDSKPNPFDSVGGAAAAATQVNIGVNKPPEPVSYRYCLQCKNSGKEPINPADRE

SEQ ID NO: 38038 - DNA, 2249 bp, DROSOPHILA
attttgattttgatttcgatttggattttggattttggtcaattcaatttgcatacacgggcgtgctgcaaagcggttgcctcacaaggcggccggcagtctgtcataaaccaaagcgaaaacctaacccaacccaacccaatccaatccaatcgaaaccaaaccaacccattccatttcacctcatccggcaatttcaaggtgaatctgaatcggaatctgttgtcaagccgaaccatctcattgatggtggctatattccatctatatgcaggtatttataaaacgagccgattattatgcaagccaccagtcgcatcttcgagccatgtaaaacgcattatgttggcccaataggccaaagatgttgtaaaattggccaacggttcggatcagtgatatctgttggcgcattttaaatagccactaagtattacatacttacaacaataaacatatgtttatttacacaaatattcaacataatcaactgatgtgcatatatatatatatccatttagaatcatatttctactcagtttataacaattttataaaatactatcaaattgttcaaattggttatgcttttcggttaagaaacgtattaatttataccaaaaaaaaaagagattttcagtgggcagatcagattggtgggaaatcaagtaatatccaagaaatggttggctaacctgcactctgccactaatcgtgattatgatcttgtcgcggtctattatggtttgttaattgatccatgcatggaatgcatctgttgagaaactacatacatacatacataaatatctatattagtgcatctgcaatctcgaaacaagtttggctcaaatcttcagttcaatataacttttaacttatatacataaatatttaaaacgatatatttgagttttgctagtatatatttgttcgttctattcaaagtttatttcacatcaaaagtacatgtagtggtatcctttctcgtggcatccatctacttctgcttcaaccatccaccataggactgcaccagtggagcatcgtagatgggggcctgtccaacgcgcaccaccgagggcaccactggaacggactcgaccacattgacacggcgaaccaccggcacacggcggaccacaggcacactgcgcaccaccggaacggagcgaataacgggcacggaacggaccaccggaacggaggacaccggcgagtagatgacactgcactgggcgagggccatgcaggcggcgatcaggaaggcggcgatgaagaactgcagggatgttaagaatcggaaatggtcagttaaaagcaaacacaaaattgaggatagtttagattagaggatctagcaaaaaggaactaaaaatgtccacatattttattgatattatctaactatctaagtatctaactatgtaactttctatgtatctaactatctaagtatcttactatcttgctatcttgctatcaaacgatttaagaatctaactatgtaactacctaaccttctaagtatcttgcaatctaacaatctataagatttttatatacatctataatatatttatactaaattaacatttgttatacattttaaatgcaccttttgtgcacgttcataaaaagtgtataatttatttattgcaacattaaaatgtaaacaatttaggtgattttcaaattaaaagccatttttatgggcaacacattaaaaaaatttcagactgcagacgataaaaaaaaccagaacacaattaagatcactttttcttcacaaattttgctgatgcacactgttttttttttttattattactgtttttataattcaacattctacttattttcacataaaaaaaaaaacttgaaaccttgaacttgtatttgtatttgtttcgttatcgtacattcacaatttggtcagctatcctttgtttcgtatccttgcgaccttcaactcaccttcatgtttccaaactttgttctttttgagtaagttgtgcttggaggactggacaatttgtgctgatctgtcgccggttacgatgatcttatatacccgtagtgtcaagaatctgaaaagtggagcaataaaactggccaaaaagaacgtatacggatgcaaattttgtgcggggttcgtttaattgtttagatattgattttgggatgccattatcattgatatttgccagatttaccagagacgatcgaacaatgcgtgccgaagtcat

SEQ ID NO: 38039 - DNA, 249 bp, DROSOPHILA
atggccctcgcccagtgcagtgtcatctactcgccggtgtcctccgttccggtggtccgttccgtgcccgttattcgctccgttccggtggtgcgcagtgtgcctgtggtccgccgtgtgccggtggttcgccgtgtcaatgtggtcgagtccgttccagtggtgccctcggtggtgcgcgttggacaggcccccatctacgatgctccactggtgcagtcctatggtggatggttgaagcagaagtag

SEQ ID NO: 38040 - protein, 82 aa, DROSOPHILA
MALAQCSVIYSPVSSVPVVRSVPVIRSVPVVRSVPVVRRVPVVRRVNVVESVPVVPSVVRVGQAPIYDAPLVQSYGGWLKQK

SEQ ID NO: 38041 - DNA, 2345 bp, DROSOPHILA
ccggtgcatcatttttgagtgtttagtgtcattcggatatcacctgaacgccacctggcggtgaagacgcgcaccttgccgcctttatttttcgcttgttctttacgtttgcacattgacaaattttgtagtttaagtttatatcgctttttcgtgtgtgtttttgtttgtttcaagcaaaattgcattaaattattaattttaataattttattaaatatatctactacgttaataaatgtttgagtgtgttatgtttgtgtatatcggtgagtgttatcaatttgttttccgcatttttgatttcgcatgtgtttcaaatggttcttgctgttgctgtattttttttttttattttttttggatgcttaacatttttcttattgattggcagtgcaagttctgttttgcgtgtggctttcgccagttttatatttgatatcatcgaattaaggcatcgaattaattttgcacagaaagtacacacaattgaataaacttgcaacgcaaaatggtaaaaggaaaacaaagtggtattagtgggtaatggtaatcgaaatgaaagtgcggaaatcctagatggcggccagcgcagagatccttcccaaaaacccaatcaagctttttatgtaatgtgtgtttttcgatcgaatgtgcggtatatctgtgtgtttaattgatttgtttgttttgctctataagatacgacgagttatgcactatataatagcatatatatattgtgtgataccctaaaactcgatctcgcattttcattgtcctcttctttattctctgtgtgttctctgttcgcattttccagactttagccattttgtaaacactctttgtctgcaatttatttgccgcgtgtgtgtttcgttttttgtgtggtgaactcgctgcttttcctgccgctgccgccgccgccgccgctgttgctgctgttcctgttacgggtgtgcttctgattaatcagcccatccaaacggacagcccttcagtcccagccgttctccttgatcatgtgcgccagctcaatgatgaacttgccctccttgtacttttggctggactcataggcgtgctcatatttccagcccagcggcgtcttgcagcactcgcagtagatgtccgccaccgcatggaggccggtcaggagcacacgctcctccgtctggccacaggccacgttcaccaccgagttgaacagataggccggtccctgactgccctgaaacgacttcgatatgagctcgtcgtgggaggcgaggtgggcgcggcagtgaacacatgagtatgtccgattcgtggacggtagataggcctgaaacgtcttcaccatcgtgacgttgatgatatccttgactcttttgggcctctatatgcgaacgttatagactgcaaatctcctgcgattgtctgtcctaaaagtggtcctctttctgtaaacaggaagttgctaatcagtcattggttcacagcaaaacagtcactttaacttgtatgtacaaaatggtgtagggtaagccgaaatgatgttgtggtgcaagcctacatagttttcgttttaaaatgcgatgtttagtcggttcacgagtgtttcaagcatttttaaagccaattaatatattaactaatgtgaaatgtttaatgtttaatgttgggtttgaagaatgttttatatacatacatatagatagtattgtcagtgtgattgaaagcgttactagtgtttactccttaccttgtgaccaggaccacaactaaatctttcagtttcggttgctttggggctttgttaactgtgcactttggctttatccgaggcaatggggtcgtctttgggggcggattcggaaggggcgtgaccagcagcagatgcagtagcaacagcggtaaaaactgccgcgactgctgtcattgaacaatgatttctgcgtttaaagtcacttgcctcgcgcgatttttgatccgaatatatatgattttaattccgtttccaattctgattccaatcccgattccgatccccggctatatctgaattccagccaaagaatactgcaagtggaaaacaaaaggcgaaattaataatgcatgtgtttgtttgtttgtttgtttgttatatctgttatgcaaaaagctgaattcgagccaaggaaaagcagagcagagcagagcagcgcagcgaagagcagagaaacaacaaaacagaacacaacaagtgtaagagagtggcccataatataggctatatggctttggctatggctagcagatatggcaggggcctttccattattgatttccatttgcaatctccttgcctccggcgctggtaa

SEQ ID NO: 38042 - DNA, 345 bp, DROSOPHILA
atggtgaagacgtttcaggcctatctaccgtccacgaatcggacatactcatgtgttcactgccgcgcccacctcgcctcccacgacgagctcatatcgaagtcgtttcagggcagtcagggaccggcctatctgttcaactcggtggtgaacgtggcctgtggccagacggaggagcgtgtgctcctgaccggcctccatgcggtggcggacatctactgcgagtgctgcaagacgccgctgggctggaaatatgagcacgcctatgagtccagccaaaagtacaaggagggcaagttcatcattgagctggcgcacatgatcaaggagaacggctgggactga

SEQ ID NO: 38043 - protein, 114 aa, DROSOPHILA
MVKTFQAYLPSTNRTYSCVHCRAHLASHDELISKSFQGSQGPAYLFNSVVNVACGQTEERVLLTGLHAVADIYCECCKTPLGWKYEHAYESSQKYKEGKFIIELAHMIKENGWD

SEQ ID NO: 38044 - DNA, 2366 bp, DROSOPHILA
gatgaaggatggtccagccacgggtccagatgccacattcaccaccttgacaatctgcggagcgctctcgaccagcggggcactcacaatgggtgcggattcctgcaggatcttgatcaccttgacggaggagggggcgggcccagctggaggcagataagcgggtccaggagcgggtccatagccaccgccgctgccgccagagatgaccttcaccttgaagatctggggagccgcctcgtagccatagccgctgccatagctagcgccggaggagtagccaacgccgccctgctgatggatcaccttgaccacctggactgggccactgggtccatggccgccatagccgcgagcgccactaccaccgccgccgcctccgttgccaccaccgcctccgaggttaaggccgccaccaccgcctccaccgccgccaccgccgaggagtcccaggaagccagcgttggccacagcgaacagagcacacatgcaaacgaagacctggaaggatggcagagtataagaagcgatttagtttcatgtttcatgttgcatccttagaggattttaaagaatatataaagttcattaagtttttgttatgttttccaattagaaagtagagttttatcgctggtttttttttctatatctttaaaggatctttgatcttcatagactgtattttccaaatggatatactttgtattcattctttgtttaaatattttcattttcaatcttctgatattcttcagcacactttgtatttgaatattaactatcacttcttcgaaagttcgaaagaatttaaactgagctcaggatgctcttgccactttgtcacttttcaaatcagtttggataaataaaaaaaaaaaaactagaagaggatatttgccggcacaggacattgtgagcagctcaccttcatgctgactactaatccacttgatgcgatgataccaattccaaaaaaaaaaaaacgccttgagtgccgatgagcaagcgactgatgtccgatcgattggagaccaagtcttttatacgatataagccagcaagggcgaacaaaaggcgtttcattaacatttccaaactgcccatcaacgccatcatcatcatcgccacgatgatgagcagcatcatgatgatgggctttcgttttcatttcgattttcaccaaatgctgctggacgcacccaaaagtgccaatcgtcgtggttggttcttccatagccagttggattcggagctaccagctaccagctaccagctaccagctaccagctaccagctaccagtttcagtttcatcaagtcttacgctgcatttcccaaattccgaatggggatcccacaattagcatgaaaatgagacgctacgttagtgataagctcggaatggggctttcatatttcgtatttttttttttattcggcatcttatgttttatggtttaggttttcgttttcattttgattttgatttcgatttggattttggattttggtcaattcaatttgcatacacgggcgtgctgcaaagcggttgcctcacaaggcggccggcagtctgtcataaaccaaagcgaaaacctaacccaacccaacccaatccaatccaatcgaaaccaaaccaacccattccatttcacctcatccggcaatttcaaggtgaatctgaatcggaatctgttgtcaagccgaaccatctcattgatggtggctatattccatctatatgcaggtatttataaaacgagccgattattatgcaagccaccagtcgcatcttcgagccatgtaaaacgcattatgttggcccaataggccaaagatgttgtaaaattggccaacggttcggatcagtgatatctgttggcgcattttaaatagccactaagtattacatacttacaacaataaacatatgtttatttacacaaatattcaacataatcaactgatgtgcatatatatatatatccatttagaatcatatttctactcagtttataacaattttataaaatactatcaaattgttcaaattggttatgcttttcggttaagaaacgtattaatttataccaaaaaaaaaagagattttcagtgggcagatcagattggtgggaaatcaagtaatatccaagaaatggttggctaacctgcactctgccactaatcgtgattatgatcttgtcgcggtctattatggtttgttaattgatccatgcatggaatgcatctgttgagaaactacatacatacatacataaatatctatattagtgcatctgcaatctcgaaacaagtttggctcaaatcttcagttcaatataacttttaacttatatacataaa

SEQ ID NO: 38045 - DNA, 366 bp, DROSOPHILA
atgagcaagcgactgatgtccgatcgattggagaccaagtcttttatacgatataagccagcaagggcgaacaaaaggcgtttcattaacatttccaaactgcccatcaacgccatcatcatcatcgccacgatgatgagcagcatcatgatgatgggctttcgttttcatttcgattttcaccaaatgctgctggacgcacccaaaagtgccaatcgtcgtggttggttcttccatagccagttggattcggagctaccagctaccagctaccagctaccagctaccagctaccagctaccagtttcagtttcatcaagtcttacgctgcatttcccaaattccgaatggggatcccacaattag

SEQ ID NO: 38046 - protein, 121 aa, DROSOPHILA
MSKRLMSDRLETKSFIRYKPARANKRRFINISKLPINAIIIIATMMSSIMMMGFRFHFDFHQMLLDAPKSANRRGWFFHSQLDSELPATSYQLPATSYQLPVSVSSSLTLHFPNSEWGSHN

SEQ ID NO: 38047 - DNA, 8469 bp, DROSOPHILA
taaaatttccataattcgagaggcctagaaatggcaacatttggcctggtcaaattattaacttgccgggaatccgcccatcaggtgtggacaatggccaaaaaaaatgatatatatattatatacatgagaagaaatgaaagaggaagtgaagaggaaacgtttctcgaggagttgcagttcgtaatgcactgcgaaaaaaacactttaaatgttaatagatttatagaacttaactagataacttaaattagataacttaacttagatgacttaactttagataacttagttttacctcaaatcaaactttaagattgaaatatatcaaatttttggcaaatatttttgtctgtactgtccaaaaaaaggacattttactggcaatttgcgctgtcttttatcgctcgtttggcccaagcacacacacacacacactcacaacataatgccatttttattttaatcctgcatgtgcgtccttaaccccacgccaccccgcaccccgcaccagccatcaccattccaattcttttcttgagtttccccaaatgccaattcagtcaatgacagagcataaaagatccaccgcacgagtggggcaccaaagaaaaagaaaaaaaaaagcaaaagagaagaattcttgactattcaactatgagtaaaaacctattttgcccaggtcatgcatgcgaatgtacacagagatatatatctacatatatctgcatatatatccgctggaagggcgtctcaaagtggaagtcaattcaagcagcttacttttatttaagcaaaaggcaaaagaacacacattcgcaggtgtatatgttcatatataaatgtatatgtatatatatatatatatcggtatatatctgtatatatgtatatttttctttttcggaatgttcttgagatgccttggctgctgaccctttctatgttattttattgtggggtggactgtggcgtcttttctgcctacccacccatctgaatgacgagcagccgtggggcaccattctctgcactcactcatcttaccgcctgccgcattctacttgcagatttcaatttgcaagaagaggcctccattccggaggacatatttgaccagcacgacggcgacattggggatgaggacatcgagtcggcccacattcaatatgctccatctgctgcagctgccaccgacgtggaggtggagactgaggatgatgttgatgatgatgatgatgtgaggctgttggaggaggacgacgatgcatccgatgcagctgatatcgtgagtacacacatgacaatgcacttgaaaaaatatgcactatgacaattattatgtttccaatggctactgaatcaatattttgccaaaagataaaaacatgggcggcaagacttcgaaagccgcaataatcacaagttataagagatttacgtcagcggttccttttcgggcgccatcacattttcaatgaacacctatttctagttgaaatattttcaatatatacacaaattccattaggtaaacagttgaatatagtcatcgactttttttctccgccttttttatgacattttttctttttttttttagagcacatagccaaacataagcgcatacagatgcttttttagagtgcccgagcctacagtcaagtccaatccgaatgaggtcagttccattgagccaaagtggtggagggggggggggtgcattcagaaggggggtgctctataaggagtgtccattgaaatgtcgcacaatgcgagcggccaagtcaaattactttttgagctgaagaaggtgaggctaaagccacaaactttggtaaggaatgatggcacacagcttagtccgatactcgattcctgcattgaaattcacttgagcaaaaaatgagtccaaagtcgagagaaccaagagtcagcagggagggcacttgaaagcactttcgaaaccaaaataaagccagcaaaaaaaaaattgtacagagaaagctttgataaatacattttacagcttaaattcgagtttggaataaaatttgcaaaatggtaacttctcaattttcaaagaatataaaacatccagaagcactcggaattcattgcaaatgtgacacaatggtaaaaaacagtctaagaataacatttaacttaatgaaaactgacaacaaggacctttatttcacaacgtaggccgttggaaatgggaaaacaacgtttagcactttaaagtgcagtcagtattgtactagcattgcatttacaatttcctcgaatgacagtagcccggaaaaatgctgctctccactcctttaatcaacgatttgcagacacttgagtgtggagtgttgcaagcagtttgggagccaaaatgaaacttttattttattgtctagctgcagctgcacatgtgcacctaagcagttcccacttgagctcttcaaccaaaaatccttgagaggatgttccaaggaagagatttctttgatatttttgttctttttttttccatatttgtgcactgaaaacttgtcacactacttggtaaaatatgaagagcttttcgctgcttccaggtcttgggaactaattaaaaatcaattgattgctttgaaatatatgcaatatatattttaaccgattttccgctctgtgcattgcaactacttacagatacttgaatctcaaaggcccacttcaaggaatttcagtgtttacctggacgctaagaaataccaaaatagcaacaacaagaaacgttccaaggagcaaaagaagaacaatataagccaccacaactacaaattgaaaaacaataaagagaacaatcaccatcggctagccaaggaagctgctgccggaaaatcggaaatcgaaacggtccttggtggcgggaccaaattcacttccggcgacgagcagccacagctggaggatcgggagcaagtggagcatgaggaaaacgccaactttggcaggcaaagttttgcgtataaaaaattgaagaacatgcacgaacagcaaagtcaacaggacaaaaagcggggcgatgatggcgacgaggtggatttactagacggcgaatatccgccgtcccagctgtttgatgctattgaaatattaaatgaacgaaaatttaataaaccatctgcccaatcaacgggcaagtctcgaccccagctgcagaaaaaggataaagacaaagaccaaatgaagcaggagcaggtgcaggagcaggagcagcataagtccagacaggtggacgaggccattggcgatatcgaggacaatttggataatgatgaaatattgcccactaacaacggtgaggacgaagacgatggcgacgatgccgacatcgacgacgacgaggacattaagtcggccattgacaatgatgaattggccaaaaagtacccagtagccacatcaacaaccaccaaggtcccaaccactttggctacatcgaaaaccaccagccggagcagcagcagcagcaccaccaccaccacaatggcaacatccacaacagcaacatcaccatcaccatcgacaacaacaacgaaaccaagaacaccaacaccaacaattggccgcaagttgaagaggaatttctttggtctgtcccagccagaaaccagatactatggcagctatgatatcggcaggattcgtgcccagacccaggaagatgataccaccgaggagaagaaggacgagaatgtgggcgagttgcactattacgacaccagcggcggtagcagctccagaaagttggtcagttttgatccggaaaaatccgaggagaattacttaagcacctactatccgggcaaaatgaatgcaaccgaaaagaaacagcagccgacacagcaacatgcaacacgttacgtggatgacgactatgccgaacaacaaccgccggtggaaaagtctaagttggaaaatccctgggagaaatcggaggaaaagccagaggatgccgggcaactagaggatggcaaattggaatctgatttggaatctgcattgcagcaatatcacgagggtaagtcgtttgcacataaaactgtgaaataagcaacaaaaataaaattaaagaccaaattgaaatgaatgcgacattaaaagggcacagtgggaagtgaatggggtaaaagaggttaaaaaaaagtaaaaaaatataacaaagtatgaaaccaagtgagaaatcattagatatttataatatattaaattctcagaaaattctacaaaaatatacacatttccgacaggctttttaccactgtgcagcattccattgccctttgattggcgaactaagcaaaatgccttgctcaatggaaattttccaaccccacaaaagcatccgaattcgacccactgtaccgcattccacaccgagttcggtttcgcctggcagttttaggttttcggaccccagttagagatcccatcaaagtcagctatgtgaatgtgtgtgcatgtatgccgtaaattgaaaatatgtaaaggaaatccccaaagcattctgcattctgcagacgaagaccctcagacacggagatatgtgcaaacatatatggacatacaaatacgataagtcaaactgttggcagcagaatcactttaattccaatgcaaatacatacatacaatacaaatactcgactttaagagccaaaaatgtacaaatttttagattctcctaataagtttagttaaagttaagccaaaaaccataatgtatgcaaattttctttcaattttttttttcccagaaaagaaatcaaacgaaagaaagtttttgctttcccttaaggggggggggggttggggaatgctcacacctctcgcccctctgccatttcctggcattaaacaataaagcttacaaaataacaaatatcctagatgtatatacgaatgtatactatagctgaaaacggaagcaacaaaatctgtccagaagattggccaagaaatgaagttctgcgaaggcggcgatggcgatggcagacgtgccctgactagaagaaggaaatgctcaaaatgcccgggttgatacgagagtttcaccataaattcgttggttattccttgggagttcttcatgcctccctcgctggcacaaatcaagttgaaatgaatttgtgtgtggttgcttgagggtagagagattgctgaagcggcggtcctggggattttgtgtggtttgtaaggatttcagaacaaacagtgagctgggtcaaacgagaaataagggcgagataagcagcaaatgccttgaataccctggaatagaattttcatacccaaagaatctaagagctatttattcgaaagtgcagttatgggtaagggggagtttttgcatattattcatatgcaatccaaacttatcacaatttgatatgcattttcgatgtgcagtttttaaagatattttcttatgtttgtcaaactcattgcgtatttcatgctacccttttgcctatttgcagggcattggataaaagaagctcttgttgtccgttggcctaatagaaatctattacttccgagccctaaaaagcgtgccgagactaacaaagatttttttctttatttttttattttgctacacagccagcacgaccacgcccactgtcaccgccagcccctcgtcggcatttgaacgcttcaaggcgctgcgaaggagtcgccagcgaactgggcacaagagtcacaagaagcggtacaaggactatctgaagaggcagcatccgaagatggaggtgacatctccgccagaaatcgctccagcggccaccatctcaaccaggcatctccaaaagctgcagaaggagcgggaaagatccacacactctgcaccgatctttgcgatcggattgcgacctcaacgacctttggtggccaccgggaaacccttctacgagggtcaggtgaactactacgacaatcagcagcagctggatgtggatctgaagcatcacacagaaatggagcgtttgattgcccatgacaatggcaattggtatcgccgtatcagtccggttttgcgaaatggcgttaaaagtgatccgccggtaaaggatcaccaccatcatcaccatcatagtggccaacatctgggcaatcaccatcatcacagccaccatcatggttacaatcacaatggggcgcacaaccaccatcatcacagtcacagccaccagaagttaggtcatctgaaatcacgtcctcgtaatccctatcagcggaagacttctgtgggaatgggtgcccccagtgccccaccgccaccgcccacaccaccgttgccaccaccgaaaactcaacttggtcatcaaataaccgaactggaacatctcgagagatactatgccaaatggccccatctagccagggtgcagttccaggtctacgacgagcactatcgcgaaacgcatcccgaactctatagcgactatgaggatgactatgagagtgctgcggaactggaggaggcgcaacaggagcgtggtgaagaggccaatctgccaccgtatatcaagaagtataatcggcgaaacaagcaattactcaatctactggagggcacgctacccacaccaactctgagtcctggaaatcctctgggcagcaccgaaactgtgcgactggacgatgagtatctgaaggaaaagaggcgacgttaccaccaacatcagcgtttcgaggatttatttgcccagcaaaagagcagatatagtacaacacaatcgacgcccaaagaggaggttaccgtggccaaggagcagcagccatcaatcgcagtgactacaacaacattgcccaacaatcagttgcccgaggaagatgcaaccgttgtctctggcgaggaaacagatccggcacccgaaactctggacttttggcagcgggaaatggccagtaaggcgggaaagacgcgaaacaatcaaccggtaggttcagcctcaacaactacgccgaaaccagcgctcttcaagttaccatcgtatccagccatcgccggcagctttctgggcacaccgcgcagtcgcagccggagtgcccagttcgtggcgaatgtggcgggcaggggtcaaagtagttggccacgtttggagacgggtaataccacggaaaagcccgctggcggaggaaccaccgaagtaggagcagccggaacagccggtcgagggacaggtggcggaggaggtggtggaagaggagatccatccccactgaactcctttgtttaccatcgcgtggtagatggcattggtgtgggcggagctggtggacccgccatttccggcttcgtcggcagcagtagaggtaaacagtcgcgtctgccattcgtggccatcacggatcgacggctggagaaatcgctggcggagcgacacaaagactttgagcagaatcactttccgatgccttaagccgcgaatttgtgcagcaatggaaaagctggaaaagctgaagattaagatgaatggtaatggaaaatttaacgatgagttggtagcaacgaatggaaagggaaattaacggcaaactaaaatacaaaactagaatacaaaaactccttaggcaaagagcttttaaataattaatatcagtataaatcacaactagttctttttgaatattttcggtcaaattgagaatttagcaaattgaaagtaaaaaattaagttgaaaacttccgcgactgatattataaaaataaggtttttgtttcgtttcaaccaaaataaaagtaaattgaataggaaatctctttcgaatttcagttttcgagccactaatcaaggcgttcctccccttaaataaaaatgcgattgaaaaatgtaaattcccctttccagacttgttaccaactcaaaatctaagcataattctagaactatattatagtcgccgctttcggatgtattatttttggtgttttatgttttacacgggaaaggcagaatcgaatcaaaggatatatagagataattgtcgaaaacgattttttttgtgtggtgaatatatataaaaaaaaaacattaaacgataaacgttagaaaaagaaaacgattaaataaagtaaaaaaaaaaaatgtaaaactaaagttaagcgaaacccctttttttctgtataaatagcgaaaacacttgtagacaaacacgtacacatacataaacacgaatacacacacacacacagacacactcaaagagctgttagaaatcaaaaagtgataaccgacaaaaatataatcattttcaccttagtttcgattggatattatttagttttagaaagcattgcttttcggtgtaaagtagctgaaaattagaagaaattgttagcaaagagcctcttcaacaagatgaaaagatgaaataattagagaattcagaaaacaaaagttgaaaaaagttattattata

SEQ ID NO: 38048 - DNA, 3486 bp, DROSOPHILA
atgacgagcagccgtggggcaccattctctgcactcactcatcttaccgcctgccgcattctacttgcagatttcaatttgcaagaagaggcctccattccggaggacatatttgaccagcacgacggcgacattggggatgaggacatcgagtcggcccacattcaatatgctccatctgctgcagctgccaccgacgtggaggtggagactgaggatgatgttgatgatgatgatgatgtgaggctgttggaggaggacgacgatgcatccgatgcagctgatatcatacttgaatctcaaaggcccacttcaaggaatttcagtgtttacctggacgctaagaaataccaaaatagcaacaacaagaaacgttccaaggagcaaaagaagaacaatataagccaccacaactacaaattgaaaaacaataaagagaacaatcaccatcggctagccaaggaagctgctgccggaaaatcggaaatcgaaacggtccttggtggcgggaccaaattcacttccggcgacgagcagccacagctggaggatcgggagcaagtggagcatgaggaaaacgccaactttggcaggcaaagttttgcgtataaaaaattgaagaacatgcacgaacagcaaagtcaacaggacaaaaagcggggcgatgatggcgacgaggtggatttactagacggcgaatatccgccgtcccagctgtttgatgctattgaaatattaaatgaacgaaaatttaataaaccatctgcccaatcaacgggcaagtctcgaccccagctgcagaaaaaggataaagacaaagaccaaatgaagcaggagcaggtgcaggagcaggagcagcataagtccagacaggtggacgaggccattggcgatatcgaggacaatttggataatgatgaaatattgcccactaacaacggtgaggacgaagacgatggcgacgatgccgacatcgacgacgacgaggacattaagtcggccattgacaatgatgaattggccaaaaagtacccagtagccacatcaacaaccaccaaggtcccaaccactttggctacatcgaaaaccaccagccggagcagcagcagcagcaccaccaccaccacaatggcaacatccacaacagcaacatcaccatcaccatcgacaacaacaacgaaaccaagaacaccaacaccaacaattggccgcaagttgaagaggaatttctttggtctgtcccagccagaaaccagatactatggcagctatgatatcggcaggattcgtgcccagacccaggaagatgataccaccgaggagaagaaggacgagaatgtgggcgagttgcactattacgacaccagcggcggtagcagctccagaaagttggtcagttttgatccggaaaaatccgaggagaattacttaagcacctactatccgggcaaaatgaatgcaaccgaaaagaaacagcagccgacacagcaacatgcaacacgttacgtggatgacgactatgccgaacaacaaccgccggtggaaaagtctaagttggaaaatccctgggagaaatcggaggaaaagccagaggatgccgggcaactagaggatggcaaattggaatctgatttggaatctgcattgcagcaatatcacgaggccagcacgaccacgcccactgtcaccgccagcccctcgtcggcatttgaacgcttcaaggcgctgcgaaggagtcgccagcgaactgggcacaagagtcacaagaagcggtacaaggactatctgaagaggcagcatccgaagatggaggtgacatctccgccagaaatcgctccagcggccaccatctcaaccaggcatctccaaaagctgcagaaggagcgggaaagatccacacactctgcaccgatctttgcgatcggattgcgacctcaacgacctttggtggccaccgggaaacccttctacgagggtcaggtgaactactacgacaatcagcagcagctggatgtggatctgaagcatcacacagaaatggagcgtttgattgcccatgacaatggcaattggtatcgccgtatcagtccggttttgcgaaatggcgttaaaagtgatccgccggtaaaggatcaccaccatcatcaccatcatagtggccaacatctgggcaatcaccatcatcacagccaccatcatggttacaatcacaatggggcgcacaaccaccatcatcacagtcacagccaccagaagttaggtcatctgaaatcacgtcctcgtaatccctatcagcggaagacttctgtgggaatgggtgcccccagtgccccaccgccaccgcccacaccaccgttgccaccaccgaaaactcaacttggtcatcaaataaccgaactggaacatctcgagagatactatgccaaatggccccatctagccagggtgcagttccaggtctacgacgagcactatcgcgaaacgcatcccgaactctatagcgactatgaggatgactatgagagtgctgcggaactggaggaggcgcaacaggagcgtggtgaagaggccaatctgccaccgtatatcaagaagtataatcggcgaaacaagcaattactcaatctactggagggcacgctacccacaccaactctgagtcctggaaatcctctgggcagcaccgaaactgtgcgactggacgatgagtatctgaaggaaaagaggcgacgttaccaccaacatcagcgtttcgaggatttatttgcccagcaaaagagcagatatagtacaacacaatcgacgcccaaagaggaggttaccgtggccaaggagcagcagccatcaatcgcagtgactacaacaacattgcccaacaatcagttgcccgaggaagatgcaaccgttgtctctggcgaggaaacagatccggcacccgaaactctggacttttggcagcgggaaatggccagtaaggcgggaaagacgcgaaacaatcaaccggtaggttcagcctcaacaactacgccgaaaccagcgctcttcaagttaccatcgtatccagccatcgccggcagctttctgggcacaccgcgcagtcgcagccggagtgcccagttcgtggcgaatgtggcgggcaggggtcaaagtagttggccacgtttggagacgggtaataccacggaaaagcccgctggcggaggaaccaccgaagtaggagcagccggaacagccggtcgagggacaggtggcggaggaggtggtggaagaggagatccatccccactgaactcctttgtttaccatcgcgtggtagatggcattggtgtgggcggagctggtggacccgccatttccggcttcgtcggcagcagtagaggtaaacagtcgcgtctgccattcgtggccatcacggatcgacggctggagaaatcgctggcggagcgacacaaagactttgagcagaatcactttccgatgccttaa

SEQ ID NO: 38049 - protein, 1161 aa, DROSOPHILA
MTSSRGAPFSALTHLTACRILLADFNLQEEASIPEDIFDQHDGDIGDEDIESAHIQYAPSAAAATDVEVETEDDVDDDDDVRLLEEDDDASDAADIILESQRPTSRNFSVYLDAKKYQNSNNKKRSKEQKKNNISHHNYKLKNNKENNHHRLAKEAAAGKSEIETVLGGGTKFTSGDEQPQLEDREQVEHEENANFGRQSFAYKKLKNMHEQQSQQDKKRGDDGDEVDLLDGEYPPSQLFDAIEILNERKFNKPSAQSTGKSRPQLQKKDKDKDQMKQEQVQEQEQHKSRQVDEAIGDIEDNLDNDEILPTNNGEDEDDGDDADIDDDEDIKSAIDNDELAKKYPVATSTTTKVPTTLATSKTTSRSSSSSTTTTTMATSTTATSPSPSTTTTKPRTPTPTIGRKLKRNFFGLSQPETRYYGSYDIGRIRAQTQEDDTTEEKKDENVGELHYYDTSGGSSSRKLVSFDPEKSEENYLSTYYPGKMNATEKKQQPTQQHATRYVDDDYAEQQPPVEKSKLENPWEKSEEKPEDAGQLEDGKLESDLESALQQYHEASTTTPTVTASPSSAFERFKALRRSRQRTGHKSHKKRYKDYLKRQHPKMEVTSPPEIAPAATISTRHLQKLQKERERSTHSAPIFAIGLRPQRPLVATGKPFYEGQVNYYDNQQQLDVDLKHHTEMERLIAHDNGNWYRRISPVLRNGVKSDPPVKDHHHHHHHSGQHLGNHHHHSHHHGYNHNGAHNHHHHSHSHQKLGHLKSRPRNPYQRKTSVGMGAPSAPPPPPTPPLPPPKTQLGHQITELEHLERYYAKWPHLARVQFQVYDEHYRETHPELYSDYEDDYESAAELEEAQQERGEEANLPPYIKKYNRRNKQLLNLLEGTLPTPTLSPGNPLGSTETVRLDDEYLKEKRRRYHQHQRFEDLFAQQKSRYSTTQSTPKEEVTVAKEQQPSIAVTTTTLPNNQLPEEDATVVSGEETDPAPETLDFWQREMASKAGKTRNNQPVGSASTTTPKPALFKLPSYPAIAGSFLGTPRSRSRSAQFVANVAGRGQSSWPRLETGNTTEKPAGGGTTEVGAAGTAGRGTGGGGGGGRGDPSPLNSFVYHRVVDGIGVGGAGGPAISGFVGSSRGKQSRLPFVAITDRRLEKSLAERHKDFEQNHFPMP

SEQ ID NO: 38050 - DNA, 2282 bp, DROSOPHILA
ttgttcgcttaccaattttcagcatggaaattatttggaaaatcttcaattgaaatgtagagcttcaagtgaagttcattgttcattaagttatcatgaacacgaaaatgttcggatatttggccagttcaaaaaccatttaatattgaagtgttcagctcgaggggattccattttgtttgcatatgacgatggattcatattgatgtgtttattctatgaccagaattatatatttaaaagttggcaaaataataaacaagtacgaaaattgtttaggtcgcaaggagttgaaacttggatatatttttgtatttgtatttccatttccctaatattatcaaacttgaacgtgtaacctaggaatatgtttaaatgtgattttgcttaagttaatcaaagaaattaagctaaatgaatttcaaatgttttccatcaaagtaaattattgaattccataattctgctactgggaaaatcaaagaaaattcaattacaaagtgaaatgaattttcttgattcaaatctattcattgatctataaataacgttaaaatcagcacaaaacatctttattaatttaatttagttacctttgtcctttgtgtatttagtgtgtaataactgcctttgcaataccacaatttccaattgaaaataattgctaaatgctcccttgctgcttagatatacaaagtgcttgattcaattatccacacaccgctgccattatagccgatttccccgcacactcatgaccaagttttccaatcaaattaaatatacttgcggctaaaagctcgaaactggcactcaattgttttgtgactacttagagcactcaaattgcttttctggctgcatctctaactctctggtgagaattggcaggctaatttccattttccaactgcgacagcggaagccaaagtgattgagtcatcggtcgattgttgaatttcaagagtggtcagtccaccatcagataaaggataaagaatcatccccaacaaaaggatccatacaaacactcaccattcacataggcggcaaagtcaaaatccttgtccggtcgcgctccgtcatcatcttcaatctccgatggctgctgatggcgttgctgttgcagatcctttcccgctttcggcgcggaaatggcgtcatttccggctgccagggttaccaacgctagacccatcagacccaaaatcagtgccgccaatgacattgtcttggagcatttgggcctgcgatttttgtagcggcggctttgcgccgccatgccgcccactaattgcacgcacacggaagcggaaataacacgcggttcgcccggggggaatactgtacttgaacagcaggctgcaggatatggtatataggatacaggacctccttaccccagcgacaacaactgcgagaaagcactgccaaaaaaaaaaaaaaacacaaaaacaccacacacaatcgaaaccggcaaagtcttcgtatgttgcgagttctgttgtgcttcaattcagttcagttcagttcttactacgcgtagttcgcaagccggccacgaaggatattctcggttttttcggttaacgattctagccgatgtcggttgttgccgcaaggacctgctgcctggccaacgtgcgaggcgcaattgagccaccaaatgcgctgccatacgctcatatagccttgtcagtcgacagttgccaacttgcaacatgccgcacatgccgtcaggagccgaacttctgttttggtgaatgggtctggcaatcggcgaaatccgagtcctattacgagttcaacttcgagtcctgtgtgtcgcccgacgcctgcgcctttcgccaaatctgaaatcacaaaaggggggcgcgcaaaaggtgcgcggcagttgcagttgccagaagtcagttgcagttcatttgcttggctacgtgacgcaagtttttcgagcgtggcgagggggggtgtgggcttccctcgaaaataggcagtgggaaatgggacgacttgcgcggcaaaaacgggataatggataatggttaatggccattggcaaatcgaaattgcattgccccgccgttgggttggtgtttttcaaaatcagttttagtggacagaatcggcaactgttgctgcacgattgcgctaccgatcaattgatgttgcctgttggtttgctagtcgaatttgtaacttaaattagagtataataagtagttgatttgatacatttaacaagtaatagaaagctcaataaaatgaaattagaacaatat

SEQ ID NO: 38051 - DNA, 282 bp, DROSOPHILA
atggcggcgcaaagccgccgctacaaaaatcgcaggcccaaatgctccaagacaatgtcattggcggcactgattttgggtctgatgggtctagcgttggtaaccctggcagccggaaatgacgccatttccgcgccgaaagcgggaaaggatctgcaacagcaacgccatcagcagccatcggagattgaagatgatgacggagcgcgaccggacaaggattttgactttgccgcctatgtgaatggtgagtgtttgtatggatccttttgttggggatga

SEQ ID NO: 38052 - protein, 93 aa, DROSOPHILA
MAAQSRRYKNRRPKCSKTMSLAALILGLMGLALVTLAAGNDAISAPKAGKDLQQQRHQQPSEIEDDDGARPDKDFDFAAYVNGECLYGSFCWG

SEQ ID NO: 38053 - DNA, 2956 bp, DROSOPHILA
gttgtttttgattatcattgtttgttacgacagcaacggcgccagcatcagcagtagcaataataaactgatgcgtggacaaagcggcgtatacttgatgcgattgagttttagcttccacattattccaccagctcggccataatgctcttttggtcattattgttgttggcggcaccgtgaaccgactaattgtcgagctctgtccttttgtttctcggccccgcagctgtggcctagtcaatccatccatccatagctgggctttcagtaacggtttttggcccattcgtcgaaggccatgttgcgctgaaggctgcaacgtacgaggcgctaattgaatttgctgccaccgctggccaattgcagtaccaaaaattgaacaaagccgcgcaaagcactgaaataggcagaaacctcgaaaacaaaaaagcgcaactggaggccaaacaactgcggatggttcaaattctggggacactcttctcgatttcgggtatataagttcttggcaaaagattgcatttgcccttttgcccaattacataatagtttcttagacatatttataattttattgttatatttaagtaattgtatctaaattgaatactctcttcttttttttgcagggtatcaaataacgaacagcatccacaacaaccagcactcgttggcaggatgtgcgaaacggagtgatgatgaggcaatttgtttaggccagttatgcatcatttgggcgacagggcagttcagtacagagcatggcaatggtaatcggtgtatggtgtccgatgttgaaaggattgtggattgtggattgcggattgaggacgaaggacgatgggcttaggtaggcaattcgatttgacggcgcacaatttccggtcgcgcccggcactgcgttactcattacaagcgaataagcgccaagtccttgcggtcagaagcgcgtgccgccccactcagctttattcgcacacacggaaaactttcacaattagcggccggattccggctgcgatcctgcaggatatttccggactaccgccgccggcagcagcagcagcagcagctcctcggataatgtgcgcccagaaagatctcgcaggcggagcagtaatgattcgttgtccggcagccattccatagatacggaaacaggcaagcgcagcagcaccaactgaaaacaaaaacatagatacatatatacggatatgagtatatcaaagttcgaggtatgtaaatcgaaagttactttatctatttccattatttcatacgatttttgaaagtttactcatcattttgttcatatttagtgttaagtacttgaaacttagcacttctgaagctaacaacgttttgggttaaaagttagttaaaattttcaaactaatttaaatacccaactcacccaaaagtgcacaagcagagggcccaaaggttagtccgagcattaggtgacctcttcaaacgggtgactccccgttgaccacaagctgggcacacgatgtccatcgcctggctacccagtttgggttgcgggcttaggataaagaaatctggccaatacacaatttcaaaatatgcaatcgaatgagtgttcagttcatagttaccatcgcacttacttctcactggtggcattgcacgatgatcgatgctattgttgtccgctaatccttccgattgtacgctcacctcgtctttcgtttgggacatcggcatcggcatcggcatttcctccaccctggaccttagatgttggggttctgcaaaaagggttcttcgccgatcgttggaataatccaaattattctgaatcgtaaacgtttgcattgcatcatagtaggtcggcggttccgatggcgacaaggacatgggtcgctctatctgcagatcctggccgggatcctggtcttggaacaacatgcgatgcttctcttcggccattccaaacccttctgttgggccagtttcgccctacgatggtttttattccttggcaaaaaagaaacaaccagccaaaaacagttgtcgatgatagtgaaacattctgggccaattaaccagctgctagcgatatcaacgagtcaccccaatagaaaactccacagttggtcaaaaagtgcttgaaatggaaatggtctagctgaatcacctttatttcatcgtcgttggagaatattgtcagcttccgtttcatttcctgttcataacttttgcaatatgtgctgctgaccgcttgcactggcaacacaaattttcaaatgctcaaaaatacacgtaaatatttttacaaaaatttcttaaaattatttgaagtgtataaatatctctttaaaacgagttgcatagaatgttatgaatcaaaatcttatagtgttgctatttctcgcatagagttttccacaatgtattcctgtttgcgtattcatttttgtttttctgttttccttcaagttttttcaatattttccaacgacacgatgaggatggaaaaatgtgaatgaaattctgtttgccactttgcatttaattaactttatcgcatgcatgtaaatagtatacaggcgcaaataaactaaacaggtatacggcaaattataatgaaaactttcatttgcatacggataactgacatatctggattaggtaaaaaaatatacctttagtttatccaaaaaaaaaaaaggaacgttcttctttacattgcttaaactaacatttatcgttgtccgttaaatgcctgaactttcctgatattaaatttgcctgttttttttttaaggtcttaaattttatttatgaattccagggtgtgccaacctttgatttgcttactcctgctgttgttgttccgccatctgccattcaaatgggaatcgggtttttttgggatcggggcactgagagctgtcgctgcataaatttgcagtccatttcaagttgg

SEQ ID NO: 38054 - DNA, 498 bp, DROSOPHILA
atggccgaagagaagcatcgcatgttgttccaagaccaggatcccggccaggatctgcagatagagcgacccatgtccttgtcgccatcggaaccgccgacctactatgatgcaatgcaaacgtttacgattcagaataatttggattattccaacgatcggcgaagaaccctttttgcagaaccccaacatctaaggtccagggtggaggaaatgccgatgccgatgccgatgtcccaaacgaaagacgaggtgagcgtacaatcggaaggattagcggacaacaatagcatcgatcatcgtgcaatgccaccattggtgctgctgcgcttgcctgtttccgtatctatggaatggctgccggacaacgaatcattactgctccgcctgcgagatctttctgggcgcacattatccgaggagctgctgctgctgctgctgccggcggcggtagtccggaaatatcctgcaggatcgcagccggaatccggccgctaa

SEQ ID NO: 38055 - protein, 165 aa, DROSOPHILA
MAEEKHRMLFQDQDPGQDLQIERPMSLSPSEPPTYYDAMQTFTIQNNLDYSNDRRRTLFAEPQHLRSRVEEMPMPMPMSQTKDEVSVQSEGLADNNSIDHRAMPPLVLLRLPVSVSMEWLPDNESLLLRLRDLSGRTLSEELLLLLLPAAVVRKYPAGSQPESGR

SEQ ID NO: 38056 - DNA, 2653 bp, DROSOPHILA
gcaattgataaggttttggaatcaaacacatctgaattcgtccgctttgcaatatccgattctaatgttgtccgcaatatgctatgttaaacaataaagcactcttttataatttatctattgtccgattaatgtattgcgtgcaataaatgtctttgagatgaaatagccgtcatttgttgatataatgcatatatacatattggcaaaaagcaatgatttgaaatgatttaccaatttagtatttagtatatagttgattcattgtccgctgaactatgcaattagctatttccgtttcccaaatcaagccgacattatccaacttaattaagattaattaagtacttaagcattttcttacgttgatgcctttttttattatatttttaagcaatgttgcttgcgtattctaagtttagagccaaaactatatgaatctttcattgctgacctgcaattttgagggcagtgggacatgtacatagatagtgcacctgccccattgtccactgccacgcccccttatcttaacttaagcaaacaactattttagtcaaatttcatccgaagtaaaagttcaagtgtttttcttttggtttttaaacattaaaaacctgaaaaaaaataatatacatacaatatcaaaaatataaaaataaaccacacaaattgccgccaactaataaatcaaccaacgtaaacgtaaccattgtatactaaaatcgccaatggtgtgtcccacctaccaccttccatcactttaaaaaaaaaaaaaaacaaaaaacaaacaaacaaaaactaaaggccggagcagcaacaattccatgaccgcctgaaccacaatgatgccatatatcgaccgttgaaggtattcgactattccaataacccaactgccgccaaggtgatcgattatggccacaagtcgggcgatggcaaccccatcgatgggccatccggttccaatcccgacgatagaattccagaatttaaagcaatgaagaccttcgagtatggccactcctcgtacatgggatcgaatcgcttgggaatgcccggtggaatgggaggaggaggagatcacaaccaggcgatgacaggtggccgtggaatggcagcgggaccaggtagatttggtggacccggaggagctgggaacaagcgtaagaataagaaaaaaaacaaacaacaaaagaacggggagctaatgacgttcaatcaaaaccaacaaatgcaatcgaatacggttgaagaacgtagcatcacaaatcccgaacaggacgaagaggtaagtggttagcacagtacaagcctctatctatcttggtatctaatcctaatctttgaatataacccagcagcgggcccacaatgaattgcgaaaccagaaccaggccgatgagtttcagaaaaatgaagaacgcaatgatctcgaagatatttccgaaggtgaagagtaagttgaagatattaatgccttttctttttagtgctagctgtttacaatgattccattttttttgtttgttttatcagtaatctacaatctattgttttcgatgatgacaacgaagagctgccaccgccgccatcgatgaaaatatggaatcagggaaatgcccaggagcagtacaatcccttccctgtcaatccgctgcgtcgccagttgggtgactattcggataagctggaggctccatcgccagccatgtcactttttccctcggcagccaatgccaatgatagaacatctgacccaatgaaggcttccaatctggagatgtgcgtggcgaccagtgagaatcgcaatacgttctcattggacgaagtgcttttgtatcccggtcgcttaaaccgccccaagcgcatctgtattattttgcgcggtcctcctggctgcggcaaatcgcatgtagcccgcctcatcaaggagaaggaactggagatgggcggtgccaatccgcgcattctaagcatcgatgattattttctcattgaaaacgactacgatgagaagtgccccaaaacgggcaagaaggtgagaagaagtgtagttaagtgttaggttataagttttactatattccattgtttaccatctgcagatacctaaaaaagaaattttgtacgagtatgatgataccatggaggagacatatatgcagtaccttatcaaatcgtttaaaaagacacttagcgacaatctgtacgatttcgtgatcgtggattgcaacaataattcgctgcgcacactgaatgaattttattgccacgccaaagactcgaattttgtggtgggtccatggtcaacgaatcgatgctttttgtgggaatgtttacatatatgttctttctactcacaatagccctacatagtggacctacactgcgatctagagacgtgccttggtagaaactctcaccagcgcagcgtgaacgatatccgtgtggtgctggataactggtgccaaacaccgacgcattacatcaaactggacgtgagctcgctcctcgaaaacgttgtcgagatggaagatgttgaggacatggctacggtaactatgcactaagcggtgcgacgctaaggtggctgctactgtgtcgccgccaagcaggagatggtgaagctcttggactggccgatggggcc

SEQ ID NO: 38057 - DNA, 1281 bp, DROSOPHILA
atgaagaccttcgagtatggccactcctcgtacatgggatcgaatcgcttgggaatgcccggtggaatgggaggaggaggagatcacaaccaggcgatgacaggtggccgtggaatggcagcgggaccaggtagatttggtggacccggaggagctgggaacaagcgtaagaataagaaaaaaaacaaacaacaaaagaacggggagctaatgacgttcaatcaaaaccaacaaatgcaatcgaatacggttgaagaacgtagcatcacaaatcccgaacaggacgaagagcgggcccacaatgaattgcgaaaccagaaccaggccgatgagtttcagaaaaatgaagaacgcaatgatctcgaagatatttccgaaggtgaagataatctacaatctattgttttcgatgatgacaacgaagagctgccaccgccgccatcgatgaaaatatggaatcagggaaatgcccaggagcagtacaatcccttccctgtcaatccgctgcgtcgccagttgggtgactattcggataagctggaggctccatcgccagccatgtcactttttccctcggcagccaatgccaatgatagaacatctgacccaatgaaggcttccaatctggagatgtgcgtggcgaccagtgagaatcgcaatacgttctcattggacgaagtgcttttgtatcccggtcgcttaaaccgccccaagcgcatctgtattattttgcgcggtcctcctggctgcggcaaatcgcatgtagcccgcctcatcaaggagaaggaactggagatgggcggtgccaatccgcgcattctaagcatcgatgattattttctcattgaaaacgactacgatgagaagtgccccaaaacgggcaagaagatacctaaaaaagaaattttgtacgagtatgatgataccatggaggagacatatatgcagtaccttatcaaatcgtttaaaaagacacttagcgacaatctgtacgatttcgtgatcgtggattgcaacaataattcgctgcgcacactgaatgaattttattgccacgccaaagactcgaattttgtgccctacatagtggacctacactgcgatctagagacgtgccttggtagaaactctcaccagcgcagcgtgaacgatatccgtgtggtgctggataactggtgccaaacaccgacgcattacatcaaactggacgtgagctcgctcctcgaaaacgttgtcgagatggaagatgttgaggacatggctacggtaactatgcactaa

SEQ ID NO: 38058 - protein, 426 aa, DROSOPHILA
MKTFEYGHSSYMGSNRLGMPGGMGGGGDHNQAMTGGRGMAAGPGRFGGPGGAGNKRKNKKKNKQQKNGELMTFNQNQQMQSNTVEERSITNPEQDEERAHNELRNQNQADEFQKNEERNDLEDISEGEDNLQSIVFDDDNEELPPPPSMKIWNQGNAQEQYNPFPVNPLRRQLGDYSDKLEAPSPAMSLFPSAANANDRTSDPMKASNLEMCVATSENRNTFSLDEVLLYPGRLNRPKRICIILRGPPGCGKSHVARLIKEKELEMGGANPRILSIDDYFLIENDYDEKCPKTGKKIPKKEILYEYDDTMEETYMQYLIKSFKKTLSDNLYDFVIVDCNNNSLRTLNEFYCHAKDSNFVPYIVDLHCDLETCLGRNSHQRSVNDIRVVLDNWCQTPTHYIKLDVSSLLENVVEMEDVEDMATVTMH

SEQ ID NO: 38059 - DNA, 2117 bp, DROSOPHILA
tcgaggagacagacgacagcaaatagcgccgacgcttccaactatgtaagtcttaattgcttattgcatcgactgattggattcattttgaggcacatgtgcatgtgtgtttggtgtttgcgtagaggaaatcaaaggggtattattaaaattattgcttatttgcttataagattggatacctatatccaatttgctgtacaaatatcttaggaaatgtgacagagctttagtaactcgacttgtaggatataggattcatatatgtatacacacgctgtgatttaccattgcttaaatacttagcatattagtttacgcttttagagtaacaagtagtcgctgttgattagtcagattgttcgcccagaattaatccagtcagtcagtgggtaacagaattaatcggaaaactggtgactaactgggttgtggtcatcgtatcggtaaacacgcctctaaaatatcctgaaattctccccttgcactctattgaatccggtccacctcatccaatcgggcgtttcggtgtgctcgcccgtacagtgcggcttcctgaaaagcaaatgggaacgcgataccaccgaggataatctaggtgagtccccaagaacttggcttcatttagagtcgctctgacaaaacgaatttcttgtttcagcccgcttggatggcaccaagcgtctgatgcagaaccgcaggaccaccagcatggcggactatctccagctggaggattggaaaccacccacaacttcggacaatggcaagaagcgagtaagtgcgtccaaaggctagctattgagcaacgaaaacttgacagagaagaggatagctatatgtattgctatctcttctggttgcaagagtataactgtttctaattcgataaacgttgctcgctcgctattttttaatcaaattgtatttactaaaacgcatattcaatatgttttaggtgcgttgggcggatatcgaggaaaagcgctcgcagaagaaaatgcgagccatcggttttgtggtgggtcaaaccgactggaaccgcatgatggatccgaatgccggcagtcgggctttgaataaaaccaagtttatcgagcgcatcaagcgtcgctagatgtcaattacaaacacgccacaaattccgaattccaaaaagctaacaaaatgaaaacaaaaactcgcagcatttccactcaccaaaaaaaaaaaaaacacagagcatttccacatacacacatcggcgccaatgggctgaaatgagccccgaattacatgtcatcatctgacatctaaatgcgatcagtataattttgaaataatcagtcattattacggctgcatttagaaaaacgaattcaattgcgttgaacgacatgaagagacgcgtttgaaaccatataagcatgtatacatacttacatgcatacatatgaatgtattttaattgtaaattgtatcaatcgctattaaaccgaataagacatccagtcatgtttttttttttttttgttaatttagtttgaggaaatataaattgtttatacgtttatttattcacataatgttgacttaaagttggcgggttcatcgaacttttgccgctgtccctgtttcctgcgtgacagctgtctctgttgctctgtaaacaaccattgacagctgttcttttgtgggtgacggggggcgtggccagcgggcgaagtgcggcagggctttgtggggatgctgcgtgtgcatcgcactcacatgcctgccaaggtgaattacagatgacggcttcgggcagagttgcacaacacgcggtgcaagtggggaagggaggttggattttcggtgggcggttggggttcaaggggttggagcgggaggagcagctccagtagtcaccaatggctcgcacccactctcaagagcacgaacccattgacagtcagtgatgattgaagtgaattaaatagctgaatgatagattgtaattctatataaataatatataaatatgaggtttgccgataaaatgtgaagtgcttgtgtataaacgtcttatgttccaaaacagtgagctaaaatggaaaaaaacatctaatcatttgtaaaaaccttttttaaaatag

SEQ ID NO: 38060 - DNA, 249 bp, DROSOPHILA
atgcagaaccgcaggaccaccagcatggcggactatctccagctggaggattggaaaccacccacaacttcggacaatggcaagaagcgagtgcgttgggcggatatcgaggaaaagcgctcgcagaagaaaatgcgagccatcggttttgtggtgggtcaaaccgactggaaccgcatgatggatccgaatgccggcagtcgggctttgaataaaaccaagtttatcgagcgcatcaagcgtcgctag

SEQ ID NO: 38061 - protein, 82 aa, DROSOPHILA
MQNRRTTSMADYLQLEDWKPPTTSDNGKKRVRWADIEEKRSQKKMRAIGFVVGQTDWNRMMDPNAGSRALNKTKFIERIKRR

SEQ ID NO: 38062 - DNA, 15424 bp, DROSOPHILA
ttttttttttgttaatttagtttgaggaaatataaattgtttatacgtttatttattcacataatgttgacttaaagttggcgggttcatcgaacttttgccgctgtccctgtttcctgcgtgacagctgtctctgttgctctgtaaacaaccattgacagctgttcttttgtgggtgacggggggcgtggccagcgggcgaagtgcggcagggctttgtggggatgctgcgtgtgcatcgcactcacatgcctgccaaggtgaattacagatgacggcttcgggcagagttgcacaacacgcggtgcaagtggggaagggaggttggattttcggtgggcggttggggttcaaggggttggagcgggaggagcagctccagtagtcaccaatggctcgcacccactctcaagagcacgaacccattgacagtcagtgatgattgaagtgaattaaatagctgaatgatagattgtaattctatataaataatatataaatatgaggtttgccgataaaatgtgaagtgcttgtgtataaacgtcttatgttccaaaacagtgagctaaaatggaaaaaaacatctaatcatttgtaaaaaccttttttaaaatagctaaaataaaaagagctgaacatatttgatacacgtattacggatgaaatgtagaaatataatgaaatataatattttagaagaataacttcgaaaaataatgttcgctatgaattcaaagttcgtataaagccttatttttaagttcaagcggatttatccaaaataaaattcagttttgagagctaaatattttctgtagcaatcttatgagcgccccgtaaggatattccttttagctattcttttgagcaactaaaatggccatatctggcgggtaaatagccgaaggccaagttctggcgggcaattttccgagtccctggcacgaagccgatttgaaagcgcttcagtttctgtttcagtcgagcgacgcaactcgaacgcaacggtacatgagtggcggttggcgagcgaacccagtgtcccgttatcaacaacaactctccaaacaccgaactgcagttgaattaagccaccaaatacttcgtgttttttttttcaagttccatagatgtagtacagtacgacagttactcaattactcaattgcaacttccaaagaattcgcgtagtgcgaaaatcgccaaaaatcagcagccgcactttgaagttacgtcaaaaggagtcgtgaaagaggaagaacgagagtgagggagagagagagaggtagcaagagagccgtaagaaaataacaacaaggcagaagcacgcgataggagtaactgtaaatgtgaggggataaaataggagaaagtagaaatcagcaaaagaacttttcgtattatttgttgttgttgctttctgtttgttgtttttggcgcgtcgtcgccgtttgcttttttgtttttattagttttatttgtttttcctttcctttattatttgtcttcgctgtgcctgtgcctttgttgttgattgctgtgcagccggctttggtcaaaagggagggggtgataaagctagcaggaagagcagccaaaggaggcttatgtaaagcgtgcttcgagcgtgctatggaagcatgtcgtccacttccagctccgtgctaacgttgtcatcgtttaatctattatttttcacccaaggtaagcacttgacactttacataactcccccattgcgggccgattgtacgtccgattgggattaatgcgtgtccagttggacagcatgggcttggggagccggaccaccgctgacccaattggagtccagtggggatgtatcaccgccagaggacataataaattgcggcttatgtgggcgaatttccgatgggcttccagggatctcgggaaattgtgaaaatttagtttaagcttgcgggatttgggtaaatttgatttatacatatgtcaagttattttgttatgcttaaaatccataaggattaattataaaaacttaacttaagttaagcattcagttattactcttatggccttaagcgaatatacaatattcataaatatgtatataaaatatattattccgaaaccaaatcctttactgtatttatattcgtaagccggctaaacatttacatttacaaacacctaaacaaaatttaacctataatgtttctctaacttaatttgtatcctgtgaatcaggacattttccaaatggtccatttcggttgtttccgcacttgtttaaatcgccctttatgtgccatgaatctcagtgcagattgagccacccacagtcgcgcaggataataaatctcagtcggagggtccctaatcctgggctcaatctaaccaacccacccgcagaccctttattaatccccacctatttagtgggccacccgagcggcctgaccaacttgatttgcatgcaaattgcgtataaatccttgaattgttactgcaacagtgaaaactcaccgcgtaatgccgcactcccactctctcaatacaaaaaaaaaaaaaaaaaatgcgaatgttgggggcagttggcttggccaaactcattatttggtaatggtcgtcgttgctggaaatgtttgcttttaattaaaacaaaaggcgatgaaacagtggtgctgtttgccaaagacaaaacttccacagctgttcatttggacaaattgatttttctgcacctaattgtcgaggttttctcgagggagcttggggtggggaggtttctggccaaagtgtggctaccaatttggcaaactttttggcaaattaacgagccaaggagatcgcctggtagataactgcagtcaaggacgtgcggccaagtatgctgcctctgcctccaatcaaaattgaattcccacttttgttgaaccaacactgcggtttcagcacttcgacaggaacaacaacaactgcaccaccccgagagcatgcgaaacacatgcaacaagggctttgccactatttttagacacttgccacccgggccacaaggtgccatttgccatttgagaggggtaactactttggggcaacatcgttgctgcgaatgccctaaccgaaaagttgggccaaagttttcaacagtttttcggaatttatggggacgaaataaagcccttaatattcatgaatgcattcagcatgtttcaaaagtggagaagttttttttttggaggtacccccaaatccacttcaggtctgaaagccttttcgagaatgtccaagagtatgcaacaaaaaacaaaacatcgtcttctggcatttatccttgaaaattaaggactctaaatgtgatgtttcatccttttggacaccaaagcaggggaattttaataaattatcttataattgaaattataatacttgaaataaaatgcggttttatgttatgtaagcttagcaaaggacctcgtttgccttaaagggtataacaagacaatagcttcatgaaagtgtggtttgttgggggaaccgggttttcaatgtcaatgccaaaaaaaggacgagtgccacacacacacacacacactagctcacttattttaatagaacgtttgtgaatttgattttccattgcattgattttccgcttggtcggctgattcgaggggccaggaagaagggctcggccttttttgattatttttgtttgctcccgaaacacaagggctcacacatgaaatccttcgaaataggcaatggaaaagtgcattttgcaattatgccaaccgaatggaatcagaagtacgacgggcacagcagcagcagcaacaacaacaacttcaacaagtgggcggggtcggcaaagggcggaggacatcattacggagaaggtcctgtccccagtcccccatgtcctttgccacccaacaagccagccaaccatcatttcacccttcatctgctgtctggtttctacggcaaagcaaataaagtacgaaatgagaattgccatggaatggtcacagtggtctcgaatggtttcaaaagggttatcgctcctatttaagttttgtaagcttatcgcagaaattgcaatggcttaaatgatgtctgctttagtgctgaacttcatttggcattttgcttgaatatcgcccaactttcttttagaacttctgccattttcgcctgcctttcgaccactgtgcgtgctgtgtgggtgaagaaacccgagttgagccaggggctggattagctcttgtcgtgacctcgtggcccgttggcatgcaaaatgcaactaattatgaattttaattaattctggcattttattttgtttgccgctgctgtgcagcaattccgcccgtgggcaataataataataaagtgactcggggaattgctgcgaaagtcttcagcacttttccgtcgcttttctcctagacttttctccggcttttggtcaagagcgcactatactatatatgcagctggaaataaaaagtaaaatggtagggaaaacaagagcattgaatgactcttttgttctggttttcccgttttcgccgcattcaagtgtctgcctttcggttgtttctgtcgtttgatttggccgcattcgtgtcattttggccatgggagattgcatttcactttgaccattcaagaatttcatgtgcagcaaggaaatatttgcatttttgaatgcacaccttttaaaggtattcactggaatgtaaagtctttagaattgcatctcagttcagtggttttaagcattgaattttacgaaaattgcagttctttgttaggaaataattggaaaaaagctgaagcttcgcctttctcaaatcgatttgtgcagtcaaatagttaatggagtttttggtattattgaaaaagaaatgattgaatattttcgaaactcttagggaatacaataagttcaatgttttttttttgtttcaatattggacttaaattgctttaaaactaatttctcatcattgattgcccgcttttatttgcccagcacattttcccctattgttttcattttcattgccattgctttccagccatatattgtgtgccatatgtatatttaactattttgttgtgccagcagaataatcgcatagtctgcttctgagggcaacagctgctgctgacactcggtgccccccgttcttaacccccgtgccacaatgcttaacccctgttgtgcgcacttatgcctgaaagctttatgaaattccaatttaatggtcctctggcttaaactgcattttgtccactcctccatttctaacaccccccccccccccacacacactctaccccctttttttccccctatttgttgtctgtgcaggaatcgatggacattctgtgtggtcgttctaagccaaatgcattattaagcgccataaaaatgtcagggttgtcgtataagtgcacagagaacaagattaacgactattggaaagtcgcaaacaaaatcatgctgaaatatattagctaaattacccatttatacgaggatttaactgactgtagattgtacattaaaacgggcggcacatgtttaacttgttttgagcaatgaactggaatttgttggtttgacaacgattaattagcgcaagaatgatattgatttcttctgcaaatgatatcacttcgttaccatatttttttctgtgtattcccaaacaaaatgttgttgtttggtttggcttgtgcgttgagggatcttgaagtgggtttttgggcgtttgctggtgacacgaaatgcaatcggcactccatgtgggagtcataaatattgcaacacacaattccattgaaaactgacgtagtcaagttgccacggctctcaggatggcattttccaggacacgattgctggcactcttcattaactgatgtgaaatcaattcaatattcaccagccacgtaccattgtttactgtaccacaattaaattatttacatgctttgattatgcaaaccgagttagatgtcgaacaaggatattaataactactaactaaatacaggagagagagcataacctataacaatagttaattaatattgcacctattatctttccaatatatatatctttttgccttaactacttgttaccattaagacaacccttgaaaactaaataaagaaattcgcttaaatggcataatattttgatgatcgcgtaattttccgccctttcaagctgcactttttatctttaaaatttgaattcagacactgacgaacaaaccggtttaggaggaggatacatttcaaaggactcgacttcagctcgacttgcacagatactcaagttgatgcttgaaaagttttgcccctccggcgacccttgaactcttccatttttccatttgtggccattctgcttcaatatcccagctgggtgtcatcagcaaaagtttatttcgccgcttgttgcttcaatcgccgatctgaggggcatatccgaggatatagcccgttgaggaaggatgcaggatatactatagttggcaccgcaaattatgtaaaatggccgcattaggggaaaaacgtgtggcaaaaaaaagggcagaaaatacaggtgaaattcaacgaagttgaggctaaaatgcataatttaagaaaaatattcgtatgcttatttgaagctatttaaaatcttattaaaattcatgtaataatacaaattataaatccagagcagggagggatttcattactgtacataaacgtccccctagtttggcacaaatcgagccgagtgcttgaattattaattacagaaaagcgcaattccatggaaagcgtgccgaaatggtgttgtggttgcttttgggggtggtcatcgtgggaataaaactaaatggggggaaaacgaaaaccgaaaaagtgggcgaaagaaaaagaaagaccggaggggcgggtgaaaaaccatcacgagtcagtccttcactgctcaccccgtgttgttaaaccaattggcaaacatttttattttattacattttcacagttgcattcgctgttgctttttccagctttctaacagcgaaaacacaacaacccagccaacacccactaattttcgcccctcattttccgcgcccttccgcgaaaattccagccaatcagtcgtcggggtaaatagttggtaactaggggttccgcatccggttaataaacaaaaggtgtcgcccgcccgtctgtctccggatttatttgcccggatctctatgcttgttttggccattgtctcttgacttttgcctcttgatgggcggaggattggtgaactgcgggattgggattttatgattgggactgggattgagttacgtttatcgacgcgttgtttttggctggacttttcactgtggttttcgtggctccgcttggatggcctgtgtttatggcaaaatcaatgcagagcgcgtctaaaaataggcaactggccaaaatgcgtcacggccaaaaagccctggggtggcctaattaaatcgctcgacaattgatggtttgcccatcgacaaaagtgaatgattgaacagtagactgattgagtggccttgcactgggccaaaatgcatcgaaagggtttactaatgggtttactaaggagattctctaatgtgagaactaaactttagctaagcttaagcttaagcttaagaatattcaatgctacgtatttaaagtattgcattttctttcaagaagttaaaaacaccttatagatagtcacatttattgaaactatttcaaagttattagccaatgtgaattggtgatatgagtggtgttctacttaagtaccaatatcttcttaatgtccactagtttaatcgcattgtgatcctttctctgcgtgtaaatttaggcgtccccattggattcgtgttgaaatcaattaactgacgtcagcaggggatgatgatgatgttggtgggtggtgctgtgggtggaattttcagggggtgttgcatacttttcggcgagcagcttgctccttacataaccccacatgggctaacttttgttttcgagctcctgaggaacaacaaatatacaccatgtagtaaccacccctcccctcccccaccactgccagtagtttcctgccaggcagtgcaaacttattatggccatttttggcttgtgcgaaactttatcaacattatggatgactgactgactgactgactgactgacttacatctgcccccaacttggacaaggttgaacttaaaattgctttgtatatgtgtgtggaaatgtgtgtttggcaaatgtttgtttgctcgcttgtgctcggttttacttacccgcgagaaatggccaactttaaaaaagcaatcttattacgctcgtgtagtggcaaagtttgcagatacatatatttgtgctaaaaaaaaaaaacgaaaatatattatggctatacaagtttgagcaacttgtcgcaatctgagcaagaaagtgtaatttggtttatgattaaatcatttgtaaatgataaaatttttttatattttacactttttttctttattagtggcacatctcaatccgctgaaatgccttgcttgaccccttcttaattcttgtttgtaggtgacttttgaaagctagaaataaaatatgagcaatgacgttgccattggcgttttattgttgttctttctactgcttttttttttttttcttgtttcctgtcgaacgtgaatgagaaggagaagaagaagcggaaacaggcaacgtcataaatatgtaagtagtgtgtgtatgaccttcgcgtgtcgcagcaacattttcagcattttctgcatgcagaaatacaacaacgttaaattgaagcattttttgtgccaccgcctttggtgttcgctgttttttttttctttttctttgttttttttttgttgctgttgttccttttggcaagcaaatcatgttgcatgttcccaccgctctgacctctgaccccgatatatatcacccagtccccatgatttattagtccgtggcctacgttcgtacaagggacacgaactgcaggaatataaccagggcctccagaatgaagaagaacatctgtatgagttggataatatttaaaagatgtatagtatatatgtatgggatattattttgaatttatatacccccgctagagtctgcaaattgagatgataaattccgcagacatcgatctgtatgggatcctgcaatgatctgcagggcaaatccctcgatttgacttctttccacgggcgtttgtcctggtagatccttaagttgctgttgcaggtgtttggactgcaaggatataagtcttccttactggtaacttgtagacatatgactttagaataacccaccttggacacacatcgatgagaggcggcgcagatgctccagattttgatgagggtggggcacacgacgaacatgacctggccaaagaggaacaaggtggcgggtaatacctgcagatatgcaaccatgaagtacacattgcaaacgatgatccagtcgcccagacagaggacattcagcaggagcaacgagagaccgaatagatgcgacaacgaacgcgtcactttcgccagatgggcatagtccagtctgagagttttgtaatccgaggacccggatatgactctatgatgcagctgttccagcttgccatccaaacgatccaccagcaccatcatttgcagataacgtgcacgaactgcctgaaggctataggcataccgtagattctccaaataaatgccacgaattgtgtactcggataagacgaggaatgcattgcacgcaaatagtatgatttccaggatcaaatgcctatatataaaggatgtcgccttgaccggaggcagttcctctagcagataacgaaagcgccggcattcgaatagagccgaaagcgcaatccatgcatggatcattttgtaggccatattaacgcccatgatgacctttgcaaaatatgcgggcacggactcattatctggattttcttccgtaaagtaggtttctatttcaccgaccagttcgatcaatattagtaccagaaaggtactgctcaacaggcggcccaaacgactgccactccagccacagaccagtccgcatagctgaaagtagccagttagaaagtgttccagccacagcgacattgggctaacaactgagggatccaaatttccacctggctaactatcgtttaattaatcaaaatggaggtgctacgagattgtatctggcgggtaattgggttaagtttatcggaagggggaagttttctcttaccaggggactcaaaatatagccaattattattatattcctacaaaatgtatcaatattttcgattataattctctaagacctttaggagtaaaatgactatataagctcaattctaatttcagtatcattctaaaactatttgcagtgctcacggtactcagctcgacgatcaagtacaacgaatacgcgacggacaagggcggcaatgtgagcataccgtgcatagcccagggaaacataatgtgggtgaaagagcacggcaacaacagcacgatagttcaggtaaatcaatggggtttcctctccagaaacggagatatagttttgagataaataccccattatagactggtcgtgttctcgtcctgcgaaatgtgagcaccacggatgcgggaatctacgtatgctttgcgtcagtgccacgcccatcgacaacagcaacatcagcaactacctcaccgcaaaatctgcaggataaagaaacgcggccactggaggatgaggatgatggccaaggggaaagcgtatcccccaaggatgaccagctgaaggaagccgaaatggaggaggaagtggagtatctagcccaccagcgaaccaagctcatcgttcgcactgttccgggtccagtgtcgcagctatacttcaaggcatccacaatactgggtttcctcatctggcgcttcaataagactcaatccggtggctatccggtgcgcagctttacggcggagtaccgcaacgtctcctacaagacgccgccggcgaatgccagtttcgagcacgcctggagcaggatggatccgatcaacatagcctttaatgtggtgagcatctaggaaatctttctttatagtcagatatatatatagtcttatgcacagttgcagtttaatctaactgaaacttcttctagcgccaaatggaggtctatcgcctggcacccaacaccacctatgagtttcggatatgggccaacaatgaactgggcagcggcgaggtggtcaccaccaatgtgaccacgctgccggagacaaaggaggagggtgagtactccgggcactgcctgcttgattaaaccagccattcgaatcttagagatcttaggctccattaggctaggctaggctaggctaggttcaaaccaggctagactatgttgattatgactaatattttcgtacaactttgatattctactttaaatgtgtaaattgtaattctaaacggtagttgatcattcctaatttccaattggtgtcaacatctatatcttaagtaccaacgaatgggattgcaattggattgtaacatggtatattagttaaatatcattgatagaataaaaccaaaccttaacaaaaacctattgtctatgttgcaatcctatacgttggcctaattttagtatcttgattggtagagccagtattatttaccaaaaaaccaaaaaaaaaaaaaaagaagaaaaaagtgtaaacgtatagctcattgtttagtacattcgatttgtatttttggtaattttcgttgtccatctatatctctctcccctctctctctctctctctctcgctcccgctctcgttggtgtgtctcctttgtgcctctgcctctgcctctgcctctgtctctgtcacgcacgatatccagatctcatacgccttataaaacccgacctagacaatttcgatccacgcatttggatagtggccgtcagcatagtgctcggaacccttgtgatattagcgatcggactctgcattgtgctctccaaggagtgctatcagtcggcgcaaatgggtacagactaagtcgatcaactccagctttagcttccaaataaatccagctccaactgcagagtctataaatatatatatatatatatctacatatatatccccagttgaaaagaactagtacaactgcaaacaattcccgagataatgagcaacaattcacctgttatttaatttatttgcgtctcttttgcgtaactataagatatttttttttagttcccatttggcttgttttcggttccattggttgttaaattcacacattcattttacctgcattgttcagttttgttatggctataattcaatgttattggtgtcgttgttgttgttgtcgttaatgctacatagctgttgttgttgccgctgctattgttgttaataattaaacatatccaaacgttgtgtttaaccgcatttagtttttatgtttgccagccgaacgcaaaatgtttgcttttgccgttggatgttgtttatatgtattatatttaagtccccttatatactaaacgccatatacaatacatatgtgtgtactgatggctcctgtgacctgtaaatataattacaatgcgaaatgcatacataaatgtatttgctatgagaatctttgcggacaaatcaaatgttgattcttttttacattttgctcatagtaaaacgagtaggtccaataatttgtagaaatgaatagaatatattttcattagataataataagagtagaagcagctagtataaacagtataaatacattataaatatttgaattcaagttgcttaattaaattgtgaaaatctagttcgcattgcaatcgaaaattatttagcgtcgcaggataagtttcttgtatgtattttcccacatttacttaatctaaaactctcttaaatagagcctagtcctaagtaatgaacgctgtatttcccttgaactaaactcaatccaaatccagtcctagaccaaaagtatatggaaagctttaagcacttaaactgtgatagcctgcacttgtagccaaaagtcaatcaatggaaaccaaatcaaactaaaaaccgtctagaggtctaaaccagttttaagctttagatgcaaatggaaaagccacaacattttaccgaatgaatattctaaaatgcctagaccaatgaaaatgctttatcaatgttgtaaccgtgtatgtaatttaccgaatattattgtgttatttgcttttgcaacgataaaaaccgtaagagcacgacaattaaatgttttaaaaaaaaaccaaaagagtggattgtatgtaatattccgttgaaatgctgtttagttttgttttgagaacactcgagcttggatttcaatagaaaatgcacacaaaacaacacacacagaaacacacaagatatataaaacactatactatacgcataaacaaatgtgttcaaaataatacaagtaaatttataatatcaattgaagtttgtaagttgttcataaattttattaatttggatttgttggcatttggcaaaagttgtatttaaaaaaaataaaatttaaatacctattattttggacactgctgtgggcacacttatttagcgagacaaagttgttgcttgcattacgcatacgccctgtgcgacgcttgggggctaaagtgtcgcgttgtttgagtgacacttggctgaagcgccgcctgtaaatatttgtgttaaactgttgcacagctacactcagaaaaataaaaataaaaaacacccccgaaacacacactcacataccaacacagacaatataaaaatccctagcaaacgaggtaatgtagagaacaattatcaaaaataatcctaataaatgttttttcttctctctctctctctctatttcttcttctgctctctgtctccttctccattttgaattaatatctataaactgtaaacttcttccgatttcatctaaaaaagaactgcaagatggttgggacagcattgagctcataccgaacataatacttaatcccggtttcagcgagtcggacggcggaccagagcctggtggccaaggtcatgggggcagtgctggcgatcaggatgctggggaggatgacgatgacgatgtggccatgccatttccgcgcaccatcatctttggccagcaccatcgaacgcctccgccgccgcgtttgcatttgccaccgcagcaccaccgccatcaaaaccagagccaccaccatcagtatcatcatcagcagaaccagcagcagcaccaccaccaccacctacggcggcaggacgacgatgatgacgacgactacgaggaggagcacgaacccaccatggagcggttcaagcgtaaagtctccgtcttcttcaccggacccaccatcaagcgtatttgagacgtatttgagtacaaacactggtcaccaaggttgttgcattgctgcttgattggatagttaggatccacctctacatcatatacatagatatagaaatgagagagagcttatcgatcgatcgaatgtttcgttttcatttcggtttcctgtccaagcttcaactatgaaataccaaaaaaaaaaaaaaaaaaaaacaaagaacgccacaaatcgccagagattttgatttagagctcattgcattgcttctatgccccgaatcacaactatatagtatatatacacgtattataaatataaaccaaaacaaatatattgctgtgatacaaattcaattgaacgaacattgtaaggatttaccataaagcacacgaaacaccaaaaacccagctattaaccatcatgaatttgctgaagctcgtagctataaagctcatattgtattttgtctagttaaacacgctatctgagttacagccactggattattcagatccacatatatagacgacagaatttagcggacaagttagcttagagcctcaaaaatcgcccaaaagagatctgttaccaagtactaatcaatataaatgtccttacacccagtccgtttgtctgttagcccgaactaatgcttttctgtaattgtaactgattttataatatttaaaattaaattagtcaattgtaacagatctctgatagtctctgatagataccggactatatcgtttgaacttgtccttgttttggttccgttgtaaagatttaacaaactgtgaaacaattttataattgagcaaatattttgcactgtagagcgcaccaaacgatctatatatagatatataaatatatatatatatatat

SEQ ID NO: 38063 - DNA, 1694 bp, DROSOPHILA
cgcaacggtacatgagtggcggttggcgagcgaacccagtgtcccgttatcaacaacaactctccaaacaccgaactgcagttgaattaagccaccaaatacttcgtgttttttttttcaagttccatagatgtagtacagtacgacagttactcaattactcaattgcaacttccaaagaattcgcgtagtgcgaaaatcgccaaaaatcagcagccgcactttgaagttacgtcaaaaggagtcgtgaaagaggaagaacgagagtgagggagagagagagaggtagcaagagagccgtaagaaaataacaacaaggcagaagcacgcgataggagtaactgtaaatccggctttggtcaaaagggagggggtgataaagctagcaggaagagcagccaaaggaggcttatgtaaagcgtgcttcgagcgtgctatggaagcatgtcgtccacttccagctccgtgctaacgttgtcatcgtttaatctattatttttcacccaagtgctcacggtactcagctcgacgatcaagtacaacgaatacgcgacggacaagggcggcaatgtgagcataccgtgcatagcccagggaaacataatgtgggtgaaagagcacggcaacaacagcacgatagttcagactggtcgtgttctcgtcctgcgaaatgtgagcaccacggatgcgggaatctacgtatgctttgcgtcagtgccacgcccatcgacaacagcaacatcagcaactacctcaccgcaaaatctgcaggataaagaaacgcggccactggaggatgaggatgatggccaaggggaaagcgtatcccccaaggatgaccagctgaaggaagccgaaatggaggaggaagtggagtatctagcccaccagcgaaccaagctcatcgttcgcactgttccgggtccagtgtcgcagctatacttcaaggcatccacaatactgggtttcctcatctggcgcttcaataagactcaatccggtggctatccggtgcgcagctttacggcggagtaccgcaacgtctcctacaagacgccgccggcgaatgccagtttcgagcacgcctggagcaggatggatccgatcaacatagcctttaatgtgcgccaaatggaggtctatcgcctggcacccaacaccacctatgagtttcggatatgggccaacaatgaactgggcagcggcgaggtggtcaccaccaatgtgaccacgctgccggagacaaaggaggagggtgacgagtcggacggcggaccagagcctggtggccaaggtcatgggggcagtgctggcgatcaggatgctggggaggatgacgatgacgatgtggccatgccatttccgcgcaccatcatctttggccagcaccatcgaacgcctccgccgccgcgacgacgatgatgacgacgactacgaggaggagcacgaacccaccatggagcggttcaagcgtaaagtctccgtcttcttcaccggacccaccatcaagcgtatttgagacgtatttgagtacaaacactggtcaccaaggttgttgcattgctgcttgattggatagttaggatccacctctacatcatatacatagatatagaaatgagagagagcttatcgatcgatcgaatgtttcgttttcatttcggtttcctgtccaagcttcaactatgaaatac

SEQ ID NO: 38064 - protein, 325 aa, DROSOPHILA
MSSTSSSVLTLSSFNLLFFTQVLTVLSSTIKYNEYATDKGGNVSIPCIAQGNIMWVKEHGNNSTIVQTGRVLVLRNVSTTDAGIYVCFASVPRPSTTATSATTSPQNLQDKETRPLEDEDDGQGESVSPKDDQLKEAEMEEEVEYLAHQRTKLIVRTVPGPVSQLYFKASTILGFLIWRFNKTQSGGYPVRSFTAEYRNVSYKTPPANASFEHAWSRMDPINIAFNVRQMEVYRLAPNTTYEFRIWANNELGSGEVVTTNVTTLPETKEEGDESDGGPEPGGQGHGGSAGDQDAGEDDDDDVAMPFPRTIIFGQHHRTPPPPRRR

SEQ ID NO: 38065 - DNA, 2617 bp, DROSOPHILA
ctccgtggccgccagctcgtaccaggagtacaagcagaacaagggctatggcaagcgcggctacatgggcatcgctaccgatttcgatctgcagggcgattacattctgcaggtgaactcgaagagccccttcggcaggagcactcccgcccagaaacagaccggctaccaccaggtccaccagccctggcgccagtcctcctccaaccagggttcccgccgtcagtagatcatcgcacagtgatccatcgatgacaaccagatcgcacacccctcatgcgagcgaaccactccagcccatcctcatccagcagaaccctctgccagttgcatccactacgattagttagctttgtttttttaactcacaataaaaaacgtttgcatttttaaacattctaaagagttcagttcaatatcagaaaaaaaccccagttcaatttacaataaaaacaattgcttatgtcgaaatatttgagagttctaaatgctcattatataaaaatatccaaaaccaaattatgcaatgccactgaggtcataaaagaagcacacaacaaacatttggattacatgatatgtttatttgataaagaaagcatattatccattatgatatatagcgtacacacacgcacaaccacatatatagatatggcgctatatatatgggacgatgaactacggacaatatttcttgcttactactgtattggcaggcgcaaaaaaattgggttgagatatcactaagcttaaataagaataattaacgtagaatttcaacttgcttcactcatattcatcgtctcgatttcaacaacctcatcagaactaatcacaaattggaaaaatcatatacaacacggggtgcaatgggaatggatggtctttttatcgatgcgaatgggtctccagatgagatgggttaatggatttagaggcttatttagagctgtgtttttgtttttgttttttttttttgatttgtttgtctatcagtctaatcgcggcagggctgatccgagggcgaccaggtgcacatgccgccgacgccgtcgtaggttagtcccttgggacaggtgtactcccatccaacgattccaccggtctcctcgaatcgggcgcaggatataaacttcctgcagttgaggggatgcggaaaatttccctgtgcccggcactcaatgatgccatgaccatgaacgatcaccttgggatcgtttttggtcggaagaatactgccactgcgacgccgttgggcgacctgactgtgaaccaccgggaatccctcgtccagaaattgactacttgacgtggctgagattacggcagtcttggccggcggacgactgtagacctcgatgtatttgtgcggacgacgacgactctgctggcgacgggagagaggaggagccgagtgtccagccgacgtggtcgatctcaaagttgaaccggatgtggttgtagtggggggcgttgatgtggtcgattgcggccgacgaggacgtgggatcaattgacggcctgcagtaacaagttaaaaccagtcaaatacaaacaacaatgcaatggttatacacttacggattccctggccaataactggtagtggtgcattggcagtggtgctaactgtggtgctggtgctcttcagtggctgcgctggcaatgccaagtcatattcctctcgtggacgcacctgctctggtatctggttgaagcggctcgtgtgaatgctcgacttggccacctgatcctcgtcgtcgtcgttcaaatacagagtggtggtggtttccaggcccgaaactggtgggttggtggtgcgggcggacggcggagtggtggatataagggtgaggcggcgcttgaacagtgggttctgagttctgggcacctcggtggctaaagggaaaacataataagaatatgaaatatgaaatttaaaaaaaaaattaagaaaattcatggcttaatattttgataacaaaataatttcattaggcgaaaaagcaataacaggattgttggtaaaattgagatgtttatgacaacttattttcatcataacttggcctaaaattatcgtaaagatgtaagaataacatttttgagcagctaattactagtactaactagtagtacctgtcactttttgaagaaattaggaattttaatttttgggtcatttttcgccttttttgtaaggggtaacatcatcaaaatttgcaaaaaattaccaaaaaatagaatttccatttgtgaatacagttcgattgggaattttattacgagctcaacgaggtatgacattctatattcaggcaattatttttaaagttatgccaaaaaaaaacggattatttgatggccgaatttcggaaaaacggatttagccaaaatcttgatatttacaattggaattttcgtcataacttggctaaaaatggtcatataaatgtaagaataactgttttgagcagctaattacccatgctaacgatccctatcactttctggaggattttcgaaaattaatttttgggtaaattttcgcattttttgtaaggggtaacatcatcaaaatttgcaaaaaatggccaaaaaatagaatttccat

SEQ ID NO: 38066 - DNA, 561 bp, DROSOPHILA
atgcaccactaccagttattggccagggaatccgtaagccgtcaattgatcccacgtcctcgtcggccgcaatcgaccacatcaacgccccccactacaaccacatccggttcaactttgagatcgaccacgtcggctggacactcggctcctcctctctcccgtcgccagcagagtcgtcgtcgtccgcacaaatacatcgaggtctacagtcgtccgccggccaagactgccgtaatctcagccacgtcaagtagtcaatttctggacgagggattcccggtggttcacagtcaggtcgcccaacggcgtcgcagtggcagtattcttccgaccaaaaacgatcccaaggtgatcgttcatggtcatggcatcattgagtgccgggcacagggaaattttccgcatcccctcaactgcaggaagtttatatcctgcgcccgattcgaggagaccggtggaatcgttggatgggagtacacctgtcccaagggactaacctacgacggcgtcggcggcatgtgcacctggtcgccctcggatcagccctgccgcgattag

SEQ ID NO: 38067 - protein, 186 aa, DROSOPHILA
MHHYQLLARESVSRQLIPRPRRPQSTTSTPPTTTTSGSTLRSTTSAGHSAPPLSRRQQSRRRPHKYIEVYSRPPAKTAVISATSSSQFLDEGFPVVHSQVAQRRRSGSILPTKNDPKVIVHGHGIIECRAQGNFPHPLNCRKFISCARFEETGGIVGWEYTCPKGLTYDGVGGMCTWSPSDQPCRD

SEQ ID NO: 38068 - DNA, 2576 bp, DROSOPHILA
aaaacataataagaatatgaaatatgaaatttaaaaaaaaaattaagaaaattcatggcttaatattttgataacaaaataatttcattaggcgaaaaagcaataacaggattgttggtaaaattgagatgtttatgacaacttattttcatcataacttggcctaaaattatcgtaaagatgtaagaataacatttttgagcagctaattactagtactaactagtagtacctgtcactttttgaagaaattaggaattttaatttttgggtcatttttcgccttttttgtaaggggtaacatcatcaaaatttgcaaaaaattaccaaaaaatagaatttccatttgtgaatacagttcgattgggaattttattacgagctcaacgaggtatgacattctatattcaggcaattatttttaaagttatgccaaaaaaaaacggattatttgatggccgaatttcggaaaaacggatttagccaaaatcttgatatttacaattggaattttcgtcataacttggctaaaaatggtcatataaatgtaagaataactgttttgagcagctaattacccatgctaacgatccctatcactttctggaggattttcgaaaattaatttttgggtaaattttcgcattttttgtaaggggtaacatcatcaaaatttgcaaaaaatggccaaaaaatagaatttccatttgtgaatacagttcgattgggaattttattacgaaatcaacgaggtatgacattccatattcagacaattatttttaaagttgtggcaaaaaaactgattattttatgaccgaaattcggtaaaaacggattttgccaaaaagttgatatttacaaacggaattttcgtcataacttggctaaaaatgctcgttatgaatctttggcgagttcgacaagtttcttcgttgctggtaatgaagtacgtaccgttatcctattgtttgataatgcatttaaatttatgccaagtttacttaccactttcatcgccgttggccgccggtgcgaaggttgtcagccgacgcgtttgaaattggcggcgcagagcaaaactggcgggctggaacttgtgctgcttttgtgtgatgtcattgctgctgctgctgatgttgctagttgctggcgtcagtgttgctgcctcaccggatgctgctgctgctgctgcggcaccgctcttggctttcagcttgctcaggtaaatgttgctggtggttctgccgccgggagcagatgttgctgctgggaaagctgttgttgctgctgcagtggtcgttgttgctgctgccgctgctgctgttgctgttgcggagggtctgctgcgcagtcggctgtatttggaggtcgtcggtggttctgctgctggctgctgcgtggtggtttcaaccgctgccgacgtcggcgagttgataatccgccggcggacactcaacaccggtcgccgcgaaacgctgccagtcgttggttgtcgcagctgccagtcggtagtcaaaagtggttcgttcgcggtacatggaattatattgaaaacaaacactgaatttagcattttgtgtattttaagatacatattaaacgtttttttgcaactcgctgttttggtgtttcgtatttttgttttcgtgccttttccggcggtgtgcagtcaacaacaattcaaaagcgcgctacatgctataaacaataataataatcatattgaaaatattaaagtattggttaagcataagaaatctactaaagccttaaataaattagtactgtttggcgcttgttgtgtattgtgttttactgtgggcatttgggcattgggcagtgggaagttgggcttttcgaattgaaaggaatggaaaggaaaggaaacccttcgaaaggtgctttctctcgccatctcggcaagatcaagttgaccgctaagtgggccaacaaccgcaaaaatgcagtcaggcattttaattgaaggacgttcgagtgcaaaataaataacacgcaggcataacaagttatttgcctggctattagtttgcgctagttttgctttgtccaccaatctcgttgacattgaaagcaatacagagcacagcgtagagtggaaattgctgtaattatgccaaattgaactttataaatgtaatggaaaacaaccagtaaacatatagaataagctaaactgatatatagactatgctacgaattaaaacccttcagtaatacccttgaaaatatttaaaactatatttaaaaaattatttccaacctagaccctacaaaaaaagaaaaaaaagcgagagagagttgctggcgagaacatttttggtgtcaatgtcgcagacaccttcgagataatgaatgggccggaaaaatacgcatcagccacggtgcttgcataatgctgatgggcttcttcgattagcagattcgcaaattgaagcctgcattgctgcttggtatcttcggactttggcaatgcgattcgaccgcatgccaatgtgattgcataatctgaatccccaacattcccacttgtttttatttttttttctctggca

SEQ ID NO: 38069 - DNA, 576 bp, DROSOPHILA
atgctaaattcagtgtttgttttcaatataattccatgtaccgcgaacgaaccacttttgactaccgactggcagctgcgacaaccaacgactggcagcgtttcgcggcgaccggtgttgagtgtccgccggcggattatcaactcgccgacgtcggcagcggttgaaaccaccacgcagcagccagcagcagaaccaccgacgacctccaaatacagccgactgcgcagcagaccctccgcaacagcaacagcagcagcggcagcagcaacaacgaccactgcagcagcaacaacagctttcccagcagcaacatctgctcccggcggcagaaccaccagcaacatttacctgagcaagctgaaagccaagagcggtgccgcagcagcagcagcagcatccggtgaggcagcaacactgacgccagcaactagcaacatcagcagcagcagcaatgacatcacacaaaagcagcacaagttccagcccgccagttttgctctgcgccgccaatttcaaacgcgtcggctgacaaccttcgcaccggcggccaacggcgatgaaagtggtaagtaa

SEQ ID NO: 38070 - protein, 191 aa, DROSOPHILA
MLNSVFVFNIIPCTANEPLLTTDWQLRQPTTGSVSRRPVLSVRRRIINSPTSAAVETTTQQPAAEPPTTSKYSRLRSRPSATATAAAAAATTTTAAATTAFPAATSAPGGRTTSNIYLSKLKAKSGAAAAAAASGEAATLTPATSNISSSSNDITQKQHKFQPASFALRRQFQTRRLTTFAPAANGDESGK

SEQ ID NO: 38071 - DNA, 1663 bp, DROSOPHILA
atttcggcgaggtatgacattcgctatttggacaaatattttttaagctgtgcccaaaatactaaatatattacagtttgcatgggaatttaattacgagcttagaaaggtatagcattccatatttgtttatttatttgtttattttcaatgttttgtacgaaatccgatttcttgaactttttgtttgaaaatacgcaaagaatgcatttgattaggtgaataaatttaataatatcgttggcaagccatccatattttacgttcaattaattatactacactatgatggccaagtattttaaaattaaaaattaatgtgagaaatgtttttgggcaattaagaaacgtttgcaaatatttgtacaatttcgcagtgagttgcttcgttgcacaccctctcgattttctcgaatctggtttataaatatctggattatccatctcggcacattccatacaaaactgcgttgcttgagtgagcaaatgaataagtgactgaatgactgactgactgactgactgactgactaactgaatgacttactgtaacgcatgcgtggcatgtgtgcggtccagaaaaaccaaaaacaaaaataaaataaaataaaagtagcgggggaggggaaggtcagggtctaagtgccacttccgttttccacaagcaaacaaacaaattggcccaacaaatcgccgatggacaaatggggatggatatatagatgttacttatccttggtacgccagccacttgatgcacaattagtatcgcacaagtgcccggcattcttcactttttgttttgacaagtgcacacatttagcgaagaaaacgcactcgttattgtttcccatcttcacgcacaatttgtcgtcactagccgatgacttaattcatttagcagatcccaaatatgcagccggggcatatagaagtggatatagtcatgggctcggccatagagtccgttcagttgctcgccaatcgccgctgctaacggatggcggtctcatcgtcctcgtcgtcgttttccaactacttgatggcggtatttgcccaggatagcaatagtagtggcagtgccagcggaagtggagcagccgccgactcggaggactcccagattggccaggaggccaatccaggtggccaggagaatcagggaaatcacaggaggcgaccgccgcgccagaagatcaatgctagagagcgctatcggacatttaagtgagtaaaaagtatataaatgttaataagcaaaacatagccctagttgaaagtgtatttattaacaattaaccatttaatattttctttttttcctaaacaaaatcagtgttaattcggcctacgaggcattaagaaatttaatacccacggagcccatgaatcgcaagctttcaaagatcgagatcatccgcctggccagcagctatataacgcacctaagtagcaccctagaaacaggtttgcttaaaaaacgttattcatataaaagtatactaatttgtttaaatttttaaggcactgaatgccagccatgtttgctgcacaaatacgagagcgaaggaataactagacgtatcagtatctgcaccttttgcctgaaaaccaaatgaaattaattatttattggatatttctaagaatatttatataattc

SEQ ID NO: 38072 - DNA, 231 bp, DROSOPHILA
atggcggtctcatcgtcctcgtcgtcgttttccaactacttgatggcggtatttgcccaggatagcaatagtagtggcagtgccagcggaagtggagcagccgccgactcggaggactcccagattggccaggaggccaatccaggtggccaggagaatcagggaaatcacaggaggcgaccgccgcgccagaagatcaatgctagagagcgctatcggacatttaagtga

SEQ ID NO: 38073 - protein, 76 aa, DROSOPHILA
MAVSSSSSSFSNYLMAVFAQDSNSSGSASGSGAAADSEDSQIGQEANPGGQENQGNHRRRPPRQKINARERYRTFK

SEQ ID NO: 38074 - DNA, 3383 bp, DROSOPHILA
aacggttctatatatataataggcatatcgaatcggttttatatattgagtatgcttcagtgaatgtgcgtgtttgtgtatgggtgtttttggggctctttgaccaacaacagcaaataaaaaaaaacattaagctcggctacatttcatctaatagaaacttgacgtgtcttctgcatccacttagctttcttcttcatcatcatcatcatcatcattatcttcacattcatcttcttcgtttcgttttcgtttaaaataattaaaaataatagtaaataaaacaccacagtcatgattttttttaatagaacacaaaatatacacaaaaaggagagaagaggtcaattacaaattagggaaattgggtttaggaaaagtggtgggggaaaatttgcaaatagcaaaatatttacaaaagccgttgaaaattttaaagatatggatagacgggtcagggaaaatagagatatagtactagggcaggaataattgtatcaggcgtttcttcttctaaacatattcatatgaatgttgtttccatactttcgattcgattttgtttcttttattgatacatataaataaaattctttgattcgtgtttttttttctgccaattttgcttatggttttataattttttttttgtgtttagtttgttttaactaatttcgtttatgttataaaaaaatttgctatgaatttaaaaaaaagatgttgacattgccgggaaatttctttgatcgaacaaaattctctccgtgtgaatgagtggccgtgtttgtgtgtgtgtgtgtgtgtgtggggttgttgtgagtgggtgtgtggggcattggaaagggggttatttctggggtgagacagagggagatagagacagactttcggggcgtttggggctagcgagttagagagaatgatctgctgcatttgactctgtacaggttggtgacttgactaattcgggcgagggcgtggccggtgctgacccttgaccttagatcagcgccgttatcagcttggccttgaagttcacgaacttctcgctggtggccgcaacgcgctgcaaacgggtaggtaacatagatttcgttagattaatagcacataaaaccctagttactgttactcaccagaatcaaatcctggacgagattggccagaccgcgattggccagcaccacgaggcgcgtgactgggccgggaatgccctcggtgtagccatcggcgttgcgagtgctatcgccatcggcgtcaccatcgccgcccaaactgccgctgctactgctgctgccggcactgccgcccaccgagttggccgcctcatcgccctgctgggtctgaacactgcccgaaaagagctgtttgtttgttcgtggaagtaaagtataccaattagatgtctggataacggttgaaagttcagccaacgggtgtggtacttaccctcaccacatccagcaggaagttgccggagccgccggctcccagagcattgccactgggcgaacctcctgcaccgccgcttgagccgccggcgagacccgcaccgccaaagctgaggaaccttttgaacagattactattggtcaggccattccaattcaaagcgtatgttgttgatcgttattgatattagtatgttgttgaatttcgttgttgaggtaattccattcgaatttgttgttggttgttcagtgtgatgcaaatgttgttgagtagtaaatttatatttataagttgttgaattttgtttcatgtttgttttgtttgcaatttatcagttggatttccaatgtattaagtattgttgaaatgttgcatcattgttgaattgttgtaggggtggaaagggaagaaaggtgtatgattagttgagtgcctaaactttttttgtacaagtgttttgaatattatataataaattagtcagccatgcacttagcattgcattgaaggagtagtccttcacttacctcttgttgcgatcgtccagatcggcggtctcctccgcagagtctagggtgagttcatcgatcgccggcgacttggactcggagagctggagatcattggtgctcagggccttttcgttcacaccggaggacggcgagacactgggcagttcgttgttgaagctcagctggatgggctcgttggatttgaggggaatgggagcctgggcgaccggcgaggaggcggaggacgaggatggggacagggactgggcggcaactgcggcggcggctgcttccgcctccttcacctggcgggccacacggattgtctcctccaattgcttgttgatggccgacaaatcgatctgggtatcagtggctccattcttttgggtttttttttcgttttggatttttgtcatttgattttttgcaatatttttggtagggcatttgttgcattgttttttattgtgcgtgtatgtttaaaaatttggaatttggacgttgattatgtgcgtgtggggagaggaaggaggagggggtatagggggtggttcaaggggtgatgggaaagcccatggtggagggggtagggaaaggcaaagcgtaggatttggagacgagttatgtgtgttcaacagtatgttttgtgtgtgtttcatttcgttttgttttcgttttttcagtgtgttcggatttggtgagttcacgaaaagtgaggttattttaaagtttgtgaggttagggtgaatgtgaggttaggtggagacaaagaggttaggtggttttggttgatcatttgcacaggcgatttttgttgtcgattgtggtttcgaaatcgatcgattgattgatgggcagttatcgaatacgtgcacaaatgcgttcgatatatttgtgtatacattttcggttgtcagttatcgttatcggttatcagttatcggttatcagttttcggtggatcgttgttcgtaattttttgattgatttgatttgattgttttggtggtgagttatttgcattgcacaaatcgaatcgggtttttaatggaacatgaaaataaagagaaaaagatacaaaaataagcaaaagagaaaaacaaaaggagcgagacagcacagattgaaagagatagagagagttagagaggagcgcttagtctagaaatccactttatcagacatcgactatcgttcacgcttccttgggtttatatttaggagttaaggttctaaaaagataacaattgaatctctttctttgccaacaaaaaataaattaaaatccttgtcaactcttttgtttttgcttctttattctgcggcgggcggaaaacgaggacggcgaaatgagtgcggaaatgagtacactgagtatcgaatatatctggggatgatagcaaagatagctatgta

SEQ ID NO: 38075 - DNA, 819 bp, DROSOPHILA
atgacaaaaatccaaaacgaaaaaaaaacccaaaagaatggagccactgatacccagatcgatttgtcggccatcaacaagcaattggaggagacaatccgtgtggcccgccaggtgaaggaggcggaagcagccgccgccgcagttgccgcccagtccctgtccccatcctcgtcctccgcctcctcgccggtcgcccaggctcccattcccctcaaatccaacgagcccatccagctgagcttcaacaacgaactgcccagtgtctcgccgtcctccggtgtgaacgaaaaggccctgagcaccaatgatctccagctctccgagtccaagtcgccggcgatcgatgaactcaccctagactctgcggaggagaccgccgatctggacgatcgcaacaagaggttcctcagctttggcggtgcgggtctcgccggcggctcaagcggcggtgcaggaggttcgcccagtggcaatgctctgggagccggcggctccggcaacttcctgctggatgtggtgaggctcttttcgggcagtgttcagacccagcagggcgatgaggcggccaactcggtgggcggcagtgccggcagcagcagtagcagcggcagtttgggcggcgatggtgacgccgatggcgatagcactcgcaacgccgatggctacaccgagggcattcccggcccagtcacgcgcctcgtggtgctggccaatcgcggtctggccaatctcgtccaggatttgattctgcgcgttgcggccaccagcgagaagttcgtgaacttcaaggccaagctgataacggcgctgatctaa

SEQ ID NO: 38076 - protein, 272 aa, DROSOPHILA
MTKIQNEKKTQKNGATDTQIDLSAINKQLEETIRVARQVKEAEAAAAAVAAQSLSPSSSSASSPVAQAPIPLKSNEPIQLSFNNELPSVSPSSGVNEKALSTNDLQLSESKSPAIDELTLDSAEETADLDDRNKRFLSFGGAGLAGGSSGGAGGSPSGNALGAGGSGNFLLDVVRLFSGSVQTQQGDEAANSVGGSAGSSSSSGSLGGDGDADGDSTRNADGYTEGIPGPVTRLVVLANRGLANLVQDLILRVAATSEKFVNFKAKLITALI

SEQ ID NO: 38077 - DNA, 2228 bp, DROSOPHILA
ctggcaaaagtttcccagccaagcgacctttttttttttgtttcataatgtttttctttgagagggtatttatgccattgatactcgtggcgaatttcccaggatagatttttaagtcgttctcctttgtgggcagctccttgcacttgcaactttttaggcacgcccacagctcaggcaagcacttaatttaacaatttccctttgttggccacgccccttggccctcagccgcccccgacacacacacacacacgcacgcacacctgcatagctggagaattggtgggtgggtttttttgttcttacttgtatttttcagctcttcaaggcttatgcttttaggtttggagtgcactttggcctggcagatgcctcttccttgcctttctcacctcaacgaccttcaacaacaccaccccgccccccctttccttttccactcatttttgaccccaaatgcctgcccccgcctctttctccttctggtgatgctgacaaatgccttttatagggaaactgctgctgctgctgctactgctgctgctgcctctgttgttgtggaacttttttgcaccattaaggcaagcagttcgtctcaagggccattccagtcgggaaaactttcccccaaaggcagggcaagacaaggcatttggccaagtctgcggcggttcgctcataaattttaataatatttgactttacagataggtggtggcgtcagcggcggtgtgggggggcagctggtggggcataaagttaatgaaattgtttaatcactttcggtaacaggcaaatcgttgccagcggcaactttcaataaaatactaattaaaagtatatttaatgggtggattgaaccgtttagctggaaccgcaattaaaagcgaaaatagccggctaaaattcatggctagagagcgccatctctcgactaaataagcaggcaacaatataataaagttgcgcataataacatgaaaattatcataaaaacatgggcactggggaaactgggtggcaaaaactgttgccgacgcagcagcaacagcagcaacaatggaacagcagcagcaaccgcagccaggacaacagcaacatcagcagcagcagcagctgcagcagcagcacaaaagcaacacagagcacagcagcaacatcagttaactgcagcaacagtggcaacaataacagcagcacaaaaaggctgcagcagcagaggtagcagcaacaccacaccatccctttttgtgtggcagcaacatcagcaacagcggctagctgcaacggcaacatcgcaacagcatgcaactcgctacaacaagtgcaacaataacaactgcctttttgtcattccagcccacacgttgagtcacgtcaggtatgaggcatgccacacacaccccccccccccacatcaccctttggggaggcaacagaaatatggcaacaataatgcgtatacgccacgtggccaaaacagaaaataaagaaatggcgatgatggcggctgcggcgggaaaaacagaccaaaaggaatggccgggaaattgccaacggtgtctgcagtttcatgactcgccggctttattgtttttattttcatatttaaatatttcttttaattgattgaccaagcagcacggcgaaacaggaacacaaagtgtacaaaagccaagggggtagatatataataagtatggaaaatatttaagtttttatggtaaatacgaattcattttaactataaaggtgtcagtgtattatttagtttaaactaaagttattaaaagagaaaactcttttgtttttttttggaaaataaataagaacttttcaaatgaactttaccgttcactgcgtttctgaaataaacgagctatgtgtaatttagaaattcccccgggacctgtgcatttttcaggcttgaaaatccctgctgattcatggggaaaattcttggctaacactactcaatggccggcaattgcgattccgtcaaagggaaatggacagagcccgtggattcgtatcgaattcgagggcgtcgtcagaaaaacaaaaaaaaaaaaaaaacaaaaaaacgttctttttggatccgtaaacgaaccgcacggcggatcatcggcagtaaatgcgtgcagtaaaccgcagtttcagttgcccagctgcagttactggctgtttcagtccgttggtaaccagttgccagttgcaagttgcca

SEQ ID NO: 38078 - DNA, 228 bp, DROSOPHILA
atgggcactggggaaactgggtggcaaaaactgttgccgacgcagcagcaacagcagcaacaatggaacagcagcagcaaccgcagccaggacaacagcaacatcagcagcagcagcagctgcagcagcagcacaaaagcaacacagagcacagcagcaacatcagttaactgcagcaacagtggcaacaataacagcagcacaaaaaggctgcagcagcagaggtag

SEQ ID NO: 38079 - protein, 75 aa, DROSOPHILA
MGTGETGWQKLLPTQQQQQQQWNSSSNRSQDNSNISSSSSCSSSTKATQSTAATSVNCSNSGNNNSSTKRLQQQR

SEQ ID NO: 38080 - DNA, 2345 bp, DROSOPHILA
taacaacaaaatacaagcgactatttcttcttcgcttttcttttctttttttttttcaagccaaacatgtgcaaaaagatgtgatgttcgatggccgatagaaatagcgaattgtgtaatgaaagctcgtcaagcaaatcacttcagatgcagatacgctcaaatggtcaaaaaaaaatctctgcgagattaccatgtggaaagtctcttggtttatctataaaaatgtatttatttaagttacacttttcgatagtttagtcacagaacaatcccatatctgatgcaaggtgtttttactgactatcacatggatctacacttttacttaatagccacacaataaccaaagtaatttaatacccagcttcgtgtttctttattcctattgcttcctatgccactcgcatattttgcctagtttttttttttttttttttttttttttttgggggaattcgtaattgtgcccagcgtatctaagtatctaagtatctaagtatctgggtatctgccgcctggcactcatgtatccgtgcggtcgacgctttcttttttcggacagtttaatgaacacaggaaacggaaatcgttttgtaagtgtctgtgcgttagacagagatagaaacggctagagggaaagagtacgagcaatatgaacagtggtcaaatgcaaacattttgcataatttacgtctcaaaaatttcgaacatatctcttttatgcgaaaagttttgccaggaatgccagcaaaaaaaaaaaaaagtccagcgggccaaagcttatcttccgtttgattttccacatgctgcgttttagttgctcattaattaattgcatttgatttagccagcccaaaagcatataaaataaaaaaaagtttcaaactatttgaaacattaaaaaagttttgggcttccccggcactttattctatattttttatatatttttttagagagaccgcgagcgtttaccatgcatactaactgactattaatgcgagcagcagcagaaggagcagcaccaactggccggcggcaacacaaaaagtttcaactccatattgtgagccccagtggcaaggagaaagaagcagcaacatcgcagcagcaacaagagcagcagcaacaacagcagcagcagcaacatcagtgcaaacagcattagcaacagcagcagcaaaacgcaattagtagcagtaacaacgccagcaacacttacaacagcaacaggcagcagcaacaactgcaactgcagcaactgcaactgcaacagcaacagcagcaactgcagcagcagcaacagcaactgcaactgcaactgcagcagcaacacgactagcatcagcaacatatgtgcacaagagcaacatcagcagcttgagatgaaagcggcaagagcaatccaatttataaaatcataaaactatgcccaacaagtggaaaataaaggaaatcctgcagttataaagtttgtaaaactacaaaagaaagtggaaacttgttggaatttgaagagactgctttttgtacaggtgcaactcgaaatcaaataagggaaaaaatgttaaaaggaactttgcgggtaaaaagttaatattttcttgatgccctattttagttaccttaattgcgtttaggaaaaaaaatacatttgcagaaacaaagcaaaagcggcaatatgatgaaaaccaaagcgaaaccgaaacgaaaaccgacaaccaaaaaaaaaaaaaaagaaccaaatttaaaatgtttgccttcaggccataaacaagaaacaattgttttttagcaaatgaagagagagagtgagagagttaagaaaaaaagggggaaatatgccacttggaaaaaatcgttgctattaaaaaacattttaggaatttttgaaatataacttggcgacactaaacaacaaatattttagacttggtaatgaaaattagtgagtagtttaaataaatagttttatttctcagagaaacttaagagtacttatatgtgtattcaatgtttcgaaaaatattgataaatttagaaagcttattttttataaatttaattgaatttttagttatatattctctcagtgtcgtggctcgctgctaactcctctatcttttttcgtttcttcactttttgttgttgctataatttagctacctacgtttgttgttgatgaggatgctgccagcaacaacaacaacagcaacagcattaaaaacaacaagaaaacgaagggagagttacgttgacgggctcccaagcccattaaaaccgaacgtaaaccaaaaaattaggttgccaccaaacacacacacacaaactcggaaacacac

SEQ ID NO: 38081 - DNA, 270 bp, DROSOPHILA
atgcgagcagcagcagaaggagcagcaccaactggccggcggcaacacaaaaagtttcaactccatattgtgagccccagtggcaaggagaaagaagcagcaacatcgcagcagcaacaagagcagcagcaacaacagcagcagcagcaacatcacaacaggcagcagcaacaactgcaactgcagcaactgcaactgcaacagcaacagcagcaactgcagcagcagcaacagcaactgcaactgcaactgcagcagcaacacgactag

SEQ ID NO: 38082 - protein, 89 aa, DROSOPHILA
MRAAAEGAAPTGRRQHKKFQLHIVSPSGKEKEAATSQQQQEQQQQQQQQQHHNRQQQQLQLQQLQLQQQQQQLQQQQQQLQLQLQQQHD

SEQ ID NO: 38083 - DNA, 2680 bp, DROSOPHILA
aacttaaatgacataattcccttatccgataccctgtaattcatccgccaaaatcagaaagcaaaagccaccgacttggacgcgaaaaattcgcggggaatgtggtaagggatttgcttttgctctcactccccatatgttttttcctctttttttttgatttaaactctccatttttatttatttattttttttctgtctggcttttgttttcggtgtgtaactatttttgtaattttcttaattttttgtttcgcgcagcccagcggaatctttttgtgtagatttggtttggctttgcgggcgctgactctgatttctttcgattgtcttcccggggttcaaccccaccaccgcccgccttgtggcattcataattttcgtttgggaatcgagggtggagtgtagtgggtaggggagggtgtaggtgtgggtagaaatgttggtcatgctgcgggcaagattttcaagtgacacgagcagttaccgccacacacgcacacacaaacagaccgctttgtgcattaatttgctggtgtgaagtgctaatcaatatatggaggcagcagcatattaaggaaatgcaatttccacaggctgcgttggcttgtggatggggggtgaatgggggcggaaaaagtcacaaagttcccctaatttataagtcaaacatgccgggaaattccagaaggaggaatgcattctgcagttaaagaggggggatcaatgacattttcatcggtggcttaataatggaatggtcaaatgtttggaattataaattaaagccacgtgacgaaattaagtgtttatacataataaatgacagtagataaagttaaactgaattttaataacaattgagctgcaactgcctgctgaaacataaaatgtgaataaatcgatattgatttccacactttactttaagtcaattttttggcttagcttttaaagtcaattaacatttatagcaatatttgtgggtatatttgggaatttagctcgactcacctggtgatccatgacggttgcgcggtccttcggtgcgcacggcgagcagggtttccaggttgctgatggccacaagggccagtagcagcagcgccagggttgtcaactggccgcgctgacgatggtgctgcggtgattggtggtgctgctgctgctgcagcctccgatcgatggcgctgctgctgtgatgctgtgaatggcggtcgccgatgggcgaggatgatgaagatgatggtgggcccgatggggcggcatcagtgacctgcagcggatcggcggccgtatggctgtcgccgttggcggggtcatgggtcagcagggttgtcgctgatggtggtcgccagcgagaacgcattctggccttgctgggcggcttgcgaccaaatccgaatccaatgcccacgggcgtcggattcatttttggttcgtcgggcgcttcgcttgctgctccgctcctttctccttttcctgtttggtttctgtgggaatcctcgattcggatttgggtcttgttcgtttcggtttttttttgttttttttggtgaccctctggtgacctcttctctgcccaccgcacttctgtcttttttagggttgcccgctcctctggctttgttgcgttttactttttggaatatttatttttttcttttggtgggctgctttaatgaaataagcggaaaattaacgcgtttaatatttctaatttattattagggggcgtggccgggggggtggcacttgagagagcaattaattaaatttaactccccccattcgttttggcccgctcgtcttattccgtttgctcttttgcctgctaaacttttttgcttatgaaagataattgctcgctgcctcgctcgcactctagccccgtctctctctctctctctctctagctcgcttgctggcgtttggccctatctttttaacactttttacaataattgaaaaacttttttcggctgctttatgtgaacttttgccttcggcgtctttaaacttttctccttttccccgcgattttctttttcgtatttatttttatacaatttttcgtcggttttttctcttcttttttttttttttttttggattttgtcgattggtgtacttcagacacttgaaaaataaaaattaatatggtgtgagagagacggagatggcatcttgtcgcttgttgttgttggctctttcgtttgataaggaaattgcatatccctcggagtttttcacagagctccttcgttttttgcactgcaatcctgcaagtagaaaattgtgggcgaaaagttagcacaatgttgatccagactattttccaattattaagtgcagtgcgattagtttgtggaaagttgttaatcaagaatttgctagagcaatatgctggtaaatttccaaggaaatcattaagaaatagtttctaggggaatgctgtgaattatagtatatttggaaaagaacttttctcaaacacttctatggcgattagacaaatgttctaatactttcagctattatgccattttttcttttgcaataatttctccacataccaacgaccattatttttttagtgcaatttgaagactccggacttggaatcaagtggcattaccgcatcgaaagcgaaagaggaagaaagcggcgtggaaacgag

SEQ ID NO: 38084 - DNA, 680 bp, DROSOPHILA
aaagcagcccaccaaaagaaaaaaataaatattccaaaaagtaaaacgcaacaaagccagaggagcgggcaaccctaaaaaagacagaagtgcggtgggcagagaagaggtcaccagagggtcaccaaaaaaaacaaaaaaaaaccgaaacgaacaagacccaaatccgaatcgaggattcccacagaaaccaaacaggaaaaggagaaaggagcggagcagcaagcgaagcgcccgacgaaccaaaaatgaatccgacgcccgtgggcattggattcggatttggtcgcaagccgcccagcaaggccagaatgcgttctcgctggcgaccaccatcagcgacaaccctgctgacccatgaccccgccaacggcgacagccatacggccgccgatccgctgcaggtcactgatgccgccccatcgggcccaccatcatcttcatcatcctcgcccatcggcgaccgccattcacagcatcacagcagcagcgccatcgatcggaggctgcagcagcagcagcaccaccaatcaccgcagcaccatcgtcagcgcggccagttgacaaccctggcgctgctgctactggcccttgtggccatcagcaacctggaaaccctgctcgccgtgcgcaccgaaggaccgcgcaaccgtcatggatcaccaggtgagtcgagctaa

SEQ ID NO: 38085 - protein, 143 aa, DROSOPHILA
MNPTPVGIGFGFGRKPPSKARMRSRWRPPSATTLLTHDPANGDSHTAADPLQVTDAAPSGPPSSSSSSPIGDRHSQHHSSSAIDRRLQQQQHHQSPQHHRQRGQLTTLALLLLALVAISNLETLLAVRTEGPRNRHGSPGESS

SEQ ID NO: 38086 - DNA, 2600 bp, DROSOPHILA
gtatataactgaaaaaatgtacacaaaaccaagcgaattgtgggtaaaatgaaagtgaattgagacagaaattcagtgaaataccacttacgttttgggtagttgttctgttttttttttttttttttttttgaccacttgggaattttaattatttcgaggatgggtatcgagtgttgcgctatctttggtttcctgttgtcctttcgtccttaacacaccaattaaatattatttgcaattgtccttgcatagggaggatgtgtccatttttaagtcgtaattgtgggcgatgtgtctttggggagcgggcgacagttgtgggcgtggcacatggcacatggcacaggtgttaaccaaaattgctggcaatcaaaatggtcacgatgtgtttttctcagttggtttttttttttggttctctttcacgttcgttttgctttatttgtccgccttttcgcgttttccgcccattcttttcatcttaaattggtcttgtcatctcgctctttgtttaactgcagtttttcattttcgaagttttatattttcctgttctttttttttctgtgtgtatttcgtttttttatcttcagtttccacctaccattctttgccattttccatgcgatttttttttcttttttttgtttcatgcggtttttgtggtttgtttgtttgctttatgcggcagccgcgaaaagcaatttcccggtggaaaatcgtaggggggcagagtgtgaggggtgtgttttttttttcctttgtcgggtggaaagcacgaaatgttaataaaggtccagttgcagttcgagttggttcggagtttccaggcatttggttgtttgtattgcccagtgtccaaccgaattcatccgtccatctgtcgaagaaatccccatccaaccatccagccatccattcatccatccatccttctccacattcgtccatttttcgtccttttccccccttgctatcgtgcgtgtccttcagctgcttatgtctgcacgggcacattgctatcggcctcctgcagaacgggcgctgtccagacgccgcttccgctgcgcgtcttccgctgctggacgatgccatccatgatgtccagctgcaagttgtgcacgctgccgcggtgatcggttaatggcggtccggcgatgacgctgccacggcgactgccactgcaaaaaaattaaatttaattcttaaaaatcatttaaaaaaatttatttattgtagtatttttctgaaattatattaattttatataattaataatgtgtaatattaacttgctttaaaggttttttcctttgtgtattttttatttatatcccttctggtctaatcctaatttacctttttttgtttaggtattgcagatattgcagaaagcgtaacaatttggcattttagctgaggctgttacaatttttattttactaccatgactatttccacattcacattcatgtgaaccgatagtaagtggttgatggttgtgcggttatcactttagcataaattatacgccccgttggcgctccttcccgtgcaccacaccccttggaaattccacgacccgaggccgctcatctacagccgccaacttggaatcgtaaagtgcgttggtcgtttaatggacacgcgacacgggaaaaattgtggcacggtggaggtgggggattttaggagtttggctagccaagatgggtggaatgcaatttaaatgaccaccacaccaaacttgcacaaagtcaggggcaaaagcaaagtgaatgtggtcgaaatggcagtagattttgtgccagccaagtcggttagaagttgctctgagttatagaaaaaagatttaaaattaaacctatgcaataaaatcgatctgtgataaattgttcaaatataaagcccacattaatcaataataattaatgcgtaagaagcttaagacattttatcgaataacttttactgtatatcttatctaccataattattcagctaataaattcgcttgagtatgatgccccaaaaagtatgctacaaacttttcgaaatgcttaggattttattgcatcttctaacgcattgattgctatactcattatttgcaggcccatcagcttactcccatctctgggtaaaattatggagaggctgatcctaaacaggctgctcacatgcaaggatgttaccaaagcgattcccaaatttcagtttggcttccggttgcagcacggtactcctgagcaactacatagagtagtgaactttgctctggaagctatggaaaacaaggagtatgcagtaggtgcctttcttgatattcaacaggcatttgacagagtctggcaccctgggctcctgtacaaagcgaagaggctgttcccgccgcagctatatttggttgttaaaagtttcctggaagaacgcacattccacgtctctgttgatgggtacaaatcatcaatcaagccaattgcagctggagttcctcaaggaagcgttcttggcccaaccctatactcagtttttgcttcggacatgcctactcacacaccagtcacagaggtagacgaagaagatgtgctcatagc

SEQ ID NO: 38087 - DNA, 250 bp, DROSOPHILA
gatgagcggcctcgggtcgtggaatttccaaggggtgtggtgcacgggaaggagcgccaacggggctggcagtcgccgtggcagcgtcatcgccggaccgccattaaccgatcaccgcggcagcgtgcacaacttgcagctggacatcatggatggcatcgtccagcagcggaagacgcgcagcggaagcggcgtctggacagcgcccgttctgcaggaggccgatagcaatgtgcccgtgcagacataa

SEQ ID NO: 38088 - protein, 82 aa, DROSOPHILA
MSGLGSWNFQGVWCTGRSANGAGSRRGSVIAGPPLTDHRGSVHNLQLDIMDGIVQQRKTRSGSGVWTAPVLQEADSNVPVQT

SEQ ID NO: 38089 - DNA, 2100 bp, DROSOPHILA
taaataaataattaagcagatcaaattaagttgccgcatgggtaacagtgcgttgatcaaataataaaaacatcatcgtaatcgtaaaaaaaaaaaaaaaaaaaaaaaaaaatactcattatttggcctcatcgtacggtcgcagtttatgacaatctcattatgccctctggctattccatgccctggagacgcccacttcctgcaaagccgcccccacgcccattagggtatcaaaatgttgctgtcacagcagaaatgcttggaaatagccggcggcgcaattcaattaggcccggtacatagagtcgcagatagcaaaagggcaagagatccatccaaatgtgcacagagagaaaaatcattaatttatgcttaaaatatgatcgagactcaaactttaaatcattattttcaagctaagataaattctattaatatggtaaaatgcatggcttctagctatctacttctacttgacacaattttctttctctttttccattttctgtatacttttcttcagtgtactgattaacaaaggtcctgcggttgcgtgtcctgctgcgcgcagcccgcgcacttccgccggccaatggttaatagctaatggcgaatcgttcttacctgaaggatacaccggaaatggactcgcggcgattgcgtccgaaaagcgttggcggcaccgccgatatggtgaccaccgagtgcctacgtccaccggccgtcggattggccttctgcgagagcgtggccagaaactcgacctccttgggactgagcccgccagtctcgccgcccacctccgacaatcgacgcacctgactggcggtgatgccctcggtaatttgaagcgatggcagcgaatgcttgcgtcgctgttgcatatcgggaaatgggcaaagcagatagggattcaccggcgagtccggttcggagtcatcgctgttggaacggcgtgtcccggccgcagtgggatcacatccaccggcggcaccctccaagtcatcaccatcctcggcggtgtgcgattcctccaccacgatcagcggctcctgggtgctcaagttgaagacgggcgtgaacgaggagcgacgcattttttctggctgcttcaattactttgcttactctgcaattgttcaaaatgaaatagatattatttgactattgtcaatgtccattgacattgttatcacagttcccaatgaaattcccatttgcatgacctactcgattgtttttgttcgtgcagcttaaaagcaaaaaagtgctgttgacattttgcggtcactgtgcacaggcggcaactttcgaacaatcaaattcggttagcaaaaattttgtatcaactgcaaaagtttgccacagctgagcttgatttttgcggcgccaacttttgtttactttgattgttgaattgtccacgaaggcgttgtgtaaattcatttgcaatgctgatgatgatggtggcaaatgtggtatgaaaatgcgacctaaagacttaaaagaaatggcaaatggcaaataaaatgaaaaacattgaaagtgtcgaataaacatcgaatcaatttgtcactccataaagctctgaactggattattgatatatccctgggtcggccggtagttatgaattgtggtattgcattattaatacatgtattaaaatattaagcgagacatgcagttgatcggtttatattgttcgctttttcctttaatataatctcttttggtgtttcgcttttaattaaataaatacaagcatttacaaacgttttcaaattgattaatcgcgattaatgcgcgacatgggcgggtaatgtttaaataattgctatctactgaatttaaatgtgttaacgctcttttttttttttttttttttttgttgaaccggaaatctgtagcgaattagtcacaaaacattcatataaatataaattgagtttaaatagatttcgagcagacaaaaaaaccaaccaacaatgggcagcaaattgcgaatgccaccattactcatacttgtgatgtgctgcgattcgataatgggtggatccattcgaagtaaagtgagcatgcttcgctagttcaatt

SEQ ID NO: 38090 - DNA, 477 bp, DROSOPHILA
atgcgtcgctcctcgttcacgcccgtcttcaacttgagcacccaggagccgctgatcgtggtggaggaatcgcacaccgccgaggatggtgatgacttggagggtgccgccggtggatgtgatcccactgcggccgggacacgccgttccaacagcgatgactccgaaccggactcgccggtgaatccctatctgctttgcccatttcccgatatgcaacagcgacgcaagcattcgctgccatcgcttcaaattaccgagggcatcaccgccagtcaggtgcgtcgattgtcggaggtgggcggcgagactggcgggctcagtcccaaggaggtcgagtttctggccacgctctcgcagaaggccaatccgacggccggtggacgtaggcactcggtggtcaccatatcggcggtgccgccaacgcttttcggacgcaatcgccgcgagtccatttccggtgtatccttcaggtaa

SEQ ID NO: 38091 - protein, 158 aa, DROSOPHILA
MRRSSFTPVFNLSTQEPLIVVEESHTAEDGDDLEGAAGGCDPTAAGTRRSNSDDSEPDSPVNPYLLCPFPDMQQRRKHSLPSLQITEGITASQVRRLSEVGGETGGLSPKEVEFLATLSQKANPTAGGRRHSVVTISAVPPTLFGRNRRESISGVSFR

SEQ ID NO: 38092 - DNA, 2695 bp, DROSOPHILA
caggtgaaggtcgagttcctgggcgagcagaaccgccagattatccgaaacgtgaagggaccagttcgcgagggcgacatcctgacccttttggaatccgaacgtgaagccaggaggctgcgctaattggcgaccaaactcgagaaggtaagcgcacctggaatattggccacagtgaacacacgtcttaacacaccttctatttattccgcagacctttttacacacacatacacaaaactgtttttcgcacgcgccttgtttttttcgcggagaagaagaagcggatggcaagaaatccgaacgaggctgctgcatattcgttataaacaaatgaaaatacacacctaattcgccagaaaatcagcaaaaatgtgttttaaataaatctcgagagcattggaccgcctttgtacgaaaagaaaaccaatcaagcctgtgttttggtttcattaccttttttgtttctgtgttttttttgagtgcccagtgaaaattgacaatggaatgtggtcttcaagcgacttcctttaacaatatgtatttgcatttagcagaaacccttgccttctcggaaatcaacaaagaaaatacagacgaaattctccagttgctaaaaacacgtttcgttgatttccttataaacgcaaagtttttctgttaaacacaatgatcagaagttctggacacgttaacatcttaaaaaaaatgttttattttttcgtccacgaaaagatatttcaaagagaggccagccgagtgattatatagcccaatcacatttcagatttgacaatcaatgttaatgaatgcacagtattttttgtataaaaaatagtttaaatatttgaactgctggagctgcacagaaaatatacgtaacatttttataataaaagtcaatagctcagttagttaatatataaaacattgtatagcaaattatggtttaaaaccactgaggtgcatatgtttctatattccttaagcctaattttccctacaaagtcagcggaaaactggacagtctctctattttggccaatccaagggtaatgcgtgcttctgcaggttccggcagttggagatcggatttgaaggactccaacgaggattcgggtgcggaaaacttgggttgcagctgactaagatgaagctctaggtatttaacctggttctgcagcagtttcagcgattcctccaggaaatttctgaattctgtcaatgctgcaggtgttttggtttgctgctgctcattacataggtgcaggcactcaatctcgaagtcagttacttgggcggatatctgccctagctcggaaaccagtttcgatctatgaattggatggcaaggcaaatcagaaaagtttctggctgggattaggccacttacatgctgtcctgcaggctacggtaaacatcgtggcacaccgaaagaagcgcaaatgtggcaacttgattggaactgcaacaaagtggcaaattagcattgttttcatttatcaaatgaagtttttaccccgtgaccagtcgataacgttggcccaattcccacaaccgattcgcttggttcgacaattgaggcgtcgtcgcagacttaaggcatagatagctccttatggtggtggccaaatgctttaactgctgctccaaactggttttgtagtgctccaagcgatcctctgacaatagcatcgcaacaatgcagtacaatttaggtaaattgagggaatttgttatattctacgaccgtcatcgataacacgaaaacttatcggcacatggaggagctggcgatcgccaccagaacgatatttatcgcacaaacgttatatttctgcatttttgctcaaaaataattatttttgcaaacttattattaaaaataagcttctattgaaattttcaatcgtactatgctcgaccatgggaattttgttcatatgagcatttttagccaagttatgatgaaaattccgtttgtaaatatcaactttttggcaaaatccgttttttcgaatttcggtcatcaaataatcagttttttggccataactttaaaaataattgtctgaatatggaatgtcatacctcgttgagctcgaaattaaatttccaatcaaactgtgttcaaaaatggtaattctatttttttgaaattttttgcaaattttgatgatgttaccccttacaaaaaatgcgaaaattgacttaaaaattaatttccctaaaaacttcaaaaagttatagggatcgttagtactggtaattagctgctcaaaacagttattcttacatctatatgagcatttttggccaagttatgatgaaaattccgtttgtaaatataaactttttggctaaatccgtttttccgaatttcggtcatcaaataatcagttttttggccataactttaaaaataattgtctgaatatggaatgtcatacctcgttgagctcgtaattaaatttccaatcaaactgtgttcaaaaatggaaattctatttttttgaaattttttgccaattttgacccaaaaattaatttccccaaaactttgttagcactaataattagctgttcgagctacagaggtgatcaaaagtatttacacaacgtgcttttttttaattgtcaaaaacctacaaacatcaaacacaaaacacatccaaatacagtcagcgacatgaac

SEQ ID NO: 38093 - DNA, 582 bp, DROSOPHILA
atgctattgtcagaggatcgcttggagcactacaaaaccagtttggagcagcagttaaagcatttggccaccaccataaggagctatctatgccttaagtctgcgacgacgcctcaattgtcgaaccaagcgaatcggttgtgggaattgggccaacgttatcgactggtcacgggttccaatcaagttgccacatttgcgcttctttcggtgtgccacgatgtttaccgtagcctgcaggacagcatatcgaaactggtttccgagctagggcagatatccgcccaagtaactgacttcgagattgagtgcctgcacctatgtaatgagcagcagcaaaccaaaacacctgcagcattgacagaattcagaaatttcctggaggaatcgctgaaactgctgcagaaccaggttaaatacctagagcttcatcttagtcagctgcaacccaagttttccgcacccgaatcctcgttggagtccttcaaatccgatctccaactgccggaacctgcagaagcacgcattacccttggattggccaaaatagagagactgtccagttttccgctgactttgtag

SEQ ID NO: 38094 - protein, 193 aa, DROSOPHILA
MLLSEDRLEHYKTSLEQQLKHLATTIRSYLCLKSATTPQLSNQANRLWELGQRYRLVTGSNQVATFALLSVCHDVYRSLQDSISKLVSELGQISAQVTDFEIECLHLCNEQQQTKTPAALTEFRNFLEESLKLLQNQVKYLELHLSQLQPKFSAPESSLESFKSDLQLPEPAEARITLGLAKIERLSSFPLTL

SEQ ID NO: 38095 - DNA, 2776 bp, DROSOPHILA
atggggcagtaaaacacctgacattgcaatggaagttcgtgataaagtgtcgcgttagctggtgggctgatattctttttgcttttgagcaattctcagggtggtaagtgtgtatatgaatgtaggtatggaacttgaaacccgagagacttatggcataacaaatatagttagcaaaaattagccaaaacattattttactgaccacaatgattcttagtagtatacgaataataaatttttttttttgatttcgcaaaggaaatttgttcaagcttgccaatagtattgactgcttggtattcatttctataaataaatgttacaaattgcaatggacagggtaaaattgggtgcttatttaagaaaatatgctacacaagacaccctacaaatatatgattttattattaagtttatcgtatgtaaatgataacatttttggcctgataaaatcgtggggtcatcgacattaggaaacgaacgaacacaacgcacaacaagtacctccagttttattaatataaagatttatgtagatttaagccagttgtttagatcagtgtatctataggtacattttatttttcgctttatacaacaactatgtataacaacaataacggcacacgagccataagaaccggcgtcgcagcagcattagcaatagcagcaatagcaacaaaatgcacaacaacaagcccctctaagttgttggcctaccaacaacaaagagaacaagaaaatcatacgattctcgctgccgctagcgaaaaaagaaaacgctgacgtaggcagagccgtcggcagagacagataaaaaaaatcagaaggaagaggcggtagaaaagaagcaaagagtataacaaaaacaatacaagcaataacaagaacattgaccaaaatgtaacggcaaatgcatgtcaagtgcaatgcgaagaagagagatgggacgaaagaaagttctttgggctccttcaacctcctcccgctctctctctcactctccagtggagatcgacaggggcgggtgtgtagaaggctggcaaagggatgaaatttaatttaaatttgaaatgcaggttaacgggtatttcgcatatacaaatgtatgtattttaagaaggaagagctcagatcataagcccccctttggatgcgcgcctggagatcgcacgcacatgtgcccgatttgcatgaatgacagagcgagatggctagcgggaagcgggtgaaacaggggcgtgggataagaagagaatggaatgaaatgggaggaagggggactcaccttggccacctctatgtgactgtcgatttcgatgcgatggacaaacggattgatgtagttgtaccccttggatgcccacgtatcctcctcggagtcccgtttcgtcaaactggcggccactcccacatcagcgacattgcccaccacccccgccggcggaacttcatcgccgcccgttggcttaattgtcgacgttgtcattgcccccagttactccttttcttcttgcacacttctttctctcactttgctatcacaccacgcactcccgcacagcggttaaaaaatatgtaaaaaaatatttaaataataacaacaatcagtgttatctcctcactgtccacgacttcactggctttaaagcgctgccttttgccgtttttcgtccaccgtttatgagtggcaattttttttgtattttataccgcaaactcagatcgcatagtatagttattggattcgctggtgagcgacacaacaacaaaatacgttttgcaaactctttagtgcgcagtttcgcaacactttcgcagcagcgttgtgcagcactgcgtggtcgggcgatagataccaaaaaaaaaataccttaggaaatacccactttaatttccgaagatctggcaacctatactgcgtgttagttacttaatttagatacttaatttatgttaagtattagtacttttagttttgttgctcttattcaactaacaatatttcgtatatacattttccaaagatctggcagcgctcttgaagtgtgcgcgcgtaaaatttgaatttgaaaaacatagttcgttcccctttaaaacgtttgaccgtttgaccgctttacgtgcttcgcagacacagcatcgcgccatcgattagttttatggcacgggcctaatcctaatctaaatcgctggcagcagacccacggttcacggcccagtcatctcatgtgtctgaaacgtgtttggttttgtcccaaaactttacgatcttaatcgaaaacgtttccaaggcaagacacctagttagttggcaaacatacatacatatgtctaggcaatatacatatgtatgtagctttatcaacggttgagaaacgccgaccaatccaaccagttttattccgttgcgtcggatggttagtttttcgagataaaacgggtttattcgctactgcgatgatcacctgcaattcgtttttttttttcgaaggcagcggggcggcattaactgttatacgtcggtgaccttgacgaagtttattcgccgccctttaccccgtgaccttgcccaacgcgactccattctgcacgaaagcgaaaggagttcctgattagggggattcatacacatggcagtggtatctacatacgtacttatggtggaactacttctggttgaccaagccccccttttttcgacgcccaccgcataatcagccaaccgcttccaaggccaaaaacgcgatttttaatgactgccactggaatt

SEQ ID NO: 38096 - DNA, 527 bp, DROSOPHILA
tttgttgttgtgtcgctcaccagcgaatccaataactatactatgcgatctgagtttgcggtataaaatacaaaaaaaattgccactcataaacggtggacgaaaaacggcaaaaggcagcgctttaaagccagtgaagtcgtggacagtgaggagataacactgattgttgttattatttaaatatttttttacatattttttaaccgctgtgcgggagtgcgtggtgtgatagcaaagtgagagaaagaagtgtgcaagaagaaaaggagtaactgggggcaatgacaacgtcgacaattaagccaacgggcggcgatgaagttccgccggcgggggtggtgggcaatgtcgctgatgtgggagtggccgccagtttgacgaaacgggactccgaggaggatacgtgggcatccaaggggtacaactacatcaatccgtttgtccatcgcatcgaaatcgacagtcacatagaggtggccaagccttctacacacccgcccctgtcgatctccactggagagtga

SEQ ID NO: 38097 - protein, 80 aa, DROSOPHILA
MTTSTIKPTGGDEVPPAGVVGNVADVGVAASLTKRDSEEDTWASKGYNYINPFVHRIEIDSHIEVAKPSTHPPLSISTGE

SEQ ID NO: 38098 - DNA, 4374 bp, DROSOPHILA
aataacaacaaatataagcattttgagcactagctgaaacgacaacaacaacagcaacaacaaaacgcatgctcacccaattgctttgacacacaaacccacacatagaaattaaaacaaaacgcccgcggcagcagcgccagcaataacaacactgcaacagcaacgtggagagagagcaccataccgcaagagcgaaagagagagagagagtgagctagctacggagagtggctgctgctgccgggagtgacacttccgcgccacacgtgcaagcgagacgaagcgagttgccccgaaggcacaccgttgcggccaaaaacaaccaccatgatggtgccgagagcgagagagagcgagagctggctcagcgctcagtggcgatagacgagtgcgagaatgtgacagcacgagcagcagcagcgctgccgctgccctctgcccgcgcctctgcccgcagccaagtggattcgttttgtacgttgttagactctctcgccgcgttttggaattcagtcgacaatcgacgataattaccggtggttgtatcacatcacatcacgcgcagcagcagcagcactacgaacgaaagaagaagaagcagaagagccagccgcagtggcagcagagaaactcgctcgttttcggatctatatatatatatatgcatatagatttgtatatatagagggatatatatatatatatatttgcacgcagcattggcgaattttcggccgcctttaatttgtttgtgttttttccgtgttctcctccgcgtgctcgcaattacgtgcgcggcagcaaaagactataattataaaactaaagtgaaaagcgtgccataattacacgagcgaatatcaataagtgcaagagcaatgtgcgaaaattgttaacgaacgcagtagcaaccagaagcagtaaaacgcagcagcaatcgcagcagtaggatccaaacaaatctcagcgcaacattaaaatcgcaagcgttttcaacatgatcgatgcggcctgcaattacttaaatccctatgcgcaacagcatcaggcgcagcagcagcaacatgcgcaacatcagcaacacgcgcaacaacagcaacatcatctgcacatgcagcaggcgcaacatcatctgcacttgtcgcatcagcaggcgcaacagcagcatatgcaacacttgacacagcaacagcagcagcagcaacaacaacagcagcaacagcagcagcaacagcagcaacaacaacagccgcaacagcagcaacatgacttcctcagcgccgccgccctgctgtccgccccaccatccctatccggctcgagttccggctccagctccggcagttctccgctatatggaaagccgccaatgaagctggaactgccgtatccacaggcctcatccacgggcaccgcatcgcccaactccagcatacaatcggcgccatcatcggcctccgtgtcgcccagcatcttcccatcacctgcccagtcattcgcctccatttcggctagtccatccacgcccaccacgaccttggcgccaccaacaacggcggcagcgggcgccctagcgggatcacccacatcctcctcaccatcctcgtcagcagcatcggctgcagcggcggcagcagcagctgcggcggcagcagcggaccttggagcagcggcggtcgccagtgccgcctacggctggaataccgcctactccggattggggccagcgaggtaaatatccctatatataggatttacagaagttgagttgggaatcattcgtaagaaagaaactttaaaatgctagtgatcaataaatcaaagcttatagatcatcaaatttgtggttattagggatacactaatttcgatctgaattagatctccttttaatagaataactacaggctgattgtatttcgatcatgagcgagataaagacatatatcttttgcaaattatacagtttaatacataggaatatattaatcaaattatcccgaagattgaaatggattagcatacaaataatctcataaacttataaaatgataggtaccacttgaatacattacaatttagtattccgatagcaggtgtacccattaagtaaatgattaaaaaaaaccaaattaaccattctctgtcttcatttcttttctccatctagaagtcagtttccatatgcccagtacgcctccgattattacggcaatgcggtgggcatgtcctcctcggccgcttggttctcgcatcaggagcgcctctatcagccatggagttcacagagctatccgggcttcaatttcgacgacatcgccttccagacgcaattgcaacgccgctccgttcgctgcacgtgtcccaattgcaccaacgagatgagcggcctgccaccgattgtgggtccggatgagcgcggacgcaagcagcatatctgccacattccgggctgcgaacggctatacggtaaggcgtcgcatctgaagacccacctgcgctggcacaccggcgagcggcccttcctgtgcctcacgtgcggcaagcgtttctcccgatcggatgagctgcagcggcacggacgtacgcacaccaattaccgcccgtatgcctgccccatttgctccaagaagttttcgcgcagcgatcacctcagcaagcacaagaagacccatttcaaggacaagaagagcaagaaggtattggccgccgaggccaaggagcaggcggctgcggcgataaagctggaaaagaaggagaagaagtcgggtaagccactgacgccacccgtggaattcaagcaggagcagccggatacgacaccgctggtcaactatgcgccctatgccaatctctatcagcattccacatccgccggatcgagtgtgaatcctccgccgccaccgccgccgctcttccagcagcagatgacgacgacaacatcatcggcggcggccagctttgtggagcagccgtggagcagtagcagcagccgtgccatacaaccagccactacctcagccagttcatcctcatcctccagcgccagttccccagcggcagcggtcgtttctgccattggatctgcatcttccccagccgcatcagccacggcgctggcccagcatcattatgccgcacttgccatgcaaagtgagtcccagctggcggcggaatatgggctaaccatgagcggattggccagcggagctagccaggattccagctccagttgccacatgaagtccgagtatgcggccagttatccggctgattttggtgcgggaacagccagttacggttatccgcatccacatccgcaccatcacaatgcgtgggcagcggcctatcatccacatgccaccgcctaggatgtccccgatccttcccaaaattgttacagttgaaagttgatgaaacaaatgccataatgtcccaaaacccagaacggcaacaaagcaagcgtagaacgaaaatctagtgtgtgtttttttttcagtgtttattgttgatataaaaatataatgtgaaaatcaaaaaaaaatttgaattcacaaaataccgtataaggcattatataatattatataaatatatatatatatatatacatacacatatattaactatacatgtagagactagaacttgaatttttttcattttttttcccccaatctagtagctaaggcatttttttttgcatgtctgtacatacaaacatatatagcgttctttttaagccataccatatagaatgagagaaaccatctagttgtgtaccataataattgttaattgtctttaagataaattatatacaacaacaaaaagtgaaaaatccaaggcgacaaaatccccacactgaaatgaaatcctaacaataaaaaaaaaaaacgaacaaaataatatcggaaaacaaagcgaatccagttttttattattctctccgatcccgacgcacccttgttaatgggttcctggcttggttagatttcagggttgtttgatctccgccaggggttgctttcttgcatataaatcgagggatccaggaagcttcccgacttccggcgaacttgatctgcttttgggtgctgacctttggcggtatttggataataatagaaactttttcaatagcaatcattatagctgtctgcatttctagttataatttcatcaacgtcggccatcgctttaaaattgcaaaaacattgttagcttgggagatgtacatcatttatagattgctttactttaaaatgtgcataaataaaggtacgaatgtgatatgtatatatccttaaatacaatgatttatttagtcaagatacacatagttgtagaatttcataacaatcggatgtg

SEQ ID NO: 38099 - DNA, 1935 bp, DROSOPHILA
atgatcgatgcggcctgcaattacttaaatccctatgcgcaacagcatcaggcgcagcagcagcaacatgcgcaacatcagcaacacgcgcaacaacagcaacatcatctgcacatgcagcaggcgcaacatcatctgcacttgtcgcatcagcaggcgcaacagcagcatatgcaacacttgacacagcaacagcagcagcagcaacaacaacagcagcaacagcagcagcaacagcagcaacaacaacagccgcaacagcagcaacatgacttcctcagcgccgccgccctgctgtccgccccaccatccctatccggctcgagttccggctccagctccggcagttctccgctatatggaaagccgccaatgaagctggaactgccgtatccacaggcctcatccacgggcaccgcatcgcccaactccagcatacaatcggcgccatcatcggcctccgtgtcgcccagcatcttcccatcacctgcccagtcattcgcctccatttcggctagtccatccacgcccaccacgaccttggcgccaccaacaacggcggcagcgggcgccctagcgggatcacccacatcctcctcaccatcctcgtcagcagcatcggctgcagcggcggcagcagcagctgcggcggcagcagcggaccttggagcagcggcggtcgccagtgccgcctacggctggaataccgcctactccggattggggccagcgagaagtcagtttccatatgcccagtacgcctccgattattacggcaatgcggtgggcatgtcctcctcggccgcttggttctcgcatcaggagcgcctctatcagccatggagttcacagagctatccgggcttcaatttcgacgacatcgccttccagacgcaattgcaacgccgctccgttcgctgcacgtgtcccaattgcaccaacgagatgagcggcctgccaccgattgtgggtccggatgagcgcggacgcaagcagcatatctgccacattccgggctgcgaacggctatacggtaaggcgtcgcatctgaagacccacctgcgctggcacaccggcgagcggcccttcctgtgcctcacgtgcggcaagcgtttctcccgatcggatgagctgcagcggcacggacgtacgcacaccaattaccgcccgtatgcctgccccatttgctccaagaagttttcgcgcagcgatcacctcagcaagcacaagaagacccatttcaaggacaagaagagcaagaaggtattggccgccgaggccaaggagcaggcggctgcggcgataaagctggaaaagaaggagaagaagtcgggtaagccactgacgccacccgtggaattcaagcaggagcagccggatacgacaccgctggtcaactatgcgccctatgccaatctctatcagcattccacatccgccggatcgagtgtgaatcctccgccgccaccgccgccgctcttccagcagcagatgacgacgacaacatcatcggcggcggccagctttgtggagcagccgtggagcagtagcagcagccgtgccatacaaccagccactacctcagccagttcatcctcatcctccagcgccagttccccagcggcagcggtcgtttctgccattggatctgcatcttccccagccgcatcagccacggcgctggcccagcatcattatgccgcacttgccatgcaaagtgagtcccagctggcggcggaatatgggctaaccatgagcggattggccagcggagctagccaggattccagctccagttgccacatgaagtccgagtatgcggccagttatccggctgattttggtgcgggaacagccagttacggttatccgcatccacatccgcaccatcacaatgcgtgggcagcggcctatcatccacatgccaccgcctag

SEQ ID NO: 38100 - protein, 644 aa, DROSOPHILA
MIDAACNYLNPYAQQHQAQQQQHAQHQQHAQQQQHHLHMQQAQHHLHLSHQQAQQQHMQHLTQQQQQQQQQQQQQQQQQQQQQQPQQQQHDFLSAAALLSAPPSLSGSSSGSSSGSSPLYGKPPMKLELPYPQASSTGTASPNSSIQSAPSSASVSPSIFPSPAQSFASISASPSTPTTTLAPPTTAAAGALAGSPTSSSPSSSAASAAAAAAAAAAAAADLGAAAVASAAYGWNTAYSGLGPARSQFPYAQYASDYYGNAVGMSSSAAWFSHQERLYQPWSSQSYPGFNFDDIAFQTQLQRRSVRCTCPNCTNEMSGLPPIVGPDERGRKQHICHIPGCERLYGKASHLKTHLRWHTGERPFLCLTCGKRFSRSDELQRHGRTHTNYRPYACPICSKKFSRSDHLSKHKKTHFKDKKSKKVLAAEAKEQAAAAIKLEKKEKKSGKPLTPPVEFKQEQPDTTPLVNYAPYANLYQHSTSAGSSVNPPPPPPPLFQQQMTTTTSSAAASFVEQPWSSSSSRAIQPATTSASSSSSSSASSPAAAVVSAIGSASSPAASATALAQHHYAALAMQSESQLAAEYGLTMSGLASGASQDSSSSCHMKSEYAASYPADFGAGTASYGYPHPHPHHHNAWAAAYHPHATA

SEQ ID NO: 38101 - DNA, 15667 bp, DROSOPHILA
ttagctaaaatcgtccttaaacaatataaacaatcaatcgtgaacaatttgttagaaattacaacactaatttgttgtcctacgtatgcatatatgttgtaaatgttagttccttaattagttcaagtaccctaaaactgttttcaaagcattttggctattgctattttgttgcacttgttaatcatcatactcctctttcgtatcgctaacccgtccatccatctgtttggtgtttcgtttgctactatcgtatcctgattcttgattctcctaattgcgttctccttctccttgtcaatctcgttctcgtcctcgaactcctcgcctcatcatccacatttctacttattgttgtctgtcaattggaagtgatttttagatttggatttcgattttgtgctcagatgaggtgagacttcccgttatcaatttcaatttcaatttggagttcgagttcgattccgattcagatttagatttagatttagattcagattcttattctgctgttcgatctgtgtataaaaatatgtatttactctatgcgtgttcccaatttgaagctcctataaggagcacttaatcaactgccgatcgccaacaggcacatgttcactataggctatatatttcttgtgcggatgcggatgcggatgcagatgcgaatggtcgggtgatttgggtcgcgtcgttgttgtgtttgttgttgtcgtcatcgctcaactggctgcttacaacactacaagggtacaaaaaacttaattcaactgtacaacatgctatatctggtctgtctcacaatcatgacagactttcaacagatttgcgagttgcgtttgctttctagtggcggagtcacgaaataaataatgttactttactaaacattccgatgtaagtcactaaggaaaggttattagctttcgctcaacgttttaaacgtcgtcacatcgagatgtctatctgtagcttcttctcctaatcccgatccctatgctttttttttttctatatctgcttagtggaaacgaaggaatcgcattaattaatacatggtgtgtgtgtgttttgggggcatatgaaatatatgatattatatatttgctaaatcgcggacataaaatggaaatcgaatcataatgctctgtccaactttcgtcttaaacttaaataataaggtatttgttagtggttgtaatggtgggtcatcttaatctacagtacacattaggcgcgatatttgttgatttaattataacaatatacaattatttgtggtgccgtttaaaaaaaaaaaaaagatttaagttagtaatagttgttaattcgcttaacacacactggttatccctgccggttggtcttcgtcgtcatcccgtctgcggctactggacactcattcattcattcagtctagccctagccctctagccacatcgcctaccaaccattgtagctggtggtggtgctggtgctggtgctgctgctgttgctgcactagagtcgctccacaaacttggtcagctggtcggaggcgtcgggcagggctcctccggcattgccgacgcccacgttgccgacgttaacgttaacgccaacgccaacgccgacaccgactccgacgccaacatcctgcggcactcctggcagtggcgactgatgatgcatgccatgattgtgcatgccgtcatgcggtggtccctgcggcgctggcgagtgactgctcatcacatggtgcggcgagggctgtgccctaggcgaggcggatggagcagcacgtggcgatggagccgaacgtggcgatggcgttggctgcggggagcgaataggcggcgacgagcgggccgattgcatcagctgctgctgcagagagtgcggcgtcggcggacccatcacctgagcattgggtccgccaaccaccgccgacggattctgggcattcgcatttggcattgctacctgcatcatctgctgctgctgcagcggttgctgttgctgctgttgctgctgcatacccggcggcatgccaacgcccatctgctgttgctgttggccgggtcctggtttcacgcccacgcccactccgacgcccacctggccctgctgctgttgcagcatattggaggcagccgcggcattcgccatcgagtattgatcgccaccgggcaccgtgccggcacctccgggcactccgcccacaccgacaacgccgcctgcaccaccagcaccacccgcattaaagttgcccgctccacctccgccaccggggaactgttgctggccgggaccaggtcccgctccgcccatgtgcgggccacgctggcgctgcggatacggtggcgggtactggctcatttgcatgtaacgcatcttgttccagttttggttgggcacctgtgttgagggtggaatgttttctcagtataaaaacggaaaatcatagggctaacaaatagtaatacaaataataataaataatatgaaataataatacaaatagtaatcaaataataagactgctaaaaattcgtgaacttaaagatttaaaattgcttaaacagagaatataatttagaactaaagttttaaaataaaaaggctcattcatgtactattgtttctgggcacttaccattcctccctgagtagaaacgcctggcgacatgttgggcggaagactctgcagcatacccaaggcattgggcatattgggcatgcgcgtgggaagtccagaacctggtcctccgggtccaccttgttgctgctgctgcatgagattaacctgctgctgttgctgctgctggttgggattcatctgctgtggaccgccgccgccctgctgctggttcatcatgtgctgcatctgctgttgctgcatcacctgttgctgttgctgctgctgctgctgctgttgaggattttgcggtccgttaccggcctgctgctgctgtagggctccacctgggccaggtgctcctccgcccgctgccgcattgttctgcgactgctggcgctgcttgatgatcgccgccatgatctgcggattctgttttagtatggcaaggatgtgctggttgctctcgttggtgggattgttcttaatcttttgcataatcagggcgagttgttgcgtatttagaccgcccccagtcgcacttccacctccacctcctgctccgggagatggacgcactccgccaacagttccggccattggtggtgctcccatgcccattcccattcctccatgctgtccgccgactggcatttggccacctcccagttggttgggtccgcccagtccgcccatcatctgttgctgttgctgcggcggtatcagattcgtttgcatcacatgggtgggttggcgcatgccgccggtattgttggcatagcgggcttgtggattgccaccgccgggattggcacctccgccgccggctccgccaccgccccactgatccatggacattagatgattgacattcattccgggaccggaaatgggtgcaccgggtgtattgccaccacccgaattcagttgattaacacccactccaccaacgcctccgacgccaacaccaccgacaccttcaactccaacgcccatgccaccaagttgattaacaacattttggttgggcccagcgccgcccattggtcgattcattacgggcggcgccatgggtacgcccttgccgaagccaccgccatgcgatacctgctgacgagctgcctcttcctggacctgcttcaccacttgtaggacatttggagacggcgagtgaccgccaccaggtttcatacctatacctggttgatgcggatgtggtgatgtcattccacccattccaccggctcccgctcctcctgaaacaggcgatggaactgccacggtagatggcgacatgccacccgcccctggaggcagtatacccgcctggccggggatcacctgttggctaactgccacaccggacatgcccaccacgggcactcctccagagacgacggtcggaccgcttactgcagctgggccttgcagagccgctggagctgctgtacgcgacatgagcgccacacggcgacgcagcaactgctgctgctggaatctgggtacgagaaagagagagagagagatatatggttaagattgacataaacaaatctattaatcgatgcaaacttacttctgctgtgactgctgctgcttgagcttgtgcttgatgttgggacagaacggcacggggcacttctgctcctcacagttcttcgcgtgatagcaacagagtgcgataagctgcttgcaaatggggcatcctccgttgggcttgcgcttgcagttcttcgtatgctggacaacgagcttcatcttctggcacgatggcaggcggcagttggcatcgcgacactggcaggcgtgcgccagcgattggatgcaacgctggatggattgcttgcgggcctcctgtggattagcctgcttgtgatccgccagcgcagagccgtcgtcgatgtcgaagccgagcttctccatcttgtgctgatggccaaccttctccttgcacacgatacacagatcgaagtcctgcggaaaatagcgtcatattagatattgtacagaaatgcttctttgtgtgcaatactcacatcacaaacagtacagtggtagcgcgtctccacggccgtcttgcagtggttgcaggtgtaaacaaacttgtcctgaccctggttatgcagctcatacaacatggacagagtggagaattgtgcgcgccgcagcgacgagaactcaaagtgcttgtcgcgggcgagcgtgaggaaggcatcgcgtccatccatcagatcgcatgtgagcagcggatcgggatcctggatgggctgtaaaatttaatggcaatgtggttagttaagctacccaaggatcctcagaaataaaatcatgcacacttaccgctaaactagctgccgactgcgccgaatgcagacggataacgaagaagacctccttgtgcttctccatggtcgcatatatctttgtggagagatcattgcccgactgatgttcgttggactttttgctgttcttacgctgcgccgctttcgatttgttcgactttttggccttcttctggcccttctttttgccatcgccgcttacttcattttcctcgatagagaaaagctgcaggagttgagaagagattacgttagatttgtaaaacagcttgatctacaactatgtatacaaactatgcagttattattctcgtttaacaacttacatttgccgcagctgctgcttccgcggcctcggcctgtttgcgcttctcttcctcctcctggtccagttccttgatgctctcctccagcacattgggccagaagtcgccctcaaagtagggcagctctgcggcagagcccagtttgtcctccatcgcctgcttcaggatatccttgtagtcctgtatgatgcgctcgatcattcccttgtcaagcatctttttgtaccactcctgcaggcgcttgggcttgggtatcttctggtccgtgggatggcagtgaaagatgtagtcatcgccctcggatggcggacaggcccagatatgggccattgtgtagcccagctgtttcacgtagtccatatagccgagcaggatttcgtgatataccgctgtacggtactgtcttggccggaagaaatgaacggaatccaaataggcaatatacacacgccgcgtattcggcgccgggcactcggatccatactcctgaacgtgcatgccaaagaagcacacatcgatgccatccacctcctcgaaggcaaagagcgctttggctcggtatgggaactcgttcatcatctcgccctgctcgacgaatcgtcgacgcatgccgggcttcacctctacacacttgtccgatgagctgaccacacgaatgtgcacctcgccggcaccagcctccttcttcttgaggaaattattcacccgcgtctctatgtacacgcccagcttggtggtgggcaggcgtttcgcattgaacttgttctccttccgctttgagttcttctttttcaggcagttatcgcacacgaagccaccgggccagatagaatccagccagagtacgcagatttggtgctgtttgcgtccgcactcctggcaattgacaaacggctccagttcgaggtgatcgttcttcatctccttgaactgatcctttttgatttggctggataagagaatggtaaagggttttgcatcattcataatcttattcagcttactaatctattgaaactcatttatgaagcccgctttgaatatcatcttcttcaattaaaaccaggcttgaatgtttacaaaatattaaaacgaaattcaaatatattgtggtatatttctcatgaagcttaagtatggattggtttactcaggagcaagttttaagaacttgtgcatctgcgaacctacaattgtactcatcaatactatgatactgtaatattaattatcttatgtatcaactataatcccgttccctttcttatatgatacaaatctaaaaattgtatgtatattcattgggtttgtatactcacgtttgcgattgcagtggatcgtcgcccagtgtgaccgtatcgccctggatgtcgttaaagcacttttggcagtaggtgtatctatttgaggcgacaccgtattcctttagactgttgatttttgttcgattgttcgattgcgtttgtttttattttgttttttgtttacgattttagttcatttatggacgaattttgaagatggcagccaaaaagggaacacaacaacacaggcgtgtgtacaggtgtatgggtgtacaggtgttcggatgtacgaatgtaaaggtgtgcgtgcaagcgagatggttatatgcatttagtcaattgcgagagtgtgtgggtggtttgatttttttttcgtttgtccatgtttttgttgtcacacacacacacacacacacacacacacagagatttacaatttaataaagacacgcaataatacagttatgaggtgacacatattaacaggtattgtattattattttttgtttttgttttgcagttgtcgccgggggagaaaagaaataaaaataaaagaaaagagaaagaaaggaagagaaacaaaaagagtgattgatttggattagcatttttgtcacattaatacaacatttagggggtacaatcaatataaatatataagctctaatatcccacaagtattacgattattaattacaatagacaaatcgggatatattctaagcaattcacacgatctgttttacaacattttttttgtttatgtacacacaactacttttgaattcttaatgtatcaatatctatgagattgttttacttctataagattggatctctcttgagttctttgtatttggactttaaaacagatcttgcattttaaataccaggagataaaatatcccaaaaacggttttccaagttcaaaactacttatggtagtctcgggatatttaaactcattaatagattcatgatcagatttcttagattcctataaggttttaaattccctgtttttgtttcgtttggctcggttccgactattcgaaatttgtggaatgttatggattgaatccaaaatatttaatggccatgtaggagagatcgggaaatgcaaaaagtctcagcaaaagcggcgatttcaagggataataaaagtatgtataagagtatatatctaaagataatacaaattttcttgtgcatcgtgattttatctaatttaacacagaaacatttgcattaaatcacacacacatagaaaacacagtagagaaagaagggatacatagggtgattaaggatcaggaatcaaaaatccatcaaattagtgcacaaaactgactttttatacggtaaagatactaaaagatgccatcgaacatcgagcaagcggttcataactaaatcacaggacctgttgttctggctttataattttttacacaatttcaatacgagaagagcctgaatgaattcgtttgaaaaaggccgaaacagtcctctgatttttcaatactttgaaggactcgctgaatgggaacattcataaacgagcaagcggtttaactaaattacattttacatcaaacagagaaacagaaacgaaacggagccaagcaaaaagatcctcgactggggaatatatgtgggtctcgaatgaaggatcatcggatcgtatcgattcgaatcagatcaacacatacctgttctggtagctgtagtacttggcatcccgcggaatcgtgcagagctgcttgccgtagcagcatagcacctgtggattgaatgtgtacttcctgccgcagcaatatcccagtgcctgcatcacaggatcaatctccgcctcaaagacttcggaaagctaatggatggatagatggaaaagatacataagatacatattacttttgatacctttggggatcttgtcttatgccagcgctcctacctttgtgcaatagcgatagacccgcgatgttttgcgattatacagccaggcattgtcgaacatcagccaaacgtcgtccacatattcccagggatcactgtactttccattctggatgttggtgcgtatagtgcccaggtccatgggcttcttaacgatttcaaagtaatcaggtatgcccagcgcctggggatcaactgggtagcgaaagggcacggattcgggctcctgcctgtagagcttctctagcgttggcaggagagcggtgcgcagttcctcgggattgaattctgtataaaaaagagtaagagaatattaaaatcaaaaattccttgcactgcgaaaaacttgtacttacggcacttctttttcttgtcacctgcattgggtgccagtggctccggtacgagtggtttcgtctccgtcttgggttttatgtccacagcaccgcctgtcgctccgccatcgtgcgcaccatttatgttatccttaccgccgccaacaccactgccgccgccaccttcgccatgatgctctccggctgtcgatcctccagcctcgtccacatccatggcctccgttttgatctttacctcgccatcgagtccatcctccgtcttgatctccattttgatcatgcttgttccgtcgttgttcacattcttgcccttgccaccacccgtcgagcaatccatctgcgagctatcgttatttccgccacagctgtcatccataaactccttcttgatatcatcatcttgcttaatggagtccagtttgcccttggaggccataccgccggcatttccactgccaccactgccgttcgtattctcgccggatggcgagggcgtctcatcgtcgttgtctcgcgccgcagcctccagggcagccatctgtgaggagagactgctggagctgctcatcatgcgactgctcgaggatgtcgatgtggtggtcgttgctcccgttccgcctcctgccgttcctccagacatgaggagcagtggattgctagcgggcgtagtggatgatccgcctcctgcattgcccccaccaccaccaccaccaccgctgctggtggccatcgtggccgatgtaggagtcgataccgagctgagtggtgtacccgagcccgccgaggaagatgatgacgtggaacttgcacccgctgcagttgctccgctgctgctattgctgccactgccactactcgcacaggtggctgctgctgatgcgggcgtactgctcgccgctaatccggaggcacttgtcgccggcactggggaagcgggtatgtaaggaggcgtacccggccgattgctcagcggctgttgcattagactgctcaccgagggcgggttgttgttagcactactattattattattgttggagggcgtgccaatcgacgggccgttggacaagaagccaggcgatgggctcggagctgaaaccgttacattggaggcggatcctccagttcccggcgctccggcccccgcattcagggcttccagactcgtgggcgtgggcggcatattattcagcacactgccgggcttctgttgttgctgttgctgaccttgctgctgttgctgcattggtgagctaaaactgttgctagtcgcctgctgctgctgttgttgctgctgctgctgctgttgttgttgtagaggtgttgaattgctaaatggcgactgcggcaacaacattccctgctgctgctgctgttgttgttgctgctgctgctggtgaatgtgacgctgcttcatgatttcgctcagttgaggattggcgccagtgccgccgttcgcattaatgaactgctgctgttgctgctgtcctggcaccggactggtgagcacattggtcgtctggtaaggcgagagcgcgggattgaccaccatgccaccgggactgggtcctggtggaccgaccagcattttgccggctccagaccctggcggttgttgctgctgttgttgcgggaactgcatgcgctgttgttgctgcaaggcgagcatgttgccaccgggcgaatgactgcgcatggtaaccatattgttggtcactcccacgccgacgcccaggcctgctgccgtctgttggcccagtattccaggtggtccctgtggacgcagctgctgcggcggcatcacaccgcccattggactgatgcttggatggatacagctctgcagaggctgctgaccctgctgctgctgttgttgttgctgctgctgttgctgctggggcaagactacaccgcccgctacaccagctgcactgcctgctccgccagccgctcctccagccactggattcgcaacgccctgttgctgcatcagcatctgctgatgctgctccttacgcttcagtcgcttctcctccagctccttttgaatcttgtagatcttctcggccagcaggtgatagtactccgatctggacttggccatttcgtacatgtccttctcgaccttttccgcgtatgaaacgagattatgcatccgtttgtcctgcatggtcgtaggatccgaggtggggaagatggcctgcaccagtttgtggacgaggtggttgcgcagatcggcggtcaccgattcccgccagtctttctcgttgtcgcccggaggtccagtgtttccgccattgccaccgccggcacctccagctacaccgcctgcattctggttgggattgcccgcattaccactgcccgtggtatcggctggcatcaggacactggaaccggctgccacttgaccaccactcgccccggcgcccgctgatgcaccgcccgctcctacgccatggctctgcggatgcacttgggccaccttcagttgctgcttatcgttggctcccacggctccgccggcagctgcaccaccgaaattggtattgccaaagccaccgacgttgacagagagtggtgctggaatgttgccacccagctgggcgggattgggttgctgctgttgttgctgatgctgctgttgttgctccaccatggtggccaggccaccgcgtcgtcgattctggccctgttgctgctgctgttgcagcatttgttgctgttgttgatgcaggctgttaacatcgttcggcagaacatttggtccacttgggccgccgggaccacctggtcccagtaccctgacggccggctgagcgccttgaatgcgaatcacaggaggcaaaccctgctgctgctgctgttgcataccacctgctacgacttgctggctcatgccatcgaatcgacggagttcctgttgctgaacctgttgctggtgaacctgctgttgctgctgctgctgctgttgggtcaattgttgcaccatatccgcaggcgttttcggcgcacccggtgcaccgcccgctccctgttgctggggaagaactatggcagtattttggccacctcccggtgcaacctgctgtccttgcttgccatccactaccagacccgtcagattgggctgctggttctgctgctgctgttgttgctgctgctgttgctgctgaagattaccgcctgctccagccgctccaccacccgctccgccgccacctggtggcgcacctccaattcctgccggtccgcctcctggcggcacattcgcattttgaaaaaccgaatgattctgccggaagggatagcaaatgacgcagccactgttctggcacgttttataatgcaacagaatttggcgcgaagaggcacaatgctgcatggtgcagtccttgctctgtttgcaagtgcccatgtgggccagcacggatttcatcgccttgcagtagttaacgttgcacacttccctgttcggattcaggttctccctgcgattgcatttgtgtgcatggaggagcagcatcagttgctgctggatctgtcgcttacggtcgtcgggcacatcgcgattggcgccaccagggccgctagattgtacggcaccaccggctccgccgcctgccactgccggcacgccagccacggttcctgcattggccacaacgcctgctcctccgattccgactccctgctgctgttgctgctgctgcgaggtgccaggctgctgttgctgctgctgctgctggccgggatgaccgagcagctggtttggttgcggaggacgcgggcccatggctccggtttgctgctgcgccagcatctgctgctgctgaggattcccgcttaccagctgccccgcgggccctgatccatcgccgccgagtgtggacatgggcaccactgtgccaacgggccgattaccctgcggcatgcccggtacgacgccacctctttgggccatctgctgggcgagaagttgttgctgctgttgctgctgctgttgctgaggattgttaccaccgcctgggccaccatactgacccactccgtagggcagactgttgagttgagctgcaaacggacggaaatcttacatcagccatcgattcaattccatgctggaaatacactagatctggcactagaaactcactcatttgcatgttcggattctgcatgcgtggtcctccgccaccaggcccgtttcctggcccaccagctcctccagaggcacccatgagatgcgggccacgaagcatatgctgttgccccaccatgcgtcccatcattgggccgttctgcatatgcatgccttggtttgcggcaacggctcctccgccgccagctccaacgccaccagctcctgctccaggtcctccgggtactgaaacggaattgatcatcccaccgccgccgccgccaggctgctgcttaagatgattaaccatgccgcccatgccgccgccaacgctgttggtcagcaccatgtttcccagattgccctgcgcaatggtgttcatgcctgcgaaagatataacataatttgggttttcagataattgttgctatattcatttggttgcattggctaggataacttggatatccaattacaaggaagaacgattaatcacctggtatggcgttcatgccattgttgccattattcgatattgacatgggcattgagttgaccatacccatctgagtgcccaccacctgctgcatgccgccctggttgggtgactgcaggttgggcgacttgctgcccagctgctgcatgccgggcaccaccatggcgcccttctggccctgctgctgctgctggagtaggtgctgcagttgctggtgttgcatttgactgattctgttgcccgctcctgagccgttgccactgccgtcgtcgccacccgttccggatccgttgccgccgccggctccgttcatctgggaaggcacaacgccgacgccaacaacaccgccgacacccacattcactccaacaccgactccgcctgtgccagagccgggtccttgggctgccggcttgttgggtccgccaccgggatttgggccggatgtgggatttgtggttacaccggaggcgccgccacctccattgccaccgcctgctccgccggtcagctgatccgaccagccactattcgaggacaccagctcatcgggcaggttctcctccagaaagtaagagatatccgctggaggaagatacaaccaaattgtttttagcaaggaattttcttaaaaaaaaaaatagttggatagaattaattgctttttcaattccgtaaggaatttattaaaaattatgaaataactggagaatacaagtttgataaactaaaactaaaagttattaacaaaaaaaaaaaaaaaatgagaaatcgaatattctggtttcggtactcacttggatccattttaacccgcttttggggcggttcgtctaagtgatcggccatcatatagagttagtttgattctttcgattcggaaaaaaacagaaacgcagacgaaaaacgttcgaaaaatctgagtagtattgtttctattagtttataaagtttttctgatttttcgcttttttttttcactaactctccaatgatccgtctatgttggagttcgagtgtgttctgatattttcgttattggaacttgtcaaatcttctttcagaaattatttgtcgcctagcactttgacaattgttgcacaggttgtttgtttggttaagtgtttagtgttttaagttgtagatttcttgattagtttggacactttgcaacacacgcacgcacaatacacaacacacaaagaggcactcaaaaggcgtggctggcgaggattgggatttggttttggtattggtgttttgggatcttgtaatcgatgatgttggcgatgcttgcacttaatgatgatattaacgctgctgctccgctttttattgctaaggatgtggcttctgttgttgttcttgttgcagttgttgttgttgatttagataattcctttgctaattgccgctgcaacgacagcaacaacgtagccggcgctatcgtcaccgcaacgtcaacggatggagctgaccaccaccacgtcgtcggacctgtgcccgctgatccttctgctcccacacccacttccactccttcgccttttccctctccttctgccgcttccgctgatcctggaggatcgcgcagccaccaccgccttctcgttgcggcgccgttgagatcgttgtcgccgccactggcgctttggccagcagacaacttttccaccgcctggtgctcctcctgctcctgctcctcttgatgcttgttcttatcctgcgtccgcttgaccagtacctcttcttcttcttcgacttcggccctgcgcttttttagctgcaatttgtttttgctgctgctgctgatgctgctgtcgttgttgttgtggttactgctgctgctgctgctgccgtcgttgttctcgttgttgcaattgttgtttgtcgaacagcagcagacacacgcgtgcattttgtgttgttgggccccaaaaacaccaaaagttgaccttggctgggcggctcttgttattgtttgtttgtttgtttgtctgttgttgcctgcctgcctccactgagcgaaaaagaacggttcttggtttggctctctcctctttctcttccttttctttccgcctttttctccgctatcttacatattttatgtgatttgttt

SEQ ID NO: 38102 - DNA, 10598 bp, DROSOPHILA
cttaaccaaacaaacaacctgtgcaacaattgtcaaagtgctaggcgacaaataatttctgaaagaagatttgacaagttccaataacgaaaatatcagaacacactcgaactccaacatagacggatcattggagagttagtgaaaaaaaaaagcgaaaaatcagaaaaactttataaactaatagaaacaatactactcagatttttcgaacgtttttcgtctgcgtttctgtttttttccgaatcgaaagaatcaaactaactctatatgatggccgatcacttagacgaaccgccccaaaagcgggttaaaatggatccaacggatatctcttactttctggaggagaacctgcccgatgagctggtgtcctcgaatagtggctggtcggatcagctgaccggcggagcaggcggtggcaatggaggtggcggcgcctccggtgtaaccacaaatcccacatccggcccaaatcccggtggcggacccaacaagccggcagcccaaggacccggctctggcacaggcggagtcggtgttggagtgaatgtgggtgtcggcggtgttgttggcgtcggcgttgtgccttcccagatgaacggagccggcggcggcaacggatccggaacgggtggcgacgacggcagtggcaacggctcaggagcgggcaacagaatcagtcaaatgcaacaccagcaactgcagcacctactccagcagcagcagcagggccagaagggcgccatggtggtgcccggcatgcagcagctgggcagcaagtcgcccaacctgcagtcacccaaccagggcggcatgcagcaggtggtgggcactcagatgggtatggtcaactcaatgcccatgtcaatatcgaataatggcaacaatggcatgaacgccataccaggcatgaacaccattgcgcagggcaatctgggaaacatggtgctgaccaacagcgttggcggcggcatgggcggcatggttaatcatcttaagcagcagcctggcggcggcggcggtgggatgatcaattccgtttcagtacccggaggacctggagcaggagctggtggcgttggagctggcggcggaggagccgttgccgcaaaccaaggcatgcatatgcagaacggcccaatgatgggacgcatggtggggcaacagcatatgcttcgtggcccgcatctcatgggtgcctctggaggagctggtgggccaggaaacgggcctggtggcggaggaccacgcatgcagaatccgaacatgcaaatgactcaactcaacagtctgccctacggagtgggtcagtatggtggcccaggcggtggtaacaatcctcagcaacagcagcagcaacagcagcaacaacttctcgcccagcagatggcccaaagaggtggcgtcgtaccgggcatgccgcagggtaatcggcccgttggcacagtggtgcccatgtccacactcggcggcgatggatcagggcccgcggggcagctggtaagcgggaatcctcagcagcagcagatgctggcgcagcagcaaaccggagccatgggcccgcgtcctccgcaaccaaaccagctgctcggtcatcccggccagcagcagcagcagcaacagcagcctggcacctcgcagcagcagcaacagcagcagggagtcggaatcggaggagcaggcgttgtggccaatgcaggaaccgtggctggcgtgccggcagtggcaggcggcggagccggtggtgccgtacaatctagcggccctggtggcgccaatcgcgatgtgcccgacgaccgtaagcgacagatccagcagcaactgatgctgctcctccatgcacacaaatgcaatcgcagggagaacctgaatccgaacagggaagtgtgcaacgttaactactgcaaggcgatgaaatccgtgctggcccacatgggcacttgcaaacagagcaaggactgcaccatgcagcattgtgcctcttcgcgccaaattctgttgcattataaaacgtgccagaacagtggctgcgtcatttgctatcccttccggcagaatcattcggtttttcaaaatgcgaatgtgccgccaggaggcggaccggcaggaattggaggtgcgccaccaggtggcggcggagcgggtggtggagcggctggagcaggcggtaatcttcagcagcaacagcagcagcaacaacagcagcagcagaaccagcagcccaatctgacgggtctggtagtggatggcaagcaaggacagcaggttgcaccgggaggtggccaaaatactgccatagttcttccccagcaacagggagcgggcggtgcaccgggtgcgccgaaaacgcctgcggatatggtgcaacaattgacccaacagcagcagcagcagcaacagcaggttcaccagcaacaggttcagcaacaggaactccgtcgattcgatggcatgagccagcaagtcgtagcaggtggtatgcaacagcagcagcagcagggtttgcctcctgtgattcgcattcaaggcgctcagccggccgtcagggtactgggaccaggtggtcccggcggcccaagtggaccaaatgttctgccgaacgatgttaacagcctgcatcaacaacagcaacaaatgctgcaacagcagcagcaacagggccagaatcgacgacgcggtggcctggccaccatggtggagcaacaacagcagcatcagcaacaacagcagcaacccaatcccgcccagctgggtggcaacattccagcaccactctctgtcaacgtcggtggctttggcaataccaatttcggtggtgcagctgccggcggagccgtgggagccaacgataagcagcaactgaaggtggcccaagtgcatccgcagagccatggcgtaggagcgggcggtgcatcagcgggcgccggggcgagtggtggtcaagtggcagccggttccagtgtcctgatgccagccgataccacgggcagtggtaatgcgggcaatcccaaccagaatgcaggcggtgtagctggaggtgccggcggtggcaatggcggaaacactggacctccgggcgacaacgagaaagactggcgggaatcggtgaccgccgatctgcgcaaccacctcgtccacaaactggtgcaggccatcttccccacctcggatcctacgaccatgcaggacaaacggatgcataatctcgtttcatacgcggaaaaggtcgagaaggacatgtacgaaatggccaagtccagatcggagtactatcacctgctggccgagaagatctacaagattcaaaaggagctggaggagaagcgactgaagcgtaaggagcagcatcagcagatgctgatgcagcaacagggcgttgcgaatccagtggctggaggagcggctggcggagcaggcagtgcagctggtgtagcgggcggtgtagtcttgccccagcagcaacagcagcagcaacaacaacagcagcagcagggtcagcagcctctgcagagctgtatccatccaagcatcagtccaatgggcggtgtgatgccgccgcagcagctgcgtccacagggaccacctggaatactgggccaacagacggcagcaggcctgggcgtcggcgtgggagtgaccaacaatatggttaccatgcgcagtcattcgcccggtggcaacatgctcgccttgcagcaacaacagcgcatgcagttcccgcaacaacagcagcaacaaccgccagggtctggagccggcaaaatgctggtcggtccaccaggacccagtcccggtggcatggtggtcaatcccgcgctctcgccttaccagacgaccaatgtgctcaccagtccggtgccaggacagcagcaacagcagcagttcattaatgcgaacggcggcactggcgccaatcctcaactgagcgaaatcatgaagcagcgtcacattcaccagcagcagcagcaacaacaacagcagcagcagcagggaatgttgttgccgcagtcgccatttagcaattcaacacctctacaacaacaacagcagcagcagcagcaacaacagcagcagcaggcgactagcaacagttttagctcaccaatgcagcaacagcagcaaggtcagcaacagcaacaacagaagcccggcagtgtgctgaataatatgccgcccacgcccacgagtctggaagccctgaatgcgggggccggagcgccgggaactggaggatccgcctccaatgtaacggtttcagctccgagcccatcgcctggcttcttgtccaacggcccgtcgattggcacgccctccaacaataataataatagtagtgctaacaacaacccgccctcggtgagcagtctaatgcaacagccgctgagcaatcggccgggtacgcctccttacatacccgcttccccagtgccggcgacaagtgcctccggattagcggcgagcagtacgcccgcatcagcagcagccacctgtgcgagtagtggcagtggcagcaatagcagcagcggagcaactgcagcgggtgcaagttccacgtcatcatcttcctcggcgggctcgggtacaccactcagctcggtatcgactcctacatcggccacgatggccaccagcagcggtggtggtggtggtggtgggggcaatgcaggaggcggatcatccactacgcccgctagcaatccactgctcctcatgtctggaggaacggcaggaggcggaacgggagcaacgaccaccacatcgacatcctcgagcagtcgcatgatgagcagctccagcagtctctcctcacagatggctgccctggaggctgcggcgcgagacaacgacgatgagacgccctcgccatccggcgagaatacgaacggcagtggtggcagtggaaatgccggcggtatggcctccaagggcaaactggactccattaagcaagatgatgatatcaagaaggagtttatggatgacagctgtggcggaaataacgatagctcgcagatggattgctcgacgggtggtggcaagggcaagaatgtgaacaacgacggaacaagcatgatcaaaatggagatcaagacggaggatggactcgatggcgaggtaaagatcaaaacggaggccatggatgtggacgaggctggaggatcgacagccggagagcatcatggcgaaggtggcggcggcagtggtgttggcggcggtaaggataacataaatggtgcgcacgatggcggagcgacaggcggtgctgtggacataaaacccaagacggagacgaaaccactcgtaccggagccactggcacccaatgcaggtgacaagaaaaagaagtgccaattcaatcccgaggaactgcgcaccgctctcctgccaacgctagagaagctctacaggcaggagcccgaatccgtgccctttcgctacccagttgatccccaggcgctgggcatacctgattactttgaaatcgttaagaagcccatggacctgggcactatacgcaccaacatccagaatggaaagtacagtgatccctgggaatatgtggacgacgtttggctgatgttcgacaatgcctggctgtataatcgcaaaacatcgcgggtctatcgctattgcacaaagctttccgaagtctttgaggcggagattgatcctgtgatgcaggcactgggatattgctgcggcaggaagtacacattcaatccacaggtgctatgctgctacggcaagcagctctgcacgattccgcgggatgccaagtactacagctaccagaacagtctaaaggaatacggtgtcgcctcaaatagatacacctactgccaaaagtgctttaacgacatccagggcgatacggtcacactgggcgacgatccactgcaatcgcaaacccaaatcaaaaaggatcagttcaaggagatgaagaacgatcacctcgaactggagccgtttgtcaattgccaggagtgcggacgcaaacagcaccaaatctgcgtactctggctggattctatctggcccggtggcttcgtgtgcgataactgcctgaaaaagaagaactcaaagcggaaggagaacaagttcaatgcgaaacgcctgcccaccaccaagctgggcgtgtacatagagacgcgggtgaataatttcctcaagaagaaggaggctggtgccggcgaggtgcacattcgtgtggtcagctcatcggacaagtgtgtagaggtgaagcccggcatgcgtcgacgattcgtcgagcagggcgagatgatgaacgagttcccataccgagccaaagcgctctttgccttcgaggaggtggatggcatcgatgtgtgcttctttggcatgcacgttcaggagtatggatccgagtgcccggcgccgaatacgcggcgtgtgtatattgcctatttggattccgttcatttcttccggccaagacagtaccgtacagcggtatatcacgaaatcctgctcggctatatggactacgtgaaacagctgggctacacaatggcccatatctgggcctgtccgccatccgagggcgatgactacatctttcactgccatcccacggaccagaagatacccaagcccaagcgcctgcaggagtggtacaaaaagatgcttgacaagggaatgatcgagcgcatcatacaggactacaaggatatcctgaagcaggcgatggaggacaaactgggctctgccgcagagctgccctactttgagggcgacttctggcccaatgtgctggaggagagcatcaaggaactggaccaggaggaggaagagaagcgcaaacaggccgaggccgcggaagcagcagctgcggcaaatcttttctctatcgaggaaaatgaagtaagcggcgatggcaaaaagaagggccagaagaaggccaaaaagtcgaacaaatcgaaagcggcgcagcgtaagaacagcaaaaagtccaacgaacatcagtcgggcaatgatctctccacaaagatatatgcgaccatggagaagcacaaggaggtcttcttcgttatccgtctgcattcggcgcagtcggcagctagtttagcgcccatccaggatcccgatccgctgctcacatgcgatctgatggatggacgcgatgccttcctcacgctcgcccgcgacaagcactttgagttctcgtcgctgcggcgcgcacaattctccactctgtccatgttgtatgagctgcataaccagggtcaggacaagtttgtttacacctgcaaccactgcaagacggccgtggagacgcgctaccactgtactgtttgtgatgacttcgatctgtgtatcgtgtgcaaggagaaggttggccatcagcacaagatggagaagctcggcttcgacatcgacgacggctctgcgctggcggatcacaagcaggctaatccacaggaggcccgcaagcaatccatccagcgttgcatccaatcgctggcgcacgcctgccagtgtcgcgatgccaactgccgcctgccatcgtgccagaagatgaagctcgttgtccagcatacgaagaactgcaagcgcaagcccaacggaggatgccccatttgcaagcagcttatcgcactctgttgctatcacgcgaagaactgtgaggagcagaagtgccccgtgccgttctgtcccaacatcaagcacaagctcaagcagcagcagtcacagcagaaattccagcagcagcagttgctgcgtcgccgtgtggcgctcatgtcgcgtacagcagctccagcggctctgcaaggcccagctgcagtaagcggtccgaccgtcgtctctggaggagtgcccgtggtgggcatgtccggtgtggcagttagccaacaggtgatccccggccaggcgggtatactgcctccaggggcgggtggcatgtcgccatctaccgtggcagttccatcgcctgtttcaggaggagcgggagccggtggaatgggtggaatgacatcaccacatccgcatcaaccaggtataggtatgaaacctggtggcggtcactcgccgtctccaaatgtcctacaagtggtgaagcaggtccaggaagaggcagctcgtcagcaggtatcgcatggcggtggcttcggcaagggcgtacccatggcgccgcccgtaatgaatcgaccaatgggcggcgctgggcccaaccaaaatgttgttaatcaacttggtggcatgggcgttggagttgaaggtgtcggtggtgttggcgtcggaggcgttggtggagtgggtgttaatcaactgaattcgggtggtggcaatacacccggtgcacccatttccggtcccggaatgaatgtcaatcatctaatgtccatggatcagtggggcggtggcggagccggcggcggaggtgccaatcccggcggtggcaatccacaagcccgctatgccaacaataccggcggcatgcgccaacccacccatgtgatgcaaacgaatctgataccgccgcagcaacagcaacagatgatgggcggactgggcggacccaaccaactgggaggtggccaaatgccagtcggcggacagcatggaggaatgggaatgggcatgggagcaccaccaatggccggaactgttggcggagtgcgtccatctcccggagcaggaggtggaggtggaagtgcgactgggggcggtctaaatacgcaacaactcgccctgattatgcaaaagattaagaacaatcccaccaacgagagcaaccagcacatccttgccatactaaaacagaatccgcagatcatggcggcgatcatcaagcagcgccagcagtcgcagaacaatgcggcagcgggcggaggagcacctggcccaggtggagccctacagcagcagcaggccggtaacggaccgcaaaatcctcaacagcagcagcagcagcagcaacagcaacaggtgatgcagcaacagcagatgcagcacatgatgaaccagcagcagggcggcggcggtccacagcagatgaatcccaaccagcagcagcaacagcagcaggttaatctcatgcagcagcagcaacaaggtggacccggaggaccaggttctggacttcccacgcgcatgcccaatatgcccaatgccttgggtatgctgcagagtcttccgcccaacatgtcgccaggcgtttctactcagggaggaatggtgcccaaccaaaactggaacaagatgcgttacatgcaaatgagccagtacccgccaccgtatccgcagcgccagcgtggcccgcacatgggcggagcgggacctggtcccggccagcaacagttccccggtggcggaggtggagcgggcaactttaatgcgggtggtgctggtggtgcaggcggcgttgtcggtgtgggcggagtgcccggaggtgccggcacggtgcccggtggcgatcaatactcgatggcgaatgccgcggctgcctccaatatgctgcaacagcagcagggccaggtgggcgtcggagtgggcgtgggcgtgaaaccaggacccggccaacagcaacagcagatgggcgttggcatgccgccgggtatgcagcagcaacagcagcaacagcaaccgctgcagcagcagcagatgatgcaggtagcaatgccaaatgcgaatgcccagaatccgtcggcggtggttggcggacccaatgctcaggtgatgggtccgccgacgccgcactctctgcagcagcagctgatgcaatcggcccgctcgtcgccgcctattcgctccccgcagccaacgccatcgccacgttcggctccatcgccacgtgctgctccatccgcctcgcctagggcacagccctcgccgcaccatgtgatgagcagtcactcgccagcgccgcagggaccaccgcatgacggcatgcacaatcatggcatgcatcatcagtcgccactgccaggagtgccgcaggatgttggcgtcggagtcggtgtcggcgttggcgttggcgttaacgttaacgtcggcaacgtgggcgtcggcaatgccggaggagccctgcccgacgcctccgaccagctgaccaagtttgtggagcgactctagtgcagcaacagcagcagcaccagcaccagcaccaccaccagctacaatggttggtaggcgatgtggctagagggctagggctagactgaatgaatgaatgagtgtccagtagccgcagacgggatgacgacgaagaccaaccggcagggataaccagtgtgtgttaagcgaattaacaactattactaacttaaatcttttttttttttttaaacggcaccacaaataattgtatattgttataattaaatcaacaaatatcgcgcctaatgtgtactgtagattaagatgacccaccattacaaccactaacaaataccttattatttaagtttaagacgaaagttggacagagcattatgattcgatttccattttatgtccgcgatttagcaaatatataatatcatatatttcatatgcccccaaaacacacacacaccatgtattaattaatgcgattccttcgtttccactaagcagatatagaaaaaaaaaaa

SEQ ID NO: 38103 - protein, 3275 aa, DROSOPHILA
MMADHLDEPPQKRVKMDPTDISYFLEENLPDELVSSNSGWSDQLTGGAGGGNGGGGASGVTTNPTSGPNPGGGPNKPAAQGPGSGTGGVGVGVNVGVGGVVGVGVVPSQMNGAGGGNGSGTGGDDGSGNGSGAGNRISQMQHQQLQHLLQQQQQGQKGAMVVPGMQQLGSKSPNLQSPNQGGMQQVVGTQMGMVNSMPMSISNNGNNGMNAIPGMNTIAQGNLGNMVLTNSVGGGMGGMVNHLKQQPGGGGGGMINSVSVPGGPGAGAGGVGAGGGGAVAANQGMHMQNGPMMGRMVGQQHMLRGPHLMGASGGAGGPGNGPGGGGPRMQNPNMQMTQLNSLPYGVGQYGGPGGGNNPQQQQQQQQQQLLAQQMAQRGGVVPGMPQGNRPVGTVVPMSTLGGDGSGPAGQLVSGNPQQQQMLAQQQTGAMGPRPPQPNQLLGHPGQQQQQQQQPGTSQQQQQQQGVGIGGAGVVANAGTVAGVPAVAGGGAGGAVQSSGPGGANRDVPDDRKRQIQQQLMLLLHAHKCNRRENLNPNREVCNVNYCKAMKSVLAHMGTCKQSKDCTMQHCASSRQILLHYKTCQNSGCVICYPFRQNHSVFQNANVPPGGGPAGIGGAPPGGGGAGGGAAGAGGNLQQQQQQQQQQQQNQQPNLTGLVVDGKQGQQVAPGGGQNTAIVLPQQQGAGGAPGAPKTPADMVQQLTQQQQQQQQQVHQQQVQQQELRRFDGMSQQVVAGGMQQQQQQGLPPVIRIQGAQPAVRVLGPGGPGGPSGPNVLPNDVNSLHQQQQQMLQQQQQQGQNRRRGGLATMVEQQQQHQQQQQQPNPAQLGGNIPAPLSVNVGGFGNTNFGGAAAGGAVGANDKQQLKVAQVHPQSHGVGAGGASAGAGASGGQVAAGSSVLMPADTTGSGNAGNPNQNAGGVAGGAGGGNGGNTGPPGDNEKDWRESVTADLRNHLVHKLVQAIFPTSDPTTMQDKRMHNLVSYAEKVEKDMYEMAKSRSEYYHLLAEKIYKIQKELEEKRLKRKEQHQQMLMQQQGVANPVAGGAAGGAGSAAGVAGGVVLPQQQQQQQQQQQQQGQQPLQSCIHPSISPMGGVMPPQQLRPQGPPGILGQQTAAGLGVGVGVTNNMVTMRSHSPGGNMLALQQQQRMQFPQQQQQQPPGSGAGKMLVGPPGPSPGGMVVNPALSPYQTTNVLTSPVPGQQQQQQFINANGGTGANPQLSEIMKQRHIHQQQQQQQQQQQQGMLLPQSPFSNSTPLQQQQQQQQQQQQQQATSNSFSSPMQQQQQGQQQQQQKPGSVLNNMPPTPTSLEALNAGAGAPGTGGSASNVTVSAPSPSPGFLSNGPSIGTPSNNNNNSSANNNPPSVSSLMQQPLSNRPGTPPYIPASPVPATSASGLAASSTPASAAATCASSGSGSNSSSGATAAGASSTSSSSSAGSGTPLSSVSTPTSATMATSSGGGGGGGGNAGGGSSTTPASNPLLLMSGGTAGGGTGATTTTSTSSSSRMMSSSSSLSSQMAALEAAARDNDDETPSPSGENTNGSGGSGNAGGMASKGKLDSIKQDDDIKKEFMDDSCGGNNDSSQMDCSTGGGKGKNVNNDGTSMIKMEIKTEDGLDGEVKIKTEAMDVDEAGGSTAGEHHGEGGGGSGVGGGKDNINGAHDGGATGGAVDIKPKTETKPLVPEPLAPNAGDKKKKCQFNPEELRTALLPTLEKLYRQEPESVPFRYPVDPQALGIPDYFEIVKKPMDLGTIRTNIQNGKYSDPWEYVDDVWLMFDNAWLYNRKTSRVYRYCTKLSEVFEAEIDPVMQALGYCCGRKYTFNPQVLCCYGKQLCTIPRDAKYYSYQNSLKEYGVASNRYTYCQKCFNDIQGDTVTLGDDPLQSQTQIKKDQFKEMKNDHLELEPFVNCQECGRKQHQICVLWLDSIWPGGFVCDNCLKKKNSKRKENKFNAKRLPTTKLGVYIETRVNNFLKKKEAGAGEVHIRVVSSSDKCVEVKPGMRRRFVEQGEMMNEFPYRAKALFAFEEVDGIDVCFFGMHVQEYGSECPAPNTRRVYIAYLDSVHFFRPRQYRTAVYHEILLGYMDYVKQLGYTMAHIWACPPSEGDDYIFHCHPTDQKIPKPKRLQEWYKKMLDKGMIERIIQDYKDILKQAMEDKLGSAAELPYFEGDFWPNVLEESIKELDQEEEEKRKQAEAAEAAAAANLFSIEENEVSGDGKKKGQKKAKKSNKSKAAQRKNSKKSNEHQSGNDLSTKIYATMEKHKEVFFVIRLHSAQSAASLAPIQDPDPLLTCDLMDGRDAFLTLARDKHFEFSSLRRAQFSTLSMLYELHNQGQDKFVYTCNHCKTAVETRYHCTVCDDFDLCIVCKEKVGHQHKMEKLGFDIDDGSALADHKQANPQEARKQSIQRCIQSLAHACQCRDANCRLPSCQKMKLVVQHTKNCKRKPNGGCPICKQLIALCCYHAKNCEEQKCPVPFCPNIKHKLKQQQSQQKFQQQQLLRRRVALMSRTAAPAALQGPAAVSGPTVVSGGVPVVGMSGVAVSQQVIPGQAGILPPGAGGMSPSTVAVPSPVSGGAGAGGMGGMTSPHPHQPGIGMKPGGGHSPSPNVLQVVKQVQEEAARQQVSHGGGFGKGVPMAPPVMNRPMGGAGPNQNVVNQLGGMGVGVEGVGGVGVGGVGGVGVNQLNSGGGNTPGAPISGPGMNVNHLMSMDQWGGGGAGGGGANPGGGNPQARYANNTGGMRQPTHVMQTNLIPPQQQQQMMGGLGGPNQLGGGQMPVGGQHGGMGMGMGAPPMAGTVGGVRPSPGAGGGGGSATGGGLNTQQLALIMQKIKNNPTNESNQHILAILKQNPQIMAAIIKQRQQSQNNAAAGGGAPGPGGALQQQQAGNGPQNPQQQQQQQQQQQVMQQQQMQHMMNQQQGGGGPQQMNPNQQQQQQQVNLMQQQQQGGPGGPGSGLPTRMPNMPNALGMLQSLPPNMSPGVSTQGGMVPNQNWNKMRYMQMSQYPPPYPQRQRGPHMGGAGPGPGQQQFPGGGGGAGNFNAGGAGGAGGVVGVGGVPGGAGTVPGGDQYSMANAAAASNMLQQQQGQVGVGVGVGVKPGPGQQQQQMGVGMPPGMQQQQQQQQPLQQQQMMQVAMPNANAQNPSAVVGGPNAQVMGPPTPHSLQQQLMQSARSSPPIRSPQPTPSPRSAPSPRAAPSASPRAQPSPHHVMSSHSPAPQGPPHDGMHNHGMHHQSPLPGVPQDVGVGVGVGVGVGVNVNVGNVGVGNAGGALPDASDQLTKFVERL

SEQ ID NO: 38104 - DNA, 2708 bp, DROSOPHILA
gctggtgttgcatttgactgattctgttgcccgctcctgagccgttgccactgccgtcgtcgccacccgttccggatccgttgccgccgccggctccgttcatctgggaaggcacaacgccgacgccaacaacaccgccgacacccacattcactccaacaccgactccgcctgtgccagagccgggtccttgggctgccggcttgttgggtccgccaccgggatttgggccggatgtgggatttgtggttacaccggaggcgccgccacctccattgccaccgcctgctccgccggtcagctgatccgaccagccactattcgaggacaccagctcatcgggcaggttctcctccagaaagtaagagatatccgctggaggaagatacaaccaaattgtttttagcaaggaattttcttaaaaaaaaaaatagttggatagaattaattgctttttcaattccgtaaggaatttattaaaaattatgaaataactggagaatacaagtttgataaactaaaactaaaagttattaacaaaaaaaaaaaaaaaatgagaaatcgaatattctggtttcggtactcacttggatccattttaacccgcttttggggcggttcgtctaagtgatcggccatcatatagagttagtttgattctttcgattcggaaaaaaacagaaacgcagacgaaaaacgttcgaaaaatctgagtagtattgtttctattagtttataaagtttttctgatttttcgcttttttttttcactaactctccaatgatccgtctatgttggagttcgagtgtgttctgatattttcgttattggaacttgtcaaatcttctttcagaaattatttgtcgcctagcactttgacaattgttgcacaggttgtttgtttggttaagtgtttagtgttttaagttgtagatttcttgattagtttggacactttgcaacacacgcacgcacaatacacaacacacaaagaggcactcaaaaggcgtggctggcgaggattgggatttggttttggtattggtgttttgggatcttgtaatcgatgatgttggcgatgcttgcacttaatgatgatattaacgctgctgctccgctttttattgctaaggatgtggcttctgttgttgttcttgttgcagttgttgttgttgatttagataattcctttgctaattgccgctgcaacgacagcaacaacgtagccggcgctatcgtcaccgcaacgtcaacggatggagctgaccaccaccacgtcgtcggacctgtgcccgctgatccttctgctcccacacccacttccactccttcgccttttccctctccttctgccgcttccgctgatcctggaggatcgcgcagccaccaccgccttctcgttgcggcgccgttgagatcgttgtcgccgccactggcgctttggccagcagacaacttttccaccgcctggtgctcctcctgctcctgctcctcttgatgcttgttcttatcctgcgtccgcttgaccagtacctcttcttcttcttcgacttcggccctgcgcttttttagctgcaatttgtttttgctgctgctgctgatgctgctgtcgttgttgttgtggttactgctgctgctgctgctgccgtcgttgttctcgttgttgcaattgttgtttgtcgaacagcagcagacacacgcgtgcattttgtgttgttgggccccaaaaacaccaaaagttgaccttggctgggcggctcttgttattgtttgtttgtttgtttgtctgttgttgcctgcctgcctccactgagcgaaaaagaacggttcttggtttggctctctcctctttctcttccttttctttccgcctttttctccgctatcttacatattttatgtgatttgtttttggcggctttttgttacacaggaatatatatatatatatatagatattttgaccatatattatatatgcttgtgtttaattttgattgcacttgattcggttatcgtttacaattaataaggaaaaaaaagcaattcacattgttggctgttgttgggtttgttgtgtttcggtttgtttttgttgctggcgcgctgctgttgtttttgtcgatgctgatgttgttgctgctgctgctgctgccgacgtttgccgctctagcattacacattaactgcaaacgcacaagaagaataatacacagcctattagattatgttgaatggacgaacacaaatcgaaagcaatatttatttattttcttctttcttttttgtaatttagccgcgcgcgagtggacagcgaaaccgaggggaaaatggaaacaaaacgaaactaaaatgcgacgagacgtgccgaagacggggcgaaaagggaagaacaacgagaacagtaccgagaattctctcggtctcgttgcactcatctgtgtgccgcttgacgaccactcactctctctctctctcttgtctgttcttgcctcgcaattttattcgccaatactaccagcgctgtactcgttattttactcgcagacgtgtgtgttggcctctcgctcttttggcgcacaccacgaaaatgaaaataataatttcattttgccgccagtcccctaaaaaatatggaaaacaagtgccgtcgttggcaaaaatatactttgaaacatgcttaacatttttatgacaaatacatttt

SEQ ID NO: 38105 - DNA, 708 bp, DROSOPHILA
atgcacgcgtgtgtctgctgctgttcgacaaacaacaattgcaacaacgagaacaacgacggcagcagcagcagcagcagtaaccacaacaacaacgacagcagcatcagcagcagcagcaaaaacaaattgcagctaaaaaagcgcagggccgaagtcgaagaagaagaagaggtactggtcaagcggacgcaggataagaacaagcatcaagaggagcaggagcaggaggagcaccaggcggtggaaaagttgtctgctggccaaagcgccagtggcggcgacaacgatctcaacggcgccgcaacgagaaggcggtggtggctgcgcgatcctccaggatcagcggaagcggcagaaggagagggaaaaggcgaaggagtggaagtgggtgtgggagcagaaggatcagcgggcacaggtccgacgacgtggtggtggtcagctccatccgttgacgttgcggtgacgatagcgccggctacgttgttgctgtcgttgcagcggcaattagcaaaggaattatctaaatcaacaacaacaactgcaacaagaacaacaacagaagccacatccttagcaataaaaagcggagcagcagcgttaatatcatcattaagtgcaagcatcgccaacatcatcgattacaagatcccaaaacaccaataccaaaaccaaatcccaatcctcgccagccacgccttttga

SEQ ID NO: 38106 - protein, 235 aa, DROSOPHILA
MHACVCCCSTNNNCNNENNDGSSSSSSNHNNNDSSISSSSKNKLQLKKRRAEVEEEEEVLVKRTQDKNKHQEEQEQEEHQAVEKLSAGQSASGGDNDLNGAATRRRWWLRDPPGSAEAAEGEGKGEGVEVGVGAEGSAGTGPTTWWWSAPSVDVAVTIAPATLLLSLQRQLAKELSKSTTTTATRTTTEATSLAIKSGAAALISSLSASIANIIDYKIPKHQYQNQIPILASHAF

SEQ ID NO: 38107 - DNA, 3799 bp, DROSOPHILA
tttatgccaaaaggaaaggaaagtccggagaaaatctacaatccatggtggcgggaaagagagggtccgataagtcggcgaaagagaggggtgccgtacacggctatccgccatacaaagtccaaccgagcgaaagctgttgaaaatgcattaaattctttgctcaacgagcagacaacagactttcgagttgaggtgctgaaaaagtgggctagtgatgggtttgtggattactaaagcccccggcgttataaatataatcccaaaaaatgccaaagggccaggatttattggtggcaatatggtattaggaaagatgtacatatgccccaaaatatttatgaaaaaatatgtaaaccccatgcaattatttaactacgttcctcatttcttgagaataaattattgaaatgacttcgtggcatggcattccacttaatttgaaacacacacttggtcccagtggagttttgagttttattccgaggattgcttacttttcatcgcttttgccctctacgaaactaactttcaccgaacttcatttgcgattccatccatgaacctctcaacagaaacaactttggccagccatcatcaattccactagctaaaagggttaacctttcacctttcacccctaacccctggcctacaaataagatttatggtcgcacatcaaattgatccatttctgtttgcctcgacttttcctcgctaatttgcggcctttacctttggggatttagatatagatatttctctcttaccatatatacatatatataagttgatatatatgtacatatatgtatatataggcttatatctgtacatattttgcacgcttgtgtaatttagttgggaaaacaagaactgcggtcttcggttacatctcagtgttccaaaatttgcataaataaaattggcataataaaatgtaaacattttgctaagcaaattgttatagcaccaccctttctcgattcaaggattcgtcttagggactcatccttcggatgaggatgcgagcgcctagccaatatttgtggagtcaacaaatttacattgcaagtgagaaaaggcacgaaatccttcgaattgaatgggggtttttcgccaacagggattatttagatagaatatatattgaatatatctaggatactcactgcactgcgcctcatccgatttgtcctcacaatcctcgatcatatcgcagcgatagtgcggagggatgcagtaggtcttgttgaacgtgtactgcccgcaattcaactgcggcgtttcgcattccggtggagctgtaaaatgggttttttttttttaatattactaaacatatacacaatgatcaagttaacatataacttgattttaaaggctcacaccaagcagctactgtttaaaatatagtctttggcagaggcttatcttgcgttaattacaaatatatacatatacatatatatatatacatatatatatatggcttcagtgcattttcattaagtgccttctgcatcaatcagatcttcagtgagcacgcgttcaaattaattaattccggaaattccagcgcataagagctggattgaaattcgattcatcacgaaaccattcaacgaatcgccaccgcagagcacttgaatatttccttggtttcgctggcgcggtcccacttaattactgtctataatgtcacatattttttttaattttccccaaaatttccacatggtcagcaagagtattggtacgatacttacggcacgactgcatctcatcctcgccatcgtcgcagtccttttgataattgcagacccagtggtgcgagatgcacttgccattgttgcatcgaaacgagtccgttggacactccgtgttgatgccactgctgctgccacctgtgctggccaggctgccacctggaaaaggaaaggagaaatgtcccggcaaaagcggaaaatcagtgagggctcttcttgtcgcactaattggcatgtgactgccgctttgtcagtcgacttatccgcaagtcgttgcaaaactttgctaataaccaatgcggtgccaataaacaaactgccaacgggccaattagcacttgaaagcaatagtgcaaaaaaacaaaataaatgataatctaaaacggtttaactattattaaacatgttaaaaaatgcacttatagcacatcatatattattaatatcacttggaaaaaacatggctttaaaaagtctagcaatgcgaatgcttgacacatttaagttgtttttttttgtatactcatacttatttgaattacaaatgctttcctactaattaacaagctgagaatgcacttttttcgagtgttccaaaaaaaaaaaaaaacgggagctgggcaaaggaaaggcaaagggaattctggctgccgacaacaaaagactgtcataaaatggcagctgcaaggatgcgcctcaacttttgtggctgccaaagccgccgcggctaatggccttgtcacacacacacacatactggcacacaaacactaacacacttacaagcactagcaaggggcacacacatgggggaaaagtgcaggaaaaactgcaacagcagaggccaaggaaaacggagcagggaagtcagaacgcgaccggaaatgcttagctgggatttcttctcgacggggaaaatggagcagggagctgggagcagggagctgggaaaccggtggaaaatgggtggggaaaatggcgcacggggtcgactgttcagtttttggggccagggcgctgacaatgtcatttgtttccggctacgtgcactctgcacgtgcccgactttttgcggccaactgagagaaagtggagaaaggcggcatgaagttgcccccttttttttttgtttttttctccgggtgcacctgctacaactgcaactgcaacttccaattccgcatcgtcgatggtagttgaaaccgaacttcaattaagcccgatgcgaagtgaagttaaccgaattggcgcaaactgaagccaagaattgaaactgaatggagtgcgcagagtgggaaatgcaaaaggaagctgtcaaataacaatagaaatcgaataaagaaaaaggctttcaggataatgggaagaatctaaaataatttccaactttcgttgcagcttaagcacggactgctaaattaataatacctgaaaaccaaattcgatttaacttgcagtcttaaaatgcggagtaattgtacgagtaatgcattttcagggtttcaattcaactttcttgtgaaacatttccaattaatgtgccacaaatgcgttagccactcaaaccaccgaagttgggcgccacttccgccactttcaccacctccgccgcagccgtccaaaaagcccacctttgaaataaccctgaaaagttcatgtctaattatgcatctaattagtgagtgcattctccgtttggcaattcatgccgaaattatttttgccgcttccgtgccataataagagccaaaccgcagacgacaaccgaagttgaggcccccattttggaacccctttttgcaagcgccacacgccgcctatgcttttgccaacatgctgccatgtcatgcaattcattgcgaatttaagtacgcatgccttgccacagaatgaaaacggagtcatgttttatcacagcggataattcacatggtgcagttggcgggttggattcccccccccaataattgtgccagcagaatcctttcatttacgcattgtgctgctcaaaataatattcataattgggc

SEQ ID NO: 38108 - DNA, 372 bp, DROSOPHILA
atgacattgtcagcgccctggccccaaaaactgaacagtcgaccccgtggcagcctggccagcacaggtggcagcagcagtggcatcaacacggagtgtccaacggactcgtttcgatgcaacaatggcaagtgcatctcgcaccactgggtctgcaattatcaaaaggactgcgacgatggcgaggatgagatgcagtcgtgccctccaccggaatgcgaaacgccgcagttgaattgcgggcagtacacgttcaacaagacctactgcatccctccgcactatcgctgcgatatgatcgaggattgtgaggacaaatcggatgaggcgcagtgcagcgctcgcatcctcatccgaaggatgagtccctaa

SEQ ID NO: 38109 - protein, 123 aa, DROSOPHILA
MTLSAPWPQKLNSRPRGSLASTGGSSSGINTECPTDSFRCNNGKCISHHWVCNYQKDCDDGEDEMQSCPPPECETPQLNCGQYTFNKTYCIPPHYRCDMIEDCEDKSDEAQCSARILIRRMSP

SEQ ID NO: 38110 - DNA, 1791 bp, DROSOPHILA
attcgattttttttgcgacatttgaatatcaaatttgcttggtttacaaaataatttaaactttcactattatgaataaatttttgtttagtaatgttcaatgtagttctctaagccttctgggcttaccaaaatcaaatcaactaattcattctgacaacaacccaccttccagtaaaaagcattctatgttttagtaaatttagtaaagaatttacacaactgaaaagtttacataaattaagcttagagactaattcacaaaaaaaaaaaacgatcccacactgcaaccgcatcaaaatctcatgccgcccaaggccaatccaagtgctatggtcacggtgacgcccaccgagctgccgatgattgctccgccattctggtagccataggtacccgggtagttggggtccggccgtacgcccatgtagcccggctggccgggatggcccacctggttgttgtaggagaagggacgaccgtgctcgtccgtaccgctcacgtagtaggctccattgccacccgctccaccgtaggtaccacgcgaatcgatgccggcgtatccgtagctgaactgcggatcctggccactcagacttcccggcggatgcatcccgccggactgggcgctcgaatagacgccaacgccggccgcatttccattgttccagtgcaccgttccggcctgggcatccactggattcaaatgaaatgtgcttgaattagtaacgcatgtaaaaggtaactttccttgaccacaatgtacccgccacttctcgtggaccaaacatgctacatggtcgttatcaaaatgagacctaatactattacacattttaaatcaaatagtttaaaaattttgctttcatatttggtttcaaatagaagagatcaataatttgctgataatatcgcagtgcttaattctccattagaagttgaaattgaatttgtttacttggcaccgtcgaaatggtatcgtgtgtgcgaatgcgatgtgttattttccatggaaaagccgctgaggtttatacgtatgtttatttatcgtattttttgtgcgatttttcatatgttctgttagcgtttcactcaccagcactaaaatgaactagtgccaatccgataacaatgacgatcagaatgcgattgaaattcgacatgttttccgaatgcgcgtttgacttcaactaaaccgcttccaaagtgccattgacggttttaaactcgattcccaagctcggctctcatgttatgagtaacaatagcgattttctgctgccctgagtcatattatttggtgtttatttactcaatttgaatggagctgtagtttcggtggggtatgatcaaaataggcactttatttagcactgaaatcgaaaatcgaaacaacagattaaacatcttaaatctttttgggtaaaatattaccactaggtatcatatagtcgaattgcacaaaaattttctctgttacaagtttacaacctgtatttatctcactctgtaattagatatgacttgtgacttgagattaacaaaatagtttcggttagctgcaggtaatgggtatcttttagtcgacgcacttttctcaattaatttgcgtctgctttattaaggaatcctcaaaataaaatttagctatactagtggtattaattcttcttattgttcatatccattcatcgtttatttgttccacatgcagatgagattattttcttttcgatcaaagaacataaaaccgcggtcgtactttattttcccaaacgagaacacgcaact

SEQ ID NO: 38111 - DNA, 426 bp, DROSOPHILA
atgtttggtccacgagaagtggcggtggatgcccaggccggaacggtgcactggaacaatggaaatgcggccggcgttggcgtctattcgagcgcccagtccggcgggatgcatccgccgggaagtctgagtggccaggatccgcagttcagctacggatacgccggcatcgattcgcgtggtacctacggtggagcgggtggcaatggagcctactacgtgagcggtacggacgagcacggtcgtcccttctcctacaacaaccaggtgggccatcccggccagccgggctacatgggcgtacggccggaccccaactacccgggtacctatggctaccagaatggcggagcaatcatcggcagctcggtgggcgtcaccgtgaccatagcacttggattggccttgggcggcatgagattttga

SEQ ID NO: 38112 - protein, 141 aa, DROSOPHILA
MFGPREVAVDAQAGTVHWNNGNAAGVGVYSSAQSGGMHPPGSLSGQDPQFSYGYAGIDSRGTYGGAGGNGAYYVSGTDEHGRPFSYNNQVGHPGQPGYMGVRPDPNYPGTYGYQNGGAIIGSSVGVTVTIALGLALGGMRF

SEQ ID NO: 38113 - DNA, 3099 bp, DROSOPHILA
tatcatttgcccaatgcctattctacgactatatatacaatatatgtatgtatgcttgccgtgtatatatatatgccaagcaggcatatacccaggatgctagagggttacagtttccagctccccgggctcaatgtccagggtatccactcgatgggtgctctttaaatttgtttgccccgcatgtgcggacactttgctcaattgatgagacataataactgccggcaaccagttttggccaaagtcggaacagtttcctctaccatcgctggacctgggcccccatcaacttttgactgcccattaaatattatggcaatgcaaacgaatcaacaaagccaaacaacacggcctacatacagccaacgaaaatcaacagcggcaatcattggaccgggtattttgcatatttggccatttttggctattcctcgcgacgtgacggcaaataaaagttaaatgaaaattaaactatgcaaatacaagcaaattttgtgggtgaaaggcggggcagggttacggatatcgagaggattccgttggcctgctggcgtttgaattgtctggtcatttggcaatcagtctgaaactcaaaaatgaattgggttttcaatccgcgccaccactgccactacctgagccattgtagattattccgattaagtgatagactggcgttcaaatatagtctctggtcatatcgatattatcgatgatgggtgaatttggcatcgatagtattgctctgggaagcgttttggttattgaacgagctttatggctatgtatttctattttgtgttttgaaggcggtatttcgagcacacattataatttatcactaatatcatgtatgcattttgtattttccatgaaggaaattgatttggaataagtttaaatcgaatgcttgacggagattagcattatcaaaatgattcaaacccaaaatcaaagacattaggcaattgcctaaaaagtagtgtgcaatataaatttaataactttaaaaatttttaatccgaactactaattttgtaagcgatgagtgccacgaatgaaaacgaactaagtgcgactgcatacgggatggtagaaatgatccgtgctctagtgttagaatctccggcccccggaaacctccctgcaacccgctctggcgagtgtgcgtggtgatttccagcgacgtcgatagatcgatgtacctaccacgattttctggtcctgcctaaagggtccggaatttgcatcgttctgtacagtgttcctgttggcctgcccatgttttatctgcgcctggtcctgttcctggcgcacgtaatgtccctggctccggctgcggcagccactgccggtcgcctggagtccgcttgcagatttgcacgtggtgatgggatcgtcgaagaaaccttcgtagagcacaaaattgttaccctgcggaatggtgcggaccaggccatagtgtttggccataaaggccagcatcttattggacggtcggtccacagtgcacttgtgcgctgaccagccctgcttctccagcatccattcgaatagcagctttccctggccgcagcgctggcggctctcgtgtacataaaaatccagaatggctggcgtttgattaagccgccggtagcatcccccctggtcgaatacaaagagatccttggtgccgaccttaagcaacccggtgatttcccagtgtcccgctgctttgtccgccattagatagaccacctggtcggaagccaacttgtcggcggaggtcactgcatggcagagtccctgcgcgtctgccgacaacttgcccatgatgtttaggatttcgctaagccgacaactggtcatcgtcgattttccccgttccgtttgggcgtatcgtctacattgggtgaccttgggacgcagcgaatgcgcctgcacccggatgatcgattgcggaaagaggtgcttaatgtcaaaggcgaactccaccatcttggtctctgatttccgatttcaatggcgatataattctcgggctctaccgtcttacacacttagtgttcgtactcgatcgaaaaaacatttgcagtgtctcccttgacttgggaacaaagctaatcacatagcctgctttgatagctttttcctgggctgtaacttgaggtctcgaactatttcaaaatacaattaactcaaaaatgtagcgattcattgatctcatgtaatgcataatttaatatctcatcaaaaaaagggacatgccggagccaaggataaaagaaattgctagaaacttagcaactcgatggagcataaggacaaaataaacctttttaaggacatttccctaatcgatcatgacggcaatcaaccaggataagaatcgaatgacagtaaaattatagtaatacaagagcttccactcatttgaggaaaagccaggaatagtacttaatatactttaactatctaagcaatttaatactagtttaaatcttaagagagttggttaccacatttaaggcggtaaagagtaaatccggttcatatactacaatgaaatattaaattctattaaatccttgtttatcagctaagcaaatgtaccgaaagatagaaaatattttgtgcctttatgtatgggagtgcatttattttgagtttatggctgggcactcagtgctcctctttcattttccgctggccagaaggctaaaaagtcattgaccgtgaagttggaacggcagcagctcgggatgggacagtaatccactgagaaggcatgcttgattgcactaaccccatcgcctgaggtcctgggtcctgggtcctgagtcctgagtcctgagtccttacacattttaataatcggccttgtatttaaactatttctggtcgtgtgcatatttttcgattttgactctggcccgttgagcttccggttgccagaattccattccgggtcagatgttaggccgtagtgatggtggtggtggtggtggtggcaggaggacgaaatggagcagtagctacagtggtatatgccccaactgatttaactgattggctgggctgggctggttctacggggggggtcctttatcgaga

SEQ ID NO: 38114 - DNA, 1099 bp, DROSOPHILA
tcccaagtcaagggagacactgcaaatgttttttcgatcgagtacgaacactaagtgtgtaagacggtagagcccgagaattatatcgccattgaaatcggaaatcagagaccaagatggtggagttcgcctttgacattaagcacctctttccgcaatcgatcatccgggtgcaggcgcattcgctgcgtcccaaggtcacccaatgtagacgatacgcccaaacggaacggggaaaatcgacgatgaccagttgtcggcttagcgaaatcctaaacatcatgggcaagttgtcggcagacgcgcagggactctgccatgcagtgacctccgccgacaagttggcttccgaccaggtggtctatctaatggcggacaaagcagcgggacactgggaaatcaccgggttgcttaaggtcggcaccaaggatctctttgtattcgaccaggggggatgctaccggcggcttaatcaaacgccagccattctggatttttatgtacacgagagccgccagcgctgcggccagggaaagctgctattcgaatggatgctggagaagcagggctggtcagcgcacaagtgcactgtggaccgaccgtccaataagatgctggcctttatggccaaacactatggcctggtccgcaccattccgcagggtaacaattttgtgctctacgaaggtttcttcgacgatcccatcaccacgtgcaaatctgcaagcggactccaggcgaccggcagtggctgccgcagccggagccagggacattacgtgcgccaggaacaggaccaggcgcagataaaacatgggcaggccaacaggaacactgtacagaacgatgcaaattccggaccctttaggcaggaccagaaaatcgtggtaggtacatcgatctatcgacgtcgctggaaatcaccacgcacactcgccagagcgggttgcagggaggtttccgggggccggagattctaacactagagcacggatcatttctaccatcccgtatgcagtcgcacttagttcgttttcattcgtggcactcatcgcttacaaaattagtagttcggattaaaaatttttaaagttattaa

SEQ ID NO: 38115 - protein, 287 aa, DROSOPHILA
MVEFAFDIKHLFPQSIIRVQAHSLRPKVTQCRRYAQTERGKSTMTSCRLSEILNIMGKLSADAQGLCHAVTSADKLASDQVVYLMADKAAGHWEITGLLKVGTKDLFVFDQGGCYRRLNQTPAILDFYVHESRQRCGQGKLLFEWMLEKQGWSAHKCTVDRPSNKMLAFMAKHYGLVRTIPQGNNFVLYEGFFDDPITTCKSASGLQATGSGCRSRSQGHYVRQEQDQAQIKHGQANRNTVQNDANSGPFRQDQKIVVGTSIYRRRWKSPRTLARAGCREVSGGRRF

SEQ ID NO: 38116 - DNA, 2414 bp, DROSOPHILA
gccaaaaattaccccagaaatggtgtttttatgtggctttaactgcctgtccgttgcccatcaattttactaacttctggcgaaatgacagcggcagggagaaaggagaaatgtgaaagcagaaagcagaaaaggagcaaggataccagctccacgaacataaaaatcaaatttccgcgtaaatcgttcgctcaacatttgttattttgtgtacaaaaacggagaaaatcagcgaaattgtagccgtttccccacaaaaataatgtataacattttggcgaaaaagtacacttttccaataaataagggagtggccaatgccgatgattcgaggtggttccaagtaaatcaaactcaaacagctcttcaataacatttaacacttattcgttggaaaatatgtgacatgttgaagaagcccataatcgactttatttatatatgcatataaatatattaatattattcagaatcactagccgagttgatatgaacatgaccccgtccatttgtccgtccgtaaaaactgagaaatctaacaagatcgtaaactattaaaactagatagttgttggtcgctgttttgaaaactgttgttttttaaagtttaaatgtaaacataaacaaaaaattaaacagccgctagatgaggctcctacttgcatatatacacatttgtctgcggacgctcttaagccgagtaatgggtatccgatagtcgataaactctatagactatagaaatctgtctagatttcgtattaattattatacatttaattgatacaattttacgatttgtaggctcgtctagagttaagtcgcagaaatgctctctcaactcaagcggatccaatctgaaacttgagccaaaccgaggcgcaatcgcgaatgggcagatactcggggagtgcgtccagttacagtgattagaacgcgcgagagctgagagctgggctcggtgaccttgagcgggaagtgaaactgataaggcggcacaatggagcactggaagtggatgctcgaatcgaaatcttggaaacggaacggcatcagttgcttcttgcttgccaccgagatgagcgcaataaagcccgccctgctgctctgcctgatcctcaccatcggtctgttccttggtcaaggtcgggcgaatcccgtggagacgaatgttcccgatattcccgcacccgatgccaacgaactgggcatcgatttcggagaggaggaagatgccaccgacaagccactgggcatattcacgatcaaggtgcgccacattcagccggaccccgcccactgcgcccagctctcgccacatcacccacaccacccccagtgccacagctactgcaaacgccaaggtcactgggtgggccagtgcaagaaggacatctgtcagtgcttttcctaggtctacttcgactgtaagccaaaacagcgtttttttttttcttttgttgagtgcagcacaactatatgacgaaatatgtgcaaatatgtttatctaccaactagtatatatattaaaactggcaatgaacaatgaaagcgaatcaaaattgctcaaatcatacacataatatgtagtctttgaccttctaacatgcactgaatagaaaaagcagaaccttaataaatcttcaagttaaattcaattccattggatgctacatggattttgggtttctggagaactagtgtatgttggtttttaaaggaatttagctgagcattcaatccgaagtgtgatataaaatggaatatgtgatggtaaaatgaatattcatggatcgacttgcccataacccaaccattcccatcaagcgaaacttttgcaacattattgctgtgctaattaccaaaatgggtccggtccgcatgttattataacttacgggttactgagatcggtcaggagtgaaaagaatttccaattaaaacgaaatccaaactgaacttcaaggagtctgcgatttaatgaatgtcattgagggccccagccgcaccaattatatccattagttgacatttacgcaatggattgcggatttgaaggaggtgaagtggcggtccgaggtcgcagatactcacattattggccaagtttgattgatggcattgttctgtgcaataagctgcaggacttaccccaagtgccccccatctggattctctcggctcttctgggcttcagtgggaatgcccaaatcatagctttgcctagttagatgtgacaaggaaaatgggtaaatgcgaaatagattttccatccgtgttggctctggcatttctattctatcctcctcacacatgctgtaaactgattttagctcaatataatgtgacgtctctcgcttttgataagggttctcctctcggccggaggctgtcaaatgataagcagcagacaa

SEQ ID NO: 38117 - DNA, 414 bp, DROSOPHILA
atggagcactggaagtggatgctcgaatcgaaatcttggaaacggaacggcatcagttgcttcttgcttgccaccgagatgagcgcaataaagcccgccctgctgctctgcctgatcctcaccatcggtctgttccttggtcaaggtcgggcgaatcccgtggagacgaatgttcccgatattcccgcacccgatgccaacgaactgggcatcgatttcggagaggaggaagatgccaccgacaagccactgggcatattcacgatcaaggtgcgccacattcagccggaccccgcccactgcgcccagctctcgccacatcacccacaccacccccagtgccacagctactgcaaacgccaaggtcactgggtgggccagtgcaagaaggacatctgtcagtgcttttcctag

SEQ ID NO: 38118 - protein, 137 aa, DROSOPHILA
MEHWKWMLESKSWKRNGISCFLLATEMSAIKPALLLCLILTIGLFLGQGRANPVETNVPDIPAPDANELGIDFGEEEDATDKPLGIFTIKVRHIQPDPAHCAQLSPHHPHHPQCHSYCKRQGHWVGQCKKDICQCFS

SEQ ID NO: 38119 - DNA, 5377 bp, DROSOPHILA
ataatgcctgtcatacgggtaaataatgcaaaataggattaagcccatataattgaaatcgaacccactgaaagttgcccatcaaatattgataacgatataaatcagcgcctattttgattatttccgctcgattgcttgccatcctgtgcattcagataaccgaagggagataatacttacaaatgcaatgcgagtcgcgatagcacaacttaataattcattaaatgtttacatgatattcaatcattttaagcacccatcctttgaggttattgaattgttctcttccgtagccatgaaaccgcacaaattctttttcaaaatatttgcaaattaaatcaaataagattatgcccccgtttttttttcactgatgcccaattattatgcacaaacgaaagtattgtattgaattgaaaagtcgccatcgaataattacgccattatagatgaaaccatcattcacccaaagcagccgggccaactaaccacaataaacgtggccaagtcatttctcatctcaagagatcagatcggatttacattatgtgcacatacgagtactatatacatatatgtacatatgtgaatacaaatagcatatataccatcggatgatatttgctgccatgcagcttattaataattacctttatgccaggttcattgtacacactcggcttaattacgagtattagttattaatcgcgtgtgcagtgaaaaaacaaaaataataatgtgcgacaagagcggaaaacaattgcacttcggtgaataaaatttcataattgcatataaatcattttaattaaattattattatgaatggcagtgcaaagattttcgaatcgaacgcctttttccgacatttaatgcactaaatgaacgatgggcggccattcaacatccaacggcaacttattgcgttgattccgatttaagttgattgcatttcgattcgcaaacgattcctctcacgctcacgccccaatgttccatgttctctctgttccaggtactggccgccatcgccatcgccatctgttgcctcttggccacttgctgcagcgccgaggacatcgaggccatttccagcaaggccgtggacaaggtcgaggccatccccatccccatacccacctccaccaccaccagcaccagcaccaagctgacccccaccatcgcggaggagtccaagagcaggacagagaagcgcgactcatcggatcagacaggtgggcggtggttacttttccttgtgcatcattatttaatggttatttcaattggcttcagtcttaagggggtctgtggtgaatgttctcgatagtttatcgctagaaactaatttgatttcacaggaaataaggcgggtctaagccaggttctgtccataacaatgcagcaggatggaaaagtcattttcgcttaacagtaacgtatagaataagttccgatggaagttccttaaaaatcgttcaatcagacgattataatttagactggttagtcttagtttcagctaacagatctccaccaaaagaggtttccctctttagcagctgagatgtaacttgtgtaaaatgatctatggaatatcaattaaatatatttacaaaatttaaattcaaaattgtatgactagaggatgtgtttatccgagatgcatgaactcaaatgcaagtctatcattttctgagatacattatctccacgtgcagcagttattacgccacacatggcgctctctccgtggcagtaacaatttaattgtccaaccaactgcagttagcgccacaaggtgatttgcagtatttacagtgactgaccgcaaatttgcccccgcaggtggtccttacttgagcctatcgagcaaagacccgccgttccgaccgtattacccagccggcagccactttgaggcggagacgcccacgcccatcttcggacccaccacgctgcgatacacggcggcggaggcggcaccaccggcaccacagccacaggtaggcagcaaccacagcgagtgcatttaattacggcgccgcaatctctgtttgcatcgcccaagtgccccacactcactcactttgccccacctatcccgcaggcattctacgggcagaaggcgccaccgcagcaccaccgcttcagctttgcagtgccgcagcaagtggaatcgtatcagcgacaagtcgcctttaagccagctgccccttcgacgcagccacaccagcattcgcaatcgcatccgcatcagcatcagcagccgattttcaattacggcgaacttgagccggaggcgagggccacagcaccactgacccagcaccaccagctgcagcagcagcagcagcagcacctcccacagcaccacttaagccagcagacgaagtacctgcagcagccgcagcaaaagttgcagcaacgcatccagtatataatcgccataccactatcgtacatgcggcagttgcagttgcagcagcagcagcatcagttgacattgggtccgccgcccaccagtagtagtagcagcactggcactagcaccaccagcacggcaccaccgtcagctagcccggcaaacggtaggcatccgttggtgcagcttctaggtccgctggcccgcgatcatcagggtcagtacaagccctactaccagtcggatgcagccagtgcaccactggcgggacccagcgcaccgctgatccatcagccgtacctgcaaatacccaccagcctgctgatggctgccgcccagcagctgcagcagcagcaccaccaactccaccagcagcagcagcagcagcaacaacaaccggctgtttacgccaaagtggcagccccacctgcaccaccggcaccacccagttaccagcccgcccagttgatctaccagccgcaggcacaggcgcaccaccaccagccgcagattcaactgcagctgcagcgaatcttcctgcagccaccgcagcctcagcaatccaccatctacgccgagcaaccagctccactttatggtaagccagcatattaaactgcattagtacgtcaagtaaaacaaaagacagcgctcgactatcgaatacccctttctccatttcttgcattaaactgcaagtctgggtattgttatataaatccttcgagggaagcgattcgcactacatatattacgtatacgtattccgaatatacgtataaaactgtcgcttttccgctagtatgagtcaatacaaaagacagattaaatattaaagtccgaaaataatacagcttttacagcaggttcgttttgggcactctaagtcctcgattcgagggctaacacttttgacttctcgcataaagccttagcataatcggtggtctgggtaattagtggctggcaaagtgctctgggagaggaattaggccgtgaaatctgatgcgagtaatccccttgtttcattgcgcctttcagcgtatccgctgcagcagcaacaccaccagcactaccagaagccgcaccagcaacagaccctgaaacaggcgcatcagtcgcagcagcaacacaaatacacgcctgcagcgccgacatctccgacagcattgacaacatcaacaacgagcaccgcagcaacatcagctgcagcagcagcaacagcagctgcagcagcaacaggaacaccacaggctgcagcagcagcagcagcaatagcgacacgacagcaacacttgcccctggtgcactacaatcccatttacgtgcaggcacccgccgagcagcagcatcagcagcagcatcaatttgccatattgccacgttttagcaatggtaaccccaaggccgtttacagcctaacccacgaatcagcggcagcggggccaggaacgggaataggagcgggaccgggtcccattcacgtggtcagattgtcggcggcaaatgggccgccgatccatcactacaactacaactaccagacggcgccaatgctgcagccgctctatggccatgccccgcagcagtatgtgtcgtcctatgcggccggcgacgaagtgcaaggtcccaagttgcaggtccccgtttccggttccggttcgagctccggctcacttttggccggacccacgccatcgcctctcatgaccgcggcctcgccagccataataccatacttcagccatcctggcgccgtgcactatggcacgcatttgtaccatccgggcgcagcaacagcattgggtgcaacagcatcagccacatcagcagcatcagcagcagcatccgcagctgggcccagagcagcgggaccaaagcaacagtcgaccgcaacaagtgggggacagctgccaggtgacagtaacaatattgtgaaatatccctaaggcgatcaaagcaacaatgacagcggcagcagcagcaacacaaacgccaccaggagcaacatcaccaaccataacccatcgcccagggcgaggatggaactaagctttaagctcggtttcaagacccagcaactggagcagccaggacctttcactccgttcggatttcacatttgttatacggtcttgctgctcctgtttttggtacgctgtacgctaattacgtattttactcgatttaaaaacccccctttggagcccaagctcccttacctgttgttatgcaaatgcggagcgttggcgtttgcttttccaacttttaatgagttcgcccgtagacgacggtttttgtgctcgttcggttttttttgtgtaaatatttaagaaattttccaatagactcgccaaataaatatttgcctaagcctacatatacatatgtacgtacatacgtatgttaatattaacaattatactcacaattaaactcattctataaaaagtggaaaccgttagtttcatttggcaaaggagtaatgagtaagtaaaatccattgaaatcgattgaatttttatttgttatatatatattctcccgtgatactataatcgctattcttatgtcaagcccgttgtcgaaccgtttaaattgccattgatgggttacataattatgttggtaattcaatatttaagtacacattcagcggaatgactacgaaaatgaatcagatggaaattgtcgctggaaccgcgcattggttaaatcattaatcgcatatccattaattgacttatgtggactttagccatgcacagtgggacaaaaagtcaaaatgggaataaatcaagcagtatattgatataaactattttgaattaacaggaatgccaaatgacctttcctaaatggtgtttgaatttttcaaaatactatcccgcttgactaggctcaccacagtgcaaagagcagaattgaattgcaatcaagggttcgaaa

SEQ ID NO: 38120 - DNA, 2217 bp, DROSOPHILA
atgttctctctgttccaggtactggccgccatcgccatcgccatctgttgcctcttggccacttgctgcagcgccgaggacatcgaggccatttccagcaaggccgtggacaaggtcgaggccatccccatccccatacccacctccaccaccaccagcaccagcaccaagctgacccccaccatcgcggaggagtccaagagcaggacagagaagcgcgactcatcggatcagacaggtggtccttacttgagcctatcgagcaaagacccgccgttccgaccgtattacccagccggcagccactttgaggcggagacgcccacgcccatcttcggacccaccacgctgcgatacacggcggcggaggcggcaccaccggcaccacagccacaggcattctacgggcagaaggcgccaccgcagcaccaccgcttcagctttgcagtgccgcagcaagtggaatcgtatcagcgacaagtcgcctttaagccagctgccccttcgacgcagccacaccagcattcgcaatcgcatccgcatcagcatcagcagccgattttcaattacggcgaacttgagccggaggcgagggccacagcaccactgacccagcaccaccagctgcagcagcagcagcagcagcacctcccacagcaccacttaagccagcagacgaagtacctgcagcagccgcagcaaaagttgcagcaacgcatccagtatataatcgccataccactatcgtacatgcggcagttgcagttgcagcagcagcagcatcagttgacattgggtccgccgcccaccagtagtagtagcagcactggcactagcaccaccagcacggcaccaccgtcagctagcccggcaaacggtaggcatccgttggtgcagcttctaggtccgctggcccgcgatcatcagggtcagtacaagccctactaccagtcggatgcagccagtgcaccactggcgggacccagcgcaccgctgatccatcagccgtacctgcaaatacccaccagcctgctgatggctgccgcccagcagctgcagcagcagcaccaccaactccaccagcagcagcagcagcagcaacaacaaccggctgtttacgccaaagtggcagccccacctgcaccaccggcaccacccagttaccagcccgcccagttgatctaccagccgcaggcacaggcgcaccaccaccagccgcagattcaactgcagctgcagcgaatcttcctgcagccaccgcagcctcagcaatccaccatctacgccgagcaaccagctccactttatgcgtatccgctgcagcagcaacaccaccagcactaccagaagccgcaccagcaacagaccctgaaacaggcgcatcagtcgcagcagcaacacaaatacacgcctgcagcgccgacatctccgacagcattgacaacatcaacaacgagcaccgcagcaacatcagctgcagcagcagcaacagcagctgcagcagcaacaggaacaccacaggctgcagcagcagcagcagcaatagcgacacgacagcaacacttgcccctggtgcactacaatcccatttacgtgcaggcacccgccgagcagcagcatcagcagcagcatcaatttgccatattgccacgttttagcaatggtaaccccaaggccgtttacagcctaacccacgaatcagcggcagcggggccaggaacgggaataggagcgggaccgggtcccattcacgtggtcagattgtcggcggcaaatgggccgccgatccatcactacaactacaactaccagacggcgccaatgctgcagccgctctatggccatgccccgcagcagtatgtgtcgtcctatgcggccggcgacgaagtgcaaggtcccaagttgcaggtccccgtttccggttccggttcgagctccggctcacttttggccggacccacgccatcgcctctcatgaccgcggcctcgccagccataataccatacttcagccatcctggcgccgtgcactatggcacgcatttgtaccatccgggcgcagcaacagcattgggtgcaacagcatcagccacatcagcagcatcagcagcagcatccgcagctgggcccagagcagcgggaccaaagcaacagtcgaccgcaacaagtgggggacagctgccaggtgacagtaacaatattgtgaaatatccctaa

SEQ ID NO: 38121 - protein, 738 aa, DROSOPHILA
MFSLFQVLAAIAIAICCLLATCCSAEDIEAISSKAVDKVEAIPIPIPTSTTTSTSTKLTPTIAEESKSRTEKRDSSDQTGGPYLSLSSKDPPFRPYYPAGSHFEAETPTPIFGPTTLRYTAAEAAPPAPQPQAFYGQKAPPQHHRFSFAVPQQVESYQRQVAFKPAAPSTQPHQHSQSHPHQHQQPIFNYGELEPEARATAPLTQHHQLQQQQQQHLPQHHLSQQTKYLQQPQQKLQQRIQYIIAIPLSYMRQLQLQQQQHQLTLGPPPTSSSSSTGTSTTSTAPPSASPANGRHPLVQLLGPLARDHQGQYKPYYQSDAASAPLAGPSAPLIHQPYLQIPTSLLMAAAQQLQQQHHQLHQQQQQQQQQPAVYAKVAAPPAPPAPPSYQPAQLIYQPQAQAHHHQPQIQLQLQRIFLQPPQPQQSTIYAEQPAPLYAYPLQQQHHQHYQKPHQQQTLKQAHQSQQQHKYTPAAPTSPTALTTSTTSTAATSAAAAATAAAAATGTPQAAAAAAAIATRQQHLPLVHYNPIYVQAPAEQQHQQQHQFAILPRFSNGNPKAVYSLTHESAAAGPGTGIGAGPGPIHVVRLSAANGPPIHHYNYNYQTAPMLQPLYGHAPQQYVSSYAAGDEVQGPKLQVPVSGSGSSSGSLLAGPTPSPLMTAASPAIIPYFSHPGAVHYGTHLYHPGAATALGATASATSAASAAASAAGPRAAGPKQQSTATSGGQLPGDSNNIVKYP

SEQ ID NO: 38122 - DNA, 2294 bp, DROSOPHILA
ctcgccgccacgttcctgaacccccaccccccctccctcctccccaccctcaccacatttgttcgttgatcctggcgaaatcgggttgagaagggggagcagggagcttcgaagcggacggctttgaagccgctggcgccagcatatgaaatgatgtcacccgtcgggattacaagcgggctttgagatttcacttccaaccgaagctcccccactgcacgccagccattcgtatgccccccatttctctctctctctctctgccactctagccgtctccttcggcggcattcgaattttgcacactttgcacttttgatttgcctttggcttttcaccgcatcccggctagcaatgatattgactcggctcgatggctgcaagcggcataaataaaacggcaatgcaggctctttatcgtacttgcattgtttgagagcattctttggcgaaattattaataaatcggcaacggaattcgcaaagccgtaaagacaagcgatgcataagctgtataaagcatataaagtgatccgaggctaaattccagtacagtcatttttcattaaagatcacacataacattccattaatgcgatcatatggtcatgcttatctgtagaggcaattcactgaaggcaccatacaatttgcaaacatgtcaactttgaagacgcagttcaactgtgcggcaaatcagctgtgcagcattgtattcattaactaagctaccccccccccccctttttttttcaacatactatcctaatagttctctagtgcttgcacttttggcttagcgttctgctctgcaattatgtggctccttagcactcgctatcgtaacataactcgttcgctaaaataaataaacattaatcgtttgatttgattcattgctcgaaatggataatagaagagcttattattgttattattttatttatgcgtcaagaccatacatgataatacattggtattttgggaataggttaatatactatttcttcggcaaatgtagcttttcttctatttccactctgattacatccaggaggcgatcgaataacagcctattacattccttctcattcagggcaatcagatctttcaggtcctttatgtccttatcgaagcgctcggacacattcttaaagtattcttcctcggactctgaagactgcgaacccttctccttctgggtggacgattcacttggctgctcaggatcctcgctcgtcatgtacttgttgtttttagatgccttcgcatccgcgttcgacttctctgccatttctaaattcagttgagctctggatattgtttcctaggcaattggtgagacgaaagtgaactttattttcagtcgcaacgaaacttcatgttcacgtgtcagcgacatgccaacttgatcgaaattcaatgtggattttcaatggttcctttgaaattaggaatgctcgaatatacaaagtttgaaaaattttgccatatatatatcatttgagcaatatatccaatctcgaaacttgtctctcacttaaaagacggattatttattctatattagacaaagatgattattttgtttgttttatagtatatagaatgtgctaattaacgaaccatttaagtaatgcccataatattaatttatgcgttaacactaagtccattcgataacatagtgtgaccataatgcattggtattttggtatattgtatcaggactggttatcaacggaggtgtgcaactctttcgaatttaagcaccacaattggcctcgccttcaccacatgaaagatcacagcctggagaaacgtttaattctgactcatcataccatagacgctaggaacgtcttctgctcttcttgcccaggatcttggtaaatatgttgtgcgccttaatcactgccaccgtattactgagaaaccgttcaggaatcttcatttcatgccgtgctctgtttgatggtggatctcaactgcagcttcaacttcaagatgtcaggaagctttgagacagatggttcgtcagtaaatacatttcaatgcgatctggaacgtctaactactgcaatagcctccaatattattgaaagccagccgtgcttctgcattgacacccttgcacctggaacataacccaaaaccttatgctcgcggacccagagtttcgtagttctcaacgcattgatttactgatgggcgccagtgccagtctcttctacgaactgctgtgcgtcggtcaagtcaagcttctgtcgggtttgccgctaatgcaacggact

SEQ ID NO: 38123 - DNA, 294 bp, DROSOPHILA
atggcagagaagtcgaacgcggatgcgaaggcatctaaaaacaacaagtacatgacgagcgaggatcctgagcagccaagtgaatcgtccacccagaaggagaagggttcgcagtcttcagagtccgaggaagaatactttaagaatgtgtccgagcgcttcgataaggacataaaggacctgaaagatctgattgccctgaatgagaaggaatgtaataggctgttattcgatcgcctcctggatgtaatcagagtggaaatagaagaaaagctacatttgccgaagaaatag

SEQ ID NO: 38124 - protein, 97 aa, DROSOPHILA
MAEKSNADAKASKNNKYMTSEDPEQPSESSTQKEKGSQSSESEEEYFKNVSERFDKDIKDLKDLIALNEKECNRLLFDRLLDVIRVEIEEKLHLPKK

SEQ ID NO: 38125 - DNA, 3273 bp, DROSOPHILA
gtacatttgtataacaaaatccataatattatcttttaagctacgcattaaggtaatttcagaaggaaatgaacgattcctagtgacttcaatattattgaataataattgatttttccaaaaaaaagattgtattcaaatatatttcggtattgttatatattcatacataaattcatttatacacataacggaaaattaaaaaacatcgattagttcgtaatcaaagcacattaaatcaatgcttaacaataatcaggacacactatgtagtacgttatttaaaaaattattaacataatgcttgtgttctaactaaataaccgactgaccctttcaggagtaagggagaactcttcattctgataatgaaaatgcgagaaagatggagctattcaaacagcaaaacattgatacggacaagtccagttcgactctactagttttcctgatcaagaatatatgtatatacattaaagggtcggtaacgcttccttttacctgttaaatacttttcaaggaatttaatatacgcctccaccatacgagggcatgaaaatcatttttggtacttcacaacatttttaaaattgtaaaaggcttaaagattccatacaacagttatttaatatcgatagaaaattcgcgattctggacttttatttagaagtttttaccttatcgatatatcgatagaagatatttaaaatgctataaaagtattttggttcttccaatgtctaacgctttttttgagtgtcctgttgaggaaaccaatgttttttaagattttttcccaaagcttcacatgcgttttatcgtttgtaaatataattcctaattaaagttttttttatggaccactgatatgtagttctttaccatcaatgcgatagctgcgttcaagttcgacactaaataaggccgatgattaatcgatactatcgacagtgcccattcggccgatagctaaacaaaaacaaaaaaaaaataaacataaacaaacaacagcacaaggaccggacctagtcaaacaaaacaacgccatgggttttccgcgcatcctcagcaagaacaacaagatctacaccaagctgggcgagttctgtttgtcgggggatagcttctggattgtttgtcacacgtgccaagaggagttgcagacacaggatcagttctggaagcacatacaggatgagcataatttcatgcacggggtggcaaaggtatgctttatgtggtttttttttggcggagggtttataacccttggtctctttacacaggaacacagtcgtacatccagctactgcctaacggatgtggaggctgcggcggcagcagcaacgccaggaagcagctcccagcaaggcgccacagcgatcagtgtgcctctggcactttacacctgctcaaccaagtattctgaggaggagcagcgggaggtggaaatgcacgaacagcaggtgcaacaccaagtgcaacagcagcaagcgcagcagcagcaagcgcagcagcaacaacaccaacagtctcagcagcaagggcaccagcaacaccaggttcaacaacagcagacccaccagcagctccaacagcagcgggatgttgccaaggagctggctgaactccatgccaatgcggtagctgccgctgcagcctccgcagctgtggtatccacaggcgaaggaactacccaaagtaacagcgccatcgacattaaaatagagcccagcagtctgacacttacacccgaaatgcaggctgctgcagcagctggggggaccatttaccatctgccacagctagttccaccacctgtaccgcctccaccgccagggtccggatttgtaagcgtcagcgccagtaccagcacctccaatacggtcagcaccacgccacccaatgttctacagcagcaacagcaactaaacatgtctgtcgttccttcgacggctatggccgccgctatgctagccgccagtcaggaacagctgcccaaggactctaacagcacgacggccagcgccgggagtgctgtctcttcagatgacggagaacgctggtacgtctgcgattacgagacttgtggtttgaagtttaagtataagtcgagaatggagctacatcgggtagttcacagcaaggagcggcggttcaattgcgaactgtgcagtgcctccttcaagcagtcgtgcaacctatcaacacaccggaagaaaaagcacgcactgagaggcatcaaaagcgagatattgccgcagcgcttttaggctatacattaaacagagacagctcaaagattccccaattaaccacattgcatctcgaaaaaccctgtttgaaaatgttgacttaagttcaaggaaatcgcttgtttgccacaaaaaatgttcattgtgctaggagccacagaaatctgttgaattagcaaggtgtgtacaaaagagttctacattttgtctcttccatgatttctctgccttttctaagactcaataaagttatagactttatatttatatttataaattaaataattctggataattccgactgtaaattaaaatttagcactgcgtcaacattgtggcaggcaagtgacatatatatgtatatcacatatgtgtatatatatatgctctacaaatgaatatatattgtatataaataaatatataatataaatatatataacatgtatgcatatttagtatataaaaatatacaaatataaactaatatctaatgtaggcttaggttgtcatgtaaatgtaatgtaaatgtttaggcagaggtatgaaaacccccgttatcttttacgctctaagtgtacatgcaatgatgtgtgtaaaggagaccaaaatttagaagacggaattaagcccaaccaaaaaatatgttggtgtctagaccgttgtgagttttgttttagagtaaattggttcacaatgtgttaaaaccgattagtctcctttgagtaagtcttttactttaagttgaaatggattctgaggacagcgagatttctgggacatatctagtggttgctgaaatagtgtcagttacagtttacaaggttagaacagttatttacctagatacacaatatttatgtatatatggccatatatacagctgcgaaaaatttaatattaccacttgcccaatcaaggtttgaataagtcccaattttaggatttaaaaagagcaaaaatacctttttagaaaagttaaatcatgcacttattagaaaataaaaaataattacat

SEQ ID NO: 38126 - DNA, 1213 bp, DROSOPHILA
acaaacaacagcacaaggaccggacctagtcaaacaaaacaacgccatgggttttccgcgcatcctcagcaagaacaacaagatctacaccaagctgggcgagttctgtttgtcgggggatagcttctggattgtttgtcacacgtgccaagaggagttgcagacacaggatcagttctggaagcacatacaggatgagcataatttcatgcacggggtggcaaaggaacacagtcgtacatccagctactgcctaacggatgtggaggctgcggcggcagcagcaacgccaggaagcagctcccagcaaggcgccacagcgatcagtgtgcctctggcactttacacctgctcaaccaagtattctgaggaggagcagcgggaggtggaaatgcacgaacagcaggtgcaacaccaagtgcaacagcagcaagcgcagcagcagcaagcgcagcagcaacaacaccaacagtctcagcagcaagggcaccagcaacaccaggttcaacaacagcagacccaccagcagctccaacagcagcgggatgttgccaaggagctggctgaactccatgccaatgcggtagctgccgctgcagcctccgcagctgtggtatccacaggcgaaggaactacccaaagtaacagcgccatcgacattaaaatagagcccagcagtctgacacttacacccgaaatgcaggctgctgcagcagctggggggaccatttaccatctgccacagctagttccaccacctgtaccgcctccaccgccagggtccggatttgtaagcgtcagcgccagtaccagcacctccaatacggtcagcaccacgccacccaatgttctacagcagcaacagcaactaaacatgtctgtcgttccttcgacggctatggccgccgctatgctagccgccagtcaggaacagctgcccaaggactctaacagcacgacggccagcgccgggagtgctgtctcttcagatgacggagaacgctggtacgtctgcgattacgagacttgtggtttgaagtttaagtataagtcgagaatggagctacatcgggtagttcacagcaaggagcggcggttcaattgcgaactgtgcagtgcctccttcaagcagtcgtgcaacctatcaacacaccggaagaaaaagcacgcactgagaggcatcaaaagcgagatattgccgcagcgcttttag

SEQ ID NO: 38127 - protein, 388 aa, DROSOPHILA
MGFPRILSKNNKIYTKLGEFCLSGDSFWIVCHTCQEELQTQDQFWKHIQDEHNFMHGVAKEHSRTSSYCLTDVEAAAAAATPGSSSQQGATAISVPLALYTCSTKYSEEEQREVEMHEQQVQHQVQQQQAQQQQAQQQQHQQSQQQGHQQHQVQQQQTHQQLQQQRDVAKELAELHANAVAAAAASAAVVSTGEGTTQSNSAIDIKIEPSSLTLTPEMQAAAAAGGTIYHLPQLVPPPVPPPPPGSGFVSVSASTSTSNTVSTTPPNVLQQQQQLNMSVVPSTAMAAAMLAASQEQLPKDSNSTTASAGSAVSSDDGERWYVCDYETCGLKFKYKSRMELHRVVHSKERRFNCELCSASFKQSCNLSTHRKKKHALRGIKSEILPQRF

SEQ ID NO: 38128 - DNA, 12718 bp, DROSOPHILA
tctatgtcgctttcagatcaaggttcggtggtctatcttcattgggtatttgcattgtaaaaatgtcgaagctggttctatgtggcgccacctggtgagcggtatagtcagtcaccgtaatctggggcagggtcagtatcagtcgctgcctgcgacaactgttctccccagtactcaggtagcttagattgtcgatgatctcatagagacgtcgttggtctgcggatgtgtgtgcgacttgaacagcagcttcgctcgttgctgcagtcagtgtgggttctatagtcctttctccttctgctcctgttggttcatccaattctgaagttgtataatcgtagtcactataatcacacatgctagtaatctgataatctgtgttcaatttcagctctgagttgaagtacaaattatcatccgaactttgcacttttgccagattctctcgtttaactgttcttatgttcacccaaataccgcggtagtctgctttcttcttgaccttgcgtggcaaacgcttgagcaacgtcaccagtcgactggccgacttttcagccggactctcgttacgctgcacttcgtcaaagagtaaacccgtcgccggccttattgcattaaggtgtctctggcctatcgattgcaggtactttatattagcctgcaacccccgttcgtaatagctgctggccagttgcaaatagccgtggaaattcaccggtagttgctgttgtgggctttccgagggacacttattaatatttatcttataattgaggcggccacagtcgctggtttggcttccgtgcacggaggccaccggcacctcatcactggttccaatttggctctcccttctccatggaatccggtcgaccaggtgacgtagctgctcgcaactgtgagcacttcttatgcgacgcactgcgtcgttgtaagtctcgtcggacaatttaccggaccacactggacgtcggctgcgggacgaataggtagtatcgtcggatctgtaattagtgaaagcaccaattagtcatgagcggaaaatggaatggaaccaaacaaaacataaattacaatggcaagtgcaaacatgtacgacaaacaagaacgtaaattaacgaccactcccgaaactagtacctgtagacgaatcttagtctgctctgcatgtcatattttgattaccatagttttcaatcaaacaaaaaaaaacacataacgatctatagttgagttgagttgcctgactatcagatacccgttactgccagtactaatgcgaatgcaaaatttcatcatttatcgataaatattggggaataatatgagaaacaatttttaaattgtggccaaagtgttttggtataacgataaaagataaacaataaaacgaagagtaatcataacatttgggtttgtgggcgttagaatggccgtggcaaagtattttggcaaatcgggcgtggcacttatgggcggtttgtgaatgaaaacgcttagagtgaaagggtatactagattcgttaaaaagtatgtaacaggcagatggaagagtgtccgactatataaagtatatatattcttgatcaggatcaatagccgagtcgatctagccatgtccgtctgtccgttttaacgtcgagatctcaggaactagaatgttaagataaaccatactgattctagagacatcacgcccacactttcgatacatttttaaatattttctcataatatctatcgatatcccagatatcctacagcattttctctctggtctttaatattcaccctttcactttctcctatagttatgatcggtctaccacaaaagatttaaatttttttgtgtcgcttggtatataacatttggacctatttcgactcgactcaacaacagttactgtgagcaaatagataactgcgcaaatacagttgctagaaacgcaaaaaaatttagatgaaatgagacctggagaatagagataccagtaattaacgttacacctgtataagcaggtcaatcgctggaagcgacacagacatcgagaaacagaacagcatgcaagcaatgtgcagcaagtaaaagtcaagggagatacggctgtgaactttgacaacggcatgattaccaataaagaacgctataatcgattgccttctttactagatacgcgcacgaaacggcaaatacatatttatatattctgtgccgaatacacaaaattgtagatatattttcttagttgaatacaaattcacatcagtcctttttataggtatattacactcggaaagtaaatgattccttaaaaggtagcaggtaacaggcaggaggaagcgtaaccaccgcaatgaagcatattaattattgattacgatcacgttctctcttgtatttatcgcattaggtaggtatttaggaggtatttttgtttgatttgcttaatatgttattttagagtttctgtgtgtgcttttttgccattgcagaacttattaacatttttataatcaattttagggcaggggttcctccaggggagtaaatcttttaacagctaaaacaagctataaggtattggtattgacttaaagtgttgacaccataaacaacctgccatcagctggaatgaagacgtgtgattgtgatacatattgagccaaatcactaacgttagacatgcagaggcatgtctggtagtaactatcaaaaaggcctttaaatgtttatatgtatatgggtaaattttcagttggctatatttataattaatatataatataattaaaaccccaccaaacctggggaagtagtgcacatgagttggccacacatcgcgaaactgcgcatatcctgacgctaataatgcaggctcccgagattttttcaccgagggtatcctctttcgtcgccgatggcttgcatttcgggatacacatccaggtccaagctgctgctgctccctatagtggttagctacttcgtgacaaaagcgatccatccaaaaacactttgtattgtactctcttttcatggtcatccgtgaaaaatactggcttccactgcccagcgcaatgccttccacaaccaggccgacagaggagcacatgcctcaggcccttggaaaattttacggcatcaagccaacagacgggatattagaccgcttagcgcgcttcaagccaacttgctcgtcggatccaacaatgtaaactgcgtaggttgactgattgatggcttctcctcctcgcctaatgtatccgaatttgactgaacatttattgaacaaccgaataatacaatttctgttagcaacagcagtttgcggttatttgttatcacgtcagctcgcgatttatttttgtttgtttgacatcggattggagttgaaaaagtaacgaaaggctgaattgttgggttgctaaactgtatctattaataccctcaaaaaaatcatttaaatatgtataaccactaaaataattttggtacacaaaaaattgtgttcgattataaataaaaaacttcattttaatcatatcattaataataatgaattttgcagtaaacaaagtagactctttagtacggttccccccgaatgacccgactgaaaaaaacgataatcactaaattactgctccgtgaaaaaaaattcagggtagacaaattaaattgaaaagatcccgacgaacacagccaactatatctactctcacatttagtgccctcttttacttccacacccacacccaacaatccaaacacacttaggcttagtgggcgtggtccacccttgatagaaaaattactaacgttcatgtcgttaaccattgtaactgcaaacaccaacttttgcatacaccaacacctcttttacaagccaattttgtccaatttggacatctcgactcacgataaacaagacagaataaacgagacagaacgaactatgtcaaaaatcgttagtagagttgttggataggtccagagttatacaatctaggagcaagaactcgcaagccgtcgaaagacactatctaacgatgtcccagggattattttaaaaaaatgcaccacataattataaagaaaattcgtatcataaccggttatacaagatggctgaaaagtagcttgaacgaatcggtttttggcccgataaactaacaaacaaaaacaagttgagttaaccgacggtaacaggaaaaaatcagaacaaatttctgatgacgattatcattataatttccataaaatgagttataaacaatagagaatgcgatagtcgagttccccagctatcgttactcaggtggaacgacatatttcaatatgtcttttagaatatcggcagaaattggaaaccaaaataataaaatggaaactaatttaaaaattattccaatgtaggcgtgacagttttgggtggtttgtgggcggtagagtgtgcgtgccaaaatttttttttgcgaattggtagatatgtacaagacttataaaaccatgaaacaaatttttttagttttgggcggtttgtgggcgttagagtggtaatggttaatctcaacattctagcttttatagttcctgaaactgaagctataaacgctttattctacctgttacatactttccaacgaatcaactatacccttttactctacaagtattttttatctttgtattttgtatttcgatgtcgtagaattcagaaattttttgtatgctcttttaatgcggtatacatatacatatatatgtacaatattcctgattaggatcactagccgaattgatatggtaaagtctgtctgtccgtaagggggctgtcacctcgaaaactttaaaagctttgaagttaagataatgtatgcatttctttccttttttctgattttcgaaacgtaacgttttaaacgttttaatcattcgttaatcaaacagcaattcatataacagaacgttatatgaatttttgttaagtgttctaaatattttggtaacacagacaggacgaaatgaattttctatctattaaataaattgatatttaaagaaagcaaattaatttagaaatatattgacaatttccaactaatttatctctgttatggaaaattagtttaggaaaaaagttaaaataacaaaaggaaccgctatagattttctccactagcgccactcaactaaggggagaacgagggagaaactttgaaacttgattgtcatatccataaaattgtttagaataacaagagagaatgctatagtcgagttgcctgaatatcagatacccgttaacccagatatttttctgcgataccaaaagatgttggggaataaaatgagaaaaaatttcaacaattttcaaaagtggggcgtgaccggtttgtcggcttaagggcgtcacagtgggtgtggcaaacagtttttttttgcacatcgatcggaatttacaagactaataaagatgtgaaaaaatatcaatatatttttcaaaagagtgcttgtggcattttttcgtgggcttgtgggcgttgcaacatggatcaacaaacttgcgctgcgtctttgtctctagaatctgcatgctaaatctccgccttccagcttttatagttcctgagatctcgacgttcatacggacagacggacatggctatatcgactcggctattgatccgttatacagtcggaaacgcttccttctgcgtgttacattcctttaaacgaatctacgttactctacgagtaacgggtataataaccaaataaaaaagtctaaacatatttaaaaaatttggttggcgttcgaatgagatggtggaggtattttggcaaagcgatacaaagtagcaaaaaatcaaaaaatgcaatgaaaaataattataacatttcacaaaagtgtgggtgtgaaccttttgggcggtttgccgtcgttagggtgtgcgaatatttcaaaacttgcccacgtaccactatgtgaaattttaccactttttctgcccaaaatgaataactccaggacgttgaaagatattcagattgggttacaatatatccgttctgaaaccgccccttatatttgttgtagtttgtaactctagaacggataaagatatttaaatttttttgccattatcttttatgataccaaaaattgtggccgtggcaccgcctcttatatttaattaactaattttgtataggtatttccctaatttcgtatgctttttctagtccaagcaaagaacaactgatttcgtggtagtggttgcatattgaattattttacaaaaaagtaaacacaaacataataacaaattaatgaatcaattcaccaacaggcatttttaactcccttttagctaaaattactctgcatttgaacaagtagggtaaggacctaaaaactataatttctccgaaaatcgcaaagaatgcactttttaattacaactatctaaacaagaattaaataagctacaaaataaggtatatttcatgaatgagttttgttgcattcgctttaaatcccttttgaaagttaagtttttataacaaaaatattttagtaagacaacatacatttttacggtataaagtccccttaatacacgattttttgatagttttgatagtcaaaaacacataatacaaaccacattgaataaaactaattttgcagaatgaaaaaacgctatggctcaaaagatatataaatatttgtatcaagggaaaaacttatcgttgcagacaaaattttttttgtgcttgcaacacagcttagagaatgatttctttgtttatttatttctggtatgcaggaataaacattggccaatataacagagacaaagctaatgcatatgtgagggatacacacacacagtgtttgttctactttgaaacacaaaaccgcgtcagtgtgacacacttattgcgccttagcacacacacccacagaggtattaggtaagggagagtgacccaggaacggtaataatttcactaacttgtcgaagtctataaaccgtaaatataccgctaggacatcaacaacagctgttggcctctaggtctgcaatgattgtgatgctctccggaaacacgcacatgtgtgtgtgtcttgtctaccttggcagtttaataaatcggtttcaatgaatgatactaatactagttgcgaatttaactcgaattatctctcggctaataaatgcgcttggtttcgtttgattgccactcctgattgtttagcgtttgttttaaaacttttttgacacttacccaatgtgaccgcatactggtactgaattaatatcgataaatataccaatctatttctagggttagattctgggtattccttaaactgttaaattgtgggaatgttgaaccctcaacatgaaaaagaaacaacaaaagaaaaaattaaatttcaataaaacatttctctgtaagtaaattcttaaaacaatttaacactacagttgctgaagaaaggtgcgtttcactttctatttcttatagcaaaaaataagttccgttaaccttgttgaattttgttatcacttggactcgtgtctaaaacatttaagaacaatccattgacttaaattataatgttttcgtgtgttttcatagttatgtttgttcgaataccacaataccaagaatacctttacctcatattatgttatattgttttaatgtataatgttatagggtaatcaggaaaaattcgtacctagttacgctactaggcatacaattccaggcttcctaaaaatgcctttttattaaatattacctcttttacttactattacatagaacttaaacggttcaaagtatctgttaacaaccttcaccttagcaacgtacagaaaaatgtttcagtggaaacaagctataaaaaatattgcttctgcttgaattcattatttacagatttagtacctttaaagtatgttaaaaccatatatcttttttatttatagtttataatcagtgaccgctgtactacacatcccaaatcttgggattttaatggtaaggcccgcgatgtgattggcgatgacactatcgcagttacatccaatcagtcgtcgatatctaagcagccgcattgcaacttctaaaagaattcggaaaagcggcatccaagcgttgctttaggtaattgcgtagcgaaagttcaacggaagaaaggaactttcccgggccaaggagcagcgcaagcaggactcaacgacaatttgcaaagactattagcaatgtcttcggccagagaccttatcaaagtcgacatagtaagtaaaacattggctttatttggatggtaacaacatatttttacttatcgatgacaaggaatggggcatggagcgcctggtgcgagctcagcaagtggtggagctgcggccctatgacatcgagtcctggagtgtcatgatccgagaggcccaaacgcggccaatccacgaagtacgcagtctttacgagtcgctagttaatgtgtttccgacaaccgctcggtactggaagctatacattgagatggagatgcgcagccggtactatgaacgcgtggagaaactttttcaacgctgcctagtcaagattttgaacatcgacctctggaagctctatcttacctacgtgaaggaaaccaagtcgggtctaagtactcacaagtaactgttataccttatttaaataattcacataatttgacatcttagaaactattataattttagtcaaaacttgcaatgcagcgagcatattgttttttttgatgcacaacatttgtgttattctgacacgcttattttattggacttatctcttttctcagagaaaaaatggcccaggcttatgattttgcactggagaaaatcggcatggatctacactcgttcagcatctggcaggattacatatactttctgcggggcgttgaagcagtgggcaactatgcagagaaccaaaagatcacagcagtgcgccgcgtctatcaaaaggctgtagtcacacctatcgtgggcatcgagcagttgtggaaggactatatcgcattcgagcaaaacataaacccgattatatcagagaagatgagtctggagcgatctaagtgagtgttatacgcagagtttgctaaatgttctttctaaattccaacttaaaaccagggattacatgaacgctcgtcgtgttgccaaagagttggaataccacacaaagggtctcaatcgcaatctgccagccgtcccacccacactcacaaaagaggaggtgaagcaagtggagctgtggaagcgctttatcacgtatgagaagtctaatcccttgcgcactgaagatacggccctagtaacccgtcgtgtcatgttcgccacggagcaatgtttgctggtgctcacccaccacccggcagtgtggcaccaggcctcccaattcctggacaccagtgctcgcgtgctcaccgaaaaaggcgtgcgtactagtgttgaaaacatttcacctattctctgcgttcctgtagtgaatcaaatagagtgggttatggcctttgcttggtggtgggcaaaggtcaaaaccaaaaacgaatcaaatatagtctcttgtttgctaagaagtgtcgcccctcgggtaaaggagcacgcagtggcacaacacagatggctttccgtggcttgccccgttgcccctggccaggccgcacgcgttttactcttataactaagtcgaacttttgtgtatttacatgtttaattacttattaaaacattgcaggacgtccaggcggccaagatttttgcggacgagtgtgctaatatactggaacggtctataaacggcgtgctaaaccgaaatgcgttgctatattttgcctatgcggactttgaagaaggacggctcaagtacgagaaggtgcacactatgtacaacaagctgttacagttgccagacattgatcccacattggtaggaacacacatattgaatatgtttcatcaaatatttgataccatcgaaatttaatactccaggtctatgttcagtacatgaagttcgcccgtcgtgctgaggggatcaagtcggcccgtagcatatttaagaaagctcgggaggacgtaaggtcgcgctatcacattttcgtggccgctgctttaatggagtattattgctccaaggacaaagaaattgcgttccgcatcttcgagctgggattgaagcgttttggtggcagtccagagtacgtgatgtgctacattgactacctgtcccatctaaacgaggacaataatacgcgcgtcctgtttgaacgggtacttagttcaggtggtttgtcgccgcacaagagtgttgaggtctggaatcgcttcctcgagttcgaatctaatattggggatctctccagcatcgttaaggtcgaacgtcgccgtagtgccgttttcgaaaacgtgcgttcttttactactttattttagaaatatgttataataatatttgtttaaagcttaaagagtatgagggcaaggagaccgcccagctggttgaccgttacaaatttctggacctttacccctgcaccagcaccgagctcaagtccataggatatgctgaggtgcgtaacggaatttatttatttataaaaatataagaagaaagaagaaacaaactagcatccataaccgcgaaataattggattctattgttatactacatcaaacgataacatgtgatcgtgtagtaatcgccataacagtttaatgtctgaatacattttttgaaaattgatttcattcataatttttcccatttgagacagtttgtaggaactcattggaaaggaaagagcaagactattttattttatatgtgcgaagaagaaagagatagcatatagacttactgaattttaaaaaacattttttagcacagactgttttaaaagtgttcattacgacatttttcttcttatagccaatcaaacttttcacaatactttttatagggtccacaaaatgtttgtctttaattacttgtcttactttaatcacctcgttctgcagaatgtgggcattatactgaacaaggtgggtggtggagctcaaagccagaacaccggagaggtcgaaacagatagcgaggcaacgccaccattgccacgtccggatttctcccagatgattccattcaagccgcgtccatgtgctcatcctggtgcccatccacttgcaggtggtgtatttccgcagccgccagctctggccgctttgtgcgccaccctgcctccaccgaactccttccgtggaccgttcgtcagcgtagagctactattcgacattttcatgcgtctcaatcttccggactgtgagtgtccctgattgaaattctcttcaattaacattgaacaattatcttactcagctgcaccgcaaccgaatggagacaacgaattgtcgcctaagatcttcgatctggccaagtcggttcactggatcgtggatacaagtacgtatacgggggtgcagcacagtgttacggccgttccaccgcgccggcgacgactgctgcctgggggcgatgatagtgacgacgaactgcagaccgctgtgccgccctcccacgatatatatcgcctgcgtcagctaaagcgtttcgccaagtctaattaagaaacgttaaaaaaaaaccgatttttacttttttctttcaattaatttacaagaaacaagaaatcccaataaagcaagccatattaattaggtttagttttgttggaagctgcttgggaatttgccttcatgctttggcatcaccggttgtagacatttagggttgcattgaacgatagcattaaatttgtaatatttttcttaatgtaagtacacactaacctttgcatccatttaaacattttaagtgtacatttgttgtaaataactattcaagacaaagtgcatttttcgatactacataatattttttaatttaggccaaaaaaatgttatacataactcacaatagtatatctgtatacgtaaacattaaaatctcaatataatggtataaatggtacatgtttatatcaatgaatttctgcataatttaaagttagagagtagaatgtagacctaggaagcactcctccattacctcagctggtaagcatcgtctacggtgcttataaagtccagcatattgggcgaaactttttccgcagggccagcatgagtcgcgcttctcggagcgatggagggtcagatgggcgtgggcagtgcctagcccaccacaaactcccgggaacggacacagcttgtcccgaatattaagatgggcacgcaaggaacggtcccttgcgtgggccgtataaaactcctagtcgcacctattgctggtttctgtgtcgcttaacatgctgatttaactcgggagcaatgctcgcacacgtagggcagttccttggtgtgacttctttcatagacccgcaaagccgtcgtgctaaaaaacttcttagggcagttgttacaaacgtgtatatgtaaatgtaatgtaaatgtaaagatgtaaaaacttcagtctacaaatatggcatataggggccaggtttggattctgccgcaggccatcctcatcgtttagttttgtactttatgcctccggatccaaccatctgtcacgctgaagcttcggcc

SEQ ID NO: 38129 - DNA, 2480 bp, DROSOPHILA
ggatctgtaattagtgaaagcaccaattagtcatgagcggaaaatggaatggaaccaaacaaaacataaattacaatgtttataatcagtgaccgctgtactacacatcccaaatcttgggattttaatggtaaggcccgcgatgtgattggcgatgacactatcgcagttacatccaatcagtcgtcgatatctaagcagccgcattgcaacttctaaaagaattcggaaaagcggcatccaagcgttgctttaggtaattgcgtagcgaaagttcaacggaagaaaggaactttcccgggccaaggagcagcgcaagcaggactcaacgacaatttgcaaagactattagcaatgtcttcggccagagaccttatcaaagtcgacatagaatggggcatggagcgcctggtgcgagctcagcaagtggtggagctgcggccctatgacatcgagtcctggagtgtcatgatccgagaggcccaaacgcggccaatccacgaagtacgcagtctttacgagtcgctagttaatgtgtttccgacaaccgctcggtactggaagctatacattgagatggagatgcgcagccggtactatgaacgcgtggagaaactttttcaacgctgcctagtcaagattttgaacatcgacctctggaagctctatcttacctacgtgaaggaaaccaagtcgggtctaagtactcacaaagaaaaaatggcccaggcttatgattttgcactggagaaaatcggcatggatctacactcgttcagcatctggcaggattacatatactttctgcggggcgttgaagcagtgggcaactatgcagagaaccaaaagatcacagcagtgcgccgcgtctatcaaaaggctgtagtcacacctatcgtgggcatcgagcagttgtggaaggactatatcgcattcgagcaaaacataaacccgattatatcagagaagatgagtctggagcgatctaaggattacatgaacgctcgtcgtgttgccaaagagttggaataccacacaaagggtctcaatcgcaatctgccagccgtcccacccacactcacaaaagaggaggtgaagcaagtggagctgtggaagcgctttatcacgtatgagaagtctaatcccttgcgcactgaagatacggccctagtaacccgtcgtgtcatgttcgccacggagcaatgtttgctggtgctcacccaccacccggcagtgtggcaccaggcctcccaattcctggacaccagtgctcgcgtgctcaccgaaaaaggcgtgcgtactagtgttgaaaacatttcacctattctctgcgttcctgtagtgaatcaaatagagtgggttatggcctttgcttggtggtgggcaaaggtctatgttcagtacatgaagttcgcccgtcgtgctgaggggatcaagtcggcccgtagcatatttaagaaagctcgggaggacgtaaggtcgcgctatcacattttcgtggccgctgctttaatggagtattattgctccaaggacaaagaaattgcgttccgcatcttcgagctgggattgaagcgttttggtggcagtccagagtacgtgatgtgctacattgactacctgtcccatctaaacgaggacaataatacgcgcgtcctgtttgaacgggtacttagttcaggtggtttgtcgccgcacaagagtgttgaggtctggaatcgcttcctcgagttcgaatctaatattggggatctctccagcatcgttaaggtcgaacgtcgccgtagtgccgttttcgaaaaccttaaagagtatgagggcaaggagaccgcccagctggttgaccgttacaaatttctggacctttacccctgcaccagcaccgagctcaagtccataggatatgctgagaatgtgggcattatactgaacaaggtgggtggtggagctcaaagccagaacaccggagaggtcgaaacagatagcgaggcaacgccaccattgccacgtccggatttctcccagatgattccattcaagccgcgtccatgtgctcatcctggtgcccatccacttgcaggtggtgtatttccgcagccgccagctctggccgctttgtgcgccaccctgcctccaccgaactccttccgtggaccgttcgtcagcgtagagctactattcgacattttcatgcgtctcaatcttccggactctgcaccgcaaccgaatggagacaacgaattgtcgcctaagatcttcgatctggccaagtcggttcactggatcgtggatacaagtacgtatacgggggtgcagcacagtgttacggccgttccaccgcgccggcgacgactgctgcctgggggcgatgatagtgacgacgaactgcagaccgctgtgccgccctcccacgatatatatcgcctgcgtcagctaaagcgtttcgccaagtctaattaagaaacgttaaaaaaaaaccg

SEQ ID NO: 38130 - protein, 701 aa, DROSOPHILA
MSSARDLIKVDIEWGMERLVRAQQVVELRPYDIESWSVMIREAQTRPIHEVRSLYESLVNVFPTTARYWKLYIEMEMRSRYYERVEKLFQRCLVKILNIDLWKLYLTYVKETKSGLSTHKEKMAQAYDFALEKIGMDLHSFSIWQDYIYFLRGVEAVGNYAENQKITAVRRVYQKAVVTPIVGIEQLWKDYIAFEQNINPIISEKMSLERSKDYMNARRVAKELEYHTKGLNRNLPAVPPTLTKEEVKQVELWKRFITYEKSNPLRTEDTALVTRRVMFATEQCLLVLTHHPAVWHQASQFLDTSARVLTEKGVRTSVENISPILCVPVVNQIEWVMAFAWWWAKVYVQYMKFARRAEGIKSARSIFKKAREDVRSRYHIFVAAALMEYYCSKDKEIAFRIFELGLKRFGGSPEYVMCYIDYLSHLNEDNNTRVLFERVLSSGGLSPHKSVEVWNRFLEFESNIGDLSSIVKVERRRSAVFENLKEYEGKETAQLVDRYKFLDLYPCTSTELKSIGYAENVGIILNKVGGGAQSQNTGEVETDSEATPPLPRPDFSQMIPFKPRPCAHPGAHPLAGGVFPQPPALAALCATLPPPNSFRGPFVSVELLFDIFMRLNLPDSAPQPNGDNELSPKIFDLAKSVHWIVDTSTYTGVQHSVTAVPPRRRRLLPGGDDSDDELQTAVPPSHDIYRLRQLKRFAKSN

SEQ ID NO: 38131 - DNA, 9262 bp, DROSOPHILA
gggtcaacaaacttgcgctgcgtctatctctctagaatctgtatgcttcatctcaaccttctagcttttatagttcctgagatctcgacgttcatacggacaggatcagatcgcctcggttattgatcctgattaagaatgtatatactttatatgatcggaaacactttcttctacctcttacatacttttcaacgaatctagtataccctgttacttacttctctgctttcgaaatacaaatatcaaacaacaatcacactgttatacttaattgctgtcatacttaaattggtatactaaccagctataggtgacttgggcgatttaagtgagtattcatcgaggttcttgccgccaagatctagtttgagcaccttctttgttaactcttgtgtggccgcctccatgttactggtcctgtctatcttgatatccacgtttcgctggctgacggcactcttggtgggaatgccctttattgaccgcgtcgattccgtcgttgtcgttgcttcggccgcatcaatcatgttgttgtttgtgatgttgatttttaactttttttgaaaaaagttcttttgagtctctcttaacgcttgctggccagaaacactgtcatctagcgcttttcgttccgcccttgttgttgtggtttccttatcagtataattgcttttaaccacagagtctggtgtagaacctacaaatgatggagaaacagcgaaaccactactttcgtcgattccgcttctgctactgtttctttcaacgacgtcggcagcgacaacagcaacaaccattgttcggaagcgcgagcgtcgctatttttttatttgttttctgttttttgtactaagcatataaacgatttccgctgacgtgcgcgcgcttttgaaatctgttcggttatgctgttggtttcgctatcgtttttttgttcttgtagatttaatacgattttattcgattaaattgtcgattgtttttatatatattgattctatgtcgctttcagatcaaggttcggtggtctatcttcattgggtatttgcattgtaaaaatgtcgaagctggttctatgtggcgccacctggtgagcggtatagtcagtcaccgtaatctggggcagggtcagtatcagtcgctgcctgcgacaactgttctccccagtactcaggtagcttagattgtcgatgatctcatagagacgtcgttggtctgcggatgtgtgtgcgacttgaacagcagcttcgctcgttgctgcagtcagtgtgggttctatagtcctttctccttctgctcctgttggttcatccaattctgaagttgtataatcgtagtcactataatcacacatgctagtaatctgataatctgtgttcaatttcagctctgagttgaagtacaaattatcatccgaactttgcacttttgccagattctctcgtttaactgttcttatgttcacccaaataccgcggtagtctgctttcttcttgaccttgcgtggcaaacgcttgagcaacgtcaccagtcgactggccgacttttcagccggactctcgttacgctgcacttcgtcaaagagtaaacccgtcgccggccttattgcattaaggtgtctctggcctatcgattgcaggtactttatattagcctgcaacccccgttcgtaatagctgctggccagttgcaaatagccgtggaaattcaccggtagttgctgttgtgggctttccgagggacacttattaatatttatcttataattgaggcggccacagtcgctggtttggcttccgtgcacggaggccaccggcacctcatcactggttccaatttggctctcccttctccatggaatccggtcgaccaggtgacgtagctgctcgcaactgtgagcacttcttatgcgacgcactgcgtcgttgtaagtctcgtcggacaatttaccggaccacactggacgtcggctgcgggacgaataggtagtatcgtcggatctgtaattagtgaaagcaccaattagtcatgagcggaaaatggaatggaaccaaacaaaacataaattacaatggcaagtgcaaacatgtacgacaaacaagaacgtaaattaacgaccactcccgaaactagtacctgtagacgaatcttagtctgctctgcatgtcatattttgattaccatagttttcaatcaaacaaaaaaaaacacataacgatctatagttgagttgagttgcctgactatcagatacccgttactgccagtactaatgcgaatgcaaaatttcatcatttatcgataaatattggggaataatatgagaaacaatttttaaattgtggccaaagtgttttggtataacgataaaagataaacaataaaacgaagagtaatcataacatttgggtttgtgggcgttagaatggccgtggcaaagtattttggcaaatcgggcgtggcacttatgggcggtttgtgaatgaaaacgcttagagtgaaagggtatactagattcgttaaaaagtatgtaacaggcagatggaagagtgtccgactatataaagtatatatattcttgatcaggatcaatagccgagtcgatctagccatgtccgtctgtccgttttaacgtcgagatctcaggaactagaatgttaagataaaccatactgattctagagacatcacgcccacactttcgatacatttttaaatattttctcataatatctatcgatatcccagatatcctacagcattttctctctggtctttaatattcaccctttcactttctcctatagttatgatcggtctaccacaaaagatttaaatttttttgtgtcgcttggtatataacatttggacctatttcgactcgactcaacaacagttactgtgagcaaatagataactgcgcaaatacagttgctagaaacgcaaaaaaatttagatgaaatgagacctggagaatagagataccagtaattaacgttacacctgtataagcaggtcaatcgctggaagcgacacagacatcgagaaacagaacagcatgcaagcaatgtgcagcaagtaaaagtcaagggagatacggctgtgaactttgacaacggcatgattaccaataaagaacgctataatcgattgccttctttactagatacgcgcacgaaacggcaaatacatatttatatattctgtgccgaatacacaaaattgtagatatattttcttagttgaatacaaattcacatcagtcctttttataggtatattacactcggaaagtaaatgattccttaaaaggtagcaggtaacaggcaggaggaagcgtaaccaccgcaatgaagcatattaattattgattacgatcacgttctctcttgtatttatcgcattaggtaggtatttaggaggtatttttgtttgatttgcttaatatgttattttagagtttctgtgtgtgcttttttgccattgcagaacttattaacatttttataatcaattttagggcaggggttcctccaggggagtaaatcttttaacagctaaaacaagctataaggtattggtattgacttaaagtgttgacaccataaacaacctgccatcagctggaatgaagacgtgtgattgtgatacatattgagccaaatcactaacgttagacatgcagaggcatgtctggtagtaactatcaaaaaggcctttaaatgtttatatgtatatgggtaaattttcagttggctatatttataattaatatataatataattaaaaccccaccaaacctggggaagtagtgcacatgagttggccacacatcgcgaaactgcgcatatcctgacgctaataatgcaggctcccgagattttttcaccgagggtatcctctttcgtcgccgatggcttgcatttcgggatacacatccaggtccaagctgctgctgctccctatagtggttagctacttcgtgacaaaagcgatccatccaaaaacactttgtattgtactctcttttcatggtcatccgtgaaaaatactggcttccactgcccagcgcaatgccttccacaaccaggccgacagaggagcacatgcctcaggcccttggaaaattttacggcatcaagccaacagacgggatattagaccgcttagcgcgcttcaagccaacttgctcgtcggatccaacaatgtaaactgcgtaggttgactgattgatggcttctcctcctcgcctaatgtatccgaatttgactgaacatttattgaacaaccgaataatacaatttctgttagcaacagcagtttgcggttatttgttatcacgtcagctcgcgatttatttttgtttgtttgacatcggattggagttgaaaaagtaacgaaaggctgaattgttgggttgctaaactgtatctattaataccctcaaaaaaatcatttaaatatgtataaccactaaaataattttggtacacaaaaaattgtgttcgattataaataaaaaacttcattttaatcatatcattaataataatgaattttgcagtaaacaaagtagactctttagtacggttccccccgaatgacccgactgaaaaaaacgataatcactaaattactgctccgtgaaaaaaaattcagggtagacaaattaaattgaaaagatcccgacgaacacagccaactatatctactctcacatttagtgccctcttttacttccacacccacacccaacaatccaaacacacttaggcttagtgggcgtggtccacccttgatagaaaaattactaacgttcatgtcgttaaccattgtaactgcaaacaccaacttttgcatacaccaacacctcttttacaagccaattttgtccaatttggacatctcgactcacgataaacaagacagaataaacgagacagaacgaactatgtcaaaaatcgttagtagagttgttggataggtccagagttatacaatctaggagcaagaactcgcaagccgtcgaaagacactatctaacgatgtcccagggattattttaaaaaaatgcaccacataattataaagaaaattcgtatcataaccggttatacaagatggctgaaaagtagcttgaacgaatcggtttttggcccgataaactaacaaacaaaaacaagttgagttaaccgacggtaacaggaaaaaatcagaacaaatttctgatgacgattatcattataatttccataaaatgagttataaacaatagagaatgcgatagtcgagttccccagctatcgttactcaggtggaacgacatatttcaatatgtcttttagaatatcggcagaaattggaaaccaaaataataaaatggaaactaatttaaaaattattccaatgtaggcgtgacagttttgggtggtttgtgggcggtagagtgtgcgtgccaaaatttttttttgcgaattggtagatatgtacaagacttataaaaccatgaaacaaatttttttagttttgggcggtttgtgggcgttagagtggtaatggttaatctcaacattctagcttttatagttcctgaaactgaagctataaacgctttattctacctgttacatactttccaacgaatcaactatacccttttactctacaagtattttttatctttgtattttgtatttcgatgtcgtagaattcagaaattttttgtatgctcttttaatgcggtatacatatacatatatatgtacaatattcctgattaggatcactagccgaattgatatggtaaagtctgtctgtccgtaagggggctgtcacctcgaaaactttaaaagctttgaagttaagataatgtatgcatttctttccttttttctgattttcgaaacgtaacgttttaaacgttttaatcattcgttaatcaaacagcaattcatataacagaacgttatatgaatttttgttaagtgttctaaatattttggtaacacagacaggacgaaatgaattttctatctattaaataaattgatatttaaagaaagcaaattaatttagaaatatattgacaatttccaactaatttatctctgttatggaaaattagtttaggaaaaaagttaaaataacaaaaggaaccgctatagattttctccactagcgccactcaactaaggggagaacgagggagaaactttgaaacttgattgtcatatccataaaattgtttagaataacaagagagaatgctatagtcgagttgcctgaatatcagatacccgttaacccagatatttttctgcgataccaaaagatgttggggaataaaatgagaaaaaatttcaacaattttcaaaagtggggcgtgaccggtttgtcggcttaagggcgtcacagtgggtgtggcaaacagtttttttttgcacatcgatcggaatttacaagactaataaagatgtgaaaaaatatcaatatatttttcaaaagagtgcttgtggcattttttcgtgggcttgtgggcgttgcaacatggatcaacaaacttgcgctgcgtctttgtctctagaatctgcatgctaaatctccgccttccagcttttatagttcctgagatctcgacgttcatacggacagacggacatggctatatcgactcggctattgatccgttatacagtcggaaacgcttccttctgcgtgttacattcctttaaacgaatctacgttactctacgagtaacgggtataataaccaaataaaaaagtctaaacatatttaaaaaatttggttggcgttcgaatgagatggtggaggtattttggcaaagcgatacaaagtagcaaaaaatcaaaaaatgcaatgaaaaataattataacatttcacaaaagtgtgggtgtgaaccttttgggcggtttgccgtcgttagggtgtgcgaatatttcaaaacttgcccacgtaccactatgtgaaattttaccactttttctgcccaaaatgaataactccaggacgttgaaagatattcagattgggttacaatatatccgttctgaaaccgccccttatatttgttgtagtttgtaactctagaacggataaagatatttaaatttttttgccattatcttttatgataccaaaaattgtggccgtggcaccgcctcttatatttaattaactaattttgtataggtatttccctaatttcgtatgctttttctagtccaagcaaagaacaactgatttcgtggtagtggttgcatattgaattattttacaaaaaagtaaacacaaacataataacaaattaatgaatcaattcaccaacaggcatttttaactcccttttagctaaaattactctgcatttgaacaagtagggtaaggacctaaaaactataatttctccgaaaatcgcaaagaatgcactttttaattacaactatctaaacaagaattaaataagctacaaaataaggtatatttcatgaatgagttttgttgcattcgctttaaatcccttttgaaagttaagtttttataacaaaaatattttagtaagacaacatacatttttacggtataaagtccccttaatacacgattttttgatagttttgatagtcaaaaacacataatacaaaccacattgaataaaactaattttgcagaatgaaaaaacgctatggctcaaaagatatataaatatttgtatcaagggaaaaacttatcgttgcagacaaaattttttttgtgcttgcaacacagcttagagaatgatttctttgtttatttatttctggtatgcaggaataaacattggccaatataacagagacaaagctaatgcatatgtgagggatacacacacacagtgtttgttctactttgaaacacaaaaccgcgtcagtgtgacacacttattgcgccttagcacacacacccacagaggtattaggtaagggagagtgacccaggaacggtaataatttcactaacttgtcgaagtctataaaccgtaaatataccgctaggacatcaacaacagctgttggcctctaggtctgcaatgattgtgatgctctccggaaacacgcacatgtgtgtgtgtcttgtctaccttggcagtttaataaatcggtttcaatgaatgatactaatactagttgcgaatttaactcgaattatctctcggctaataaatgcgcttggtttcgtttgattgccactcctgattgtttagcgtttgttttaaaacttttttgacacttacccaatgtgaccgcatactggtactgaattaatatcgataaatataccaatctatttctagggttagattctgggtattccttaaactgttaaattgtgggaatgttgaaccctcaacatgaaaaagaaacaacaaaagaaaaaattaaatttcaataaaacatttctctgtaagtaaattcttaaaacaatttaacactacagttgctgaagaaaggtgcgtttcactttctatttcttatagcaaaaaataagttccgttaaccttgttgaattttgttatcacttggactcgtgtctaaaacatttaagaacaatccattgacttaaattataatgttttcgtgtgttttcatagttatgtttgttcgaataccacaataccaagaatacctttacctcatattatgttatattgttttaatgtataatgttatagggtaatcaggaaaaattcgtacctagttacgctactaggcatacaattccaggcttcctaaaaatgcctttttattaaatattacctcttttacttactattacatagaacttaaacggttcaaagtatctgttaacaaccttcaccttagcaacgtacagaaaaatgtttcagtggaaacaagctataaaaaatattgcttctgcttgaattcattatttacagatttagtacctttaaagtatgttaaaaccatatatcttttttatttatagtttataatcagtgaccgctgtactacacatcccaaatcttgggattttaatggtaaggcccgcgatgtgattggcgatgacactatcgcagttacatccaatcagtcgtcgatatctaagcagccgcattgcaacttctaaaagaattcggaaaagcggcatccaagcgttgctttaggtaattgcgtagcgaaagttcaacggaagaaaggaactttcccgggccaaggagcagcgcaagcaggactcaacg

SEQ ID NO: 38132 - DNA, 1243 bp, DROSOPHILA
acaatcaggagtggcaatcaaacgaaaccaagcgcatttattagccgagagataattcgagttaaattcgcaactagtattagtatcattcattgaaaccgatttattaaactgccaaggtagacaagacacacacacatgtgcgtgtttccggagagcatcacaatcattgcagacctagaggccaacagctgttgttgatgtcctagcggtatatttacggtttatagacttcgacaaatccgacgatactacctattcgtcccgcagccgacgtccagtgtggtccggtaaattgtccgacgagacttacaacgacgcagtgcgtcgcataagaagtgctcacagttgcgagcagctacgtcacctggtcgaccggattccatggagaagggagagccaaattggaaccagtgatgaggtgccggtggcctccgtgcacggaagccaaaccagcgactgtggccgcctcaattataagataaatattaataagtgtccctcggaaagcccacaacagcaactaccggtgaatttccacggctatttgcaactggccagcagctattacgaacgggggttgcaggctaatataaagtacctgcaatcgataggccagagacaccttaatgcaataaggccggcgacgggtttactctttgacgaagtgcagcgtaacgagagtccggctgaaaagtcggccagtcgactggtgacgttgctcaagcgtttgccacgcaaggtcaagaagaaagcagactaccgcggtatttgggtgaacataagaacagttaaacgagagaatctggcaaaagtgcaaagttcggatgataatttgtacttcaactcagagctgaaattgaacacagattatcagattactagcatgtgtgattatagtgactacgattatacaacttcagaattggatgaaccaacaggagcagaaggagaaaggactatagaacccacactgactgcagcaacgagcgaagctgctgttcaagtcgcacacacatccgcagaccaacgacgtctctatgagatcatcgacaatctaagctacctgagtactggggagaacagttgtcgcaggcagcgactgatactgaccctgccccagattacggtgactgactataccgctcaccaggtggcgccacatagaaccagcttcgacatttttacaatgcaaatacccaatgaagatagaccaccgaaccttgatctgaaagcgacatag

SEQ ID NO: 38133 - protein, 118 aa, DROSOPHILA
MCDYSDYDYTTSELDEPTGAEGERTIEPTLTAATSEAAVQVAHTSADQRRLYEIIDNLSYLSTGENSCRRQRLILTLPQITVTDYTAHQVAPHRTSFDIFTMQIPNEDRPPNLDLKAT

SEQ ID NO: 38134 - DNA, 4106 bp, DROSOPHILA
ggacatgttcattcaaatatatcaatatacatacatatatgtatggttatagcttatatagtagctaaatatatattaggtgtttacgcaatacatcaatttgttcattgtttaaaaacattttttctaatgcggctttataagttttgttcccattgcaatgaaaaaacaaaatctaacaaattacatttaacaacaagcacatcacttataattgatatctacgatatgcctgttttgctgcccagcactttgtgatttaacttttttactgaactaataacaaatatttgcttattttgttcttgccctttgaaaaatgatcagattttaagtccacagtatattaatttaaatttaaattgaaaaaaaaaaatgtaaatgtataggagtgttgtttgtaagcataatttccagattatcattgttagcttccctctgcctagagtttctaaaacttcgacgttcctacctttttactttactattcgacaacgttttcttttgactaatacatagttccaacgattttggtataaccttttaatctaagagtaacaggtatagttaagatcaacaaatgtcatttctattaacaactaccaaatgctatgaaaagtatacttattccacttaatttatttaaaaaattttaaaacaaagtattaaaaaaagggagattacactgtgtatcataaaaaagtaccttacctccaaatttgatttgattacaaaagacttccaagctaaaaaaaatgttttttttttgcatttttgaccgccaacaacagacaaccggattccgggtcagtatactttttttaaatctggcgtatgtgtgacacgtaagattacaagtgcataattcaaaggcattttatgcattctcttaaagcaaacgaatggaatgttcttaactcataattattatcttaattacagtgctgggcgctgaaacaatgcaaactcaatacaattaaattggttgaagtaggttggaagtaagacgttcaggttcagctttgttttacttaaatgtatgaatctgctaaaataatgaaagcaataaggctgcgaagtctagcaaaatgttgattccgtgtcctgcagataataaagtctggcctcagtccgtcaagtattattgttataatactaagcacggaactaatttggcccactacatgctaacacaagggggctagtctcatggttacacggcgttttaaaacattattaagtaagcaaaattcatctcaagcagcagggacatttaaagcgaatccgattttccctgttgttcaaatggcaatgttgcgtatatggttgttacttcttggccaggtgtctggaggtactcttgggaatgctcaagtttctgcggatgatgcttcggctgctgatggagatgttcggaatgggcgtgggatcatacataggtttcatagggtatttagatcttatctaacctcatcgatgtcctcgccttccgaagagctgcgtatcgtattgtattgtgagttgcggctgcgcagcatacgcaggaaactgcccacggcaaaaatagtacggcggtgccgatgaaatattccctggtataaggcctctcgtaatgtcttcctgtcctctacatccaccgatgacgttatagacgtttgatgcggcaatcgtgctgggaacacaaaataatatataaaagacaattcataatagggcgagagagccataaaccgtaaacagaaagcaatcgaaataatgaacgataagaagagctccaaaactttattagcgaggtaaaaaaaaaacaagtgatgatcataacttcaacatacagatttaaaataaaatatggtgacgacctatgactatacccgttactcgtagagttaaagtaaagacattagaataatggggagttcgactcggctattggtgttgtacattttatggtcggggaactcttccttctttctgatacatacgggtataacataaaaacactgtagacgataaagttcagcattctattttggcatatcgatagaaattgaagaaatataatataactaaaaaaaatgaaaaccattcaaaagtgtgctcgtgggagatttcgctggcttgtaggctttacactggggggcgtgggcgtggcaaagaaaaactgtcggcataccgacataaattggcaagaaactaataaaatgaaaaacaagagagaatgctatagtccacttccccgcctatcagatgccaggtactcagctagtccaagtgagaccgacaattttcaaaatttttaaggaatatcggtagaaatgggaaacaaaaaattattattattattatttgggatgtttttaggcgtcagagtgggcgtggacaaaaagttttcgggatatagaaatggacaaaacaactgatttaatcaaaaaaatttaatcattagagtgggcgtggcaaaaagttttttggcaaatcgatagaaatttacaagactaatataatatgacaaaatatcaaaatatttttcaaaagcgtgggcgcggcagttctgagcggtttgtgggcgttagagtgggtcaacaaacttgcgctgcgtctatctctctagaatctgtatgcttcatctcaaccttctagcttttatagttcctgagatctcgacgttcatacggacaggatcagatcgcctcggttattgatcctgattaagaatgtatatactttatatgatcggaaacactttcttctacctcttacatacttttcaacgaatctagtataccctgttacttacttctctgctttcgaaatacaaatatcaaacaacaatcacactgttatacttaattgctgtcatacttaaattggtatactaaccagctataggtgacttgggcgatttaagtgagtattcatcgaggttcttgccgccaagatctagtttgagcaccttctttgttaactcttgtgtggccgcctccatgttactggtcctgtctatcttgatatccacgtttcgctggctgacggcactcttggtgggaatgccctttattgaccgcgtcgattccgtcgttgtcgttgcttcggccgcatcaatcatgttgttgtttgtgatgttgatttttaactttttttgaaaaaagttcttttgagtctctcttaacgcttgctggccagaaacactgtcatctagcgcttttcgttccgcccttgttgttgtggtttccttatcagtataattgcttttaaccacagagtctggtgtagaacctacaaatgatggagaaacagcgaaaccactactttcgtcgattccgcttctgctactgtttctttcaacgacgtcggcagcgacaacagcaacaaccattgttcggaagcgcgagcgtcgctatttttttatttgttttctgttttttgtactaagcatataaacgatttccgctgacgtgcgcgcgcttttgaaatctgttcggttatgctgttggtttcgctatcgtttttttgttcttgtagatttaatacgattttattcgattaaattgtcgattgtttttatatatattgattctatgtcgctttcagatcaaggttcggtggtctatcttcattgggtatttgcattgtaaaaatgtcgaagctggttctatgtggcgccacctggtgagcggtatagtcagtcaccgtaatctggggcagggtcagtatcagtcgctgcctgcgacaactgttctccccagtactcaggtagcttagattgtcgatgatctcatagagacgtcgttggtctgcggatgtgtgtgcgacttgaacagcagcttcgctcgttgctgcagtcagtgtgggttctatagtcctttctccttctgctcctgttggttcatccaattctgaagttgtataatcgtagtcactataatcacacatgctagtaatctgataatctgtgttcaatttcagctctgagttgaagtacaaattatcatccgaactttgcacttttgccagattctctcgtttaactgttcttatgttcacccaaataccgcggtagtctgctttcttcttgaccttgcgtggcaaacgcttgagcaacgtca

SEQ ID NO: 38135 - DNA, 825 bp, DROSOPHILA
atgattgatgcggccgaagcaacgacaacgacggaatcgacgcggtcaataaagggcattcccaccaagagtgccgtcagccagcgaaacgtggatatcaagatagacaggaccagtaacatggaggcggccacacaagagttaacaaagaaggtgctcaaactagatcttggcggcaagaacctcgatgaatactcacttaaatcgcccaagtcacctatagctgcacgattgccgcatcaaacgtctataacgtcatcggtggatgtagaggacaggaagacattacgagaggccttataccagggaatatttcatcggcaccgccgtactatttttgccgtgggcagtttcctgcgtatgctgcgcagccgcaactcacaatacaatacgatacgcagctcttcggaaggcgaggacatcgatgagccgaagcatcatccgcagaaacttgagcattcccaagagtacctccagacacctggccaagaagtaacaaccatatacgcaacattgccatttgaacaacagggaaaatcggattcgctttaaatgtccctgctgcttgagatgaattttgcttacttaataatgttttaaaacgccgtgtaaccatgagactagcccccttgtgttagcatgtagtgggccaaattagttccgtgcttagtattataacaataatacttgacggactgaggccagactttattatctgcaggacacggaatcaacattttgctagacttcgcagccttattgctttcattattttagcagattcatacatttaagtaaaacaaagctgaacctgaacgtcttact

SEQ ID NO: 38136 - protein, 183 aa, DROSOPHILA
MIDAAEATTTTESTRSIKGIPTKSAVSQRNVDIKIDRTSNMEAATQELTKKVLKLDLGGKNLDEYSLKSPKSPIAARLPHQTSITSSVDVEDRKTLREALYQGIFHRHRRTIFAVGSFLRMLRSRNSQYNTIRSSSEGEDIDEPKHHPQKLEHSQEYLQTPGQEVTTIYATLPFEQQGKSDSL

SEQ ID NO: 38137 - DNA, 2704 bp, DROSOPHILA
gatattcacccattctgcccaggcctgtcgctgacagaagaaattcgtaacatcataaaaacgttctgttgatattccgcgtatatacttagcgctttagcaactacttgttaactctgcctaatatacttgataccattattattaatttataaatataccttaagacaattcttaccgaatcattatattattattaaattgtctttcaaactgatcccgagactatctaggggccaattcattagactttgaagccagtttaaaaataaaacagtgataattgggtggcggtttgtcgttaggtttttagtttcatttaggggaataattgaaattaccttgaagttgttacatcacaaataatatcattgaatgagatcaaatacaccttaatacacatccagtatgcaaaattcgtagaacgatacccaaagttaattaattggagtgtatctaggcgtgtacactatttatcttaaagatatataagtacatttgtaaatatataaggagaaactttatttccccattaccactaaatataaataagttcaataaagggctttgtttttgtttgcacgcattgggttgtcttggagtttctctgggactaatcaaatcgtttacacataaaaatacttagaattaattggtttgtacgcccaatattttttacacagtacgcatactacatctggtattccaacaaatgcatacaacatatagagaaatcaaggaagtctttgaaacttccaggggcttcttggaggctgcacagtatgctcgtgccacctgtcccatcatttcttccttattctcctcaacccttctacgttccataaacaaatcagtctgagcaattacaattcagaaattccaaacatgctgcaaatgcgaaatggcaactttaagctgcctcctaacccattggcacaaagcttaattaatatgcttccgtatatagatggctgtgctcactaaatggtaactaacacgctgtccagctcaggacattttcaatccgctagtcgaaatgcccattattaggtgcagcaatggtgaccgttcttaacgtagtaattgtgcatggcaacagtaccattcttgctatagcttccgctaccattgtactgcatgttggacatggagctgccaattccggagccacctcccggaatgggtgcgtcgtcggtgctggtggaggcgtcaaaggccttaatgggattctggataatcttgcaggtgaattggcgatgggggccacgctcctgctgaagaagtacaaatacaagttttgaacttcgtattgcctagtgaacatacataccttaggttgtatggggaagcagcaccaaaggataaatgctataaatgccaccagggtgcctaccagcagtatgaagtcctcgatggtctacagaaggccgaaaaggcatgtcttgtgagtactaaatggtattggccccatgaagtccacttaccggctcctcgcccagcagcacatgattgattagatagacaaagtcatcaaagggtgtcatcgtgactatccttttcgcacttttgtgcgtaaggcaactgcaacagctgctactgacaaatgccgctacaatccgcacagcacaacagcatggcggtccggaggattacaccgcaataaccactggcatatcctccgggttttatgaatttctcgattttcgcacggcttttcgactgtgtggccaggtgcgaccagctaacagaaacaatttttaaacagcttatcgcgcaatgcatgtgtaagcaaatgtacatgtgttttgagcaaaaaatgcattaattgaattgaactagctgtaggctgtgcctttaatgcagtcctcctttaggtaaactcgtactgttttttaacctgttcattcgggcaggctgcgctttaagcgtcttcatccctaagtagtacatatacatgtacattaatacgcgagagatacgcaaagccacgaaatcttgcttgggcgaaattggtgcagttgtatatgaaacacccaaaaatctttatttctataagactttgtgttttaaattgtaaaaactttttcagagtaatcgatatggctgcaaactcgataggaaatacgataatttctcttaattttttttcctctggtcactctcgttttaacagctgaccgtatcagaaaagacccattttttaatttttggtttgttttcccatcgatttctggaattcgacgtgcatcatatgtaaaatgagcaagcaacgcaacaaggagcatgaactggaacagcaacgcaccggtcacgagggggacactaaaatgagcgaccgcaacttatccaaaacgaagaagattaagcaaagggcgaccgccgattcctctagttcatcagattcctccaatgaaagcaaaaaatctaatcacagctccctgtcgcctaacagaaagcagcggacagccggtaagcgacaaagagactcctctcaatcgcaggagaaacgccacaagcagttaacacatccgtcggaggacgtacatgaacagcgctctaagtgggacagtccggaacgcagcaactcccatcgcaacagtacaaggcagcgccggaacactcggagtcgctcaagggagcgtagcgagagagaacgggatagggattgtgagcgaaacaaagagcgggactataacatgcaatc

SEQ ID NO: 38138 - DNA, 581 bp, DROSOPHILA
aaaatcgagaaattcataaaacccggaggatatgccagtggttattgcggtgtaatcctccggaccgccatgctgttgtgctgtgcggattgtagcggcatttgtcagtagcagctgttgcagttgccttacgcacaaaagtgcgaaaaggatagtcacgatgacaccctttgatgactttgtctatctaatcaatcatgtgctgctgggcgaggagccgaccatcgaggacttcatactgctggtaggcaccctggtggcatttatagcatttatcctttggtgctgcttccccatacaacctaagcaggagcgtggcccccatcgccaattcacctgcaagattatccagaatcccattaaggcctttgacgcctccaccagcaccgacgacgcacccattccgggaggtggctccggaattggcagctccatgtccaacatgcagtacaatggtagcggaagctatagcaagaatggtactgttgccatgcacaattactacgttaagaacggtcaccattgctgcacctaataatgggcatttcgactagcggattgaaaatgtcctgagctggaca

SEQ ID NO: 38139 - protein, 124 aa, DROSOPHILA
MTPFDDFVYLINHVLLGEEPTIEDFILLVGTLVAFIAFILWCCFPIQPKQERGPHRQFTCKIIQNPIKAFDASTSTDDAPIPGGGSGIGSSMSNMQYNGSGSYSKNGTVAMHNYYVKNGHHCCT

SEQ ID NO: 38140 - DNA, 2216 bp, DROSOPHILA
gcctttcgaaagcctatagagtttgcctaagagacgatttttctacataaatgtcatatattttaatttatctagggttttaattttttttatcggatttccaatgatgcattaagcttctatttctgcgcgtaattttaaacggaaagatgtttgatgttacctacatatgtacatatgaatttgtgacttatcaataaatattgttgttcttattaattttgttgatacaataaattttaaggctttttggtgctttgtatttcaactatattttttcaataacaaggagtaatataaaatttcgaatgctgatactattaccgattcgttggaaagtatgtaacagggagaaggaatcgtttccgaccatgtaaagtatatatattcttgatcaggatcagtagtcaaatcgatctagccatgtccgtatgaacgtcaagatctcaggccctgtaaaagctagaatgcagcttccaaagacatagacgcagcgcaagtttctttccaaatgttgccactcccactctaacgcccacaaaccgctcaaaactgcaacgctgacttgatatgttttcacatttttattagtcttataaatttccattgatttgcaaaaacaaatgtttgtcacgcccactcaacggtcacaaaccgcacaaaattgccacaccaacactttggaaaaatttttcatatttcgtcgaaatacacatttttgaacaatttcaatacattttttctcactttatttcccaatatctatcgatatcccagaacaatcccactgaatcccactgaataatttgaaagaggaaatcaattttcacaaatacgcagctaattttacgaggtcgaacgtgatttgggatccattgcacacaattactttaatattattcgttcaatcatcagtggatcaacttcgccagggatgggtggtgctgcacgtcttcgctgcggtttacttctttatcctgctggccatcatttgcaacgactacttcctgccgactgtggagtgcatctgcgaggacttgcacctttcgaaggacgtggcagcggccactttcatggctaccgccacctccatgcccgaattctttacgaacacgatcagcacgttgattctggagtcagatatgggcctgggcacgattatcggctcgttaatgttcaacacattgggagtggccggcctagctgcgctcgccatcgataaggtaaggatgcaccttttgaaaaacaaatgtagtctatttaaacaaggtaattttgtcccgcttaaacattgggctggagactgtttactggttatttaattttttatcgtgttgaccgtttatatgattgggtttcatgccgtgctcgtggagttaaagggtatcccgattccttaaaaagtagtaagtaatttgtagtggtaatggacgttgtggttcatgaacttttttattcttatagtcgtaataatacccgttgctcgtagagtaaaagggtatactatattcatttaagagcgtttccgaccatataaagtgtacatatatattcttgatcagcatcaatagccaagtcgaactagcattgtccgtctgtccgtatgaacgtcgagatctcaggaattataaaagctagaatgtagagattaagcatacagattgtagagcactagtcgccataagtattttgacaaaataaacgctaaattaacaaacgaaaatttttttattgaaacttaaaaagttatgaacaacttaatgaaatatgatgattttttgtttcggcataagtattttgacaagctcattgttttaaattgaacttttttggatattgaactttaataaaaaacaaaaaattcattgatagccatgggtaaaaaggctgagttaagtttatttattagatcaatggttgcacagtttaacgttggaattaaagtaaaaaacattgcaaatgagtttaatgtgtcgcgacaagctgtgtattatcaaattaaaaagtttaagaaacataatgacttaaacctaaacaagaacaggccaaacaacgatcactgacgacaaaatccttgtacgggaatttgaaaaaaaatcctcttgcgaagccccaagccgttgcaacgcagtggaatctgaccgccagccttccgaaaagtgaacgtaaggcaatcagtgagtggacatttcgtcgacgtttaaagaaacaggaca

SEQ ID NO: 38141 - DNA, 216 bp, DROSOPHILA
atggcgagcgcagctaggccggccactcccaatgtgttgaacattaacgagccgataatcgtgcccaggcccatatctgactccagaatcaacgtgctgatcgtgttcgtaaagaattcgggcatggaggtggcggtagccatgaaagtggccgctgccacgtccttcgaaaggtgcaagtcctcgcagatgcactccacagtcggcaggaagtag

SEQ ID NO: 38142 - protein, 71 aa, DROSOPHILA
MASAARPATPNVLNINEPIIVPRPISDSRINVLIVFVKNSGMEVAVAMKVAAATSFERCKSSQMHSTVGRK

SEQ ID NO: 38143 - DNA, 2747 bp, DROSOPHILA
caacgaaatcagcgtcacaacaacagcaacaagaatgaggatgatcactacgtctggggaaaggaagtcgacgaaaaagtgccagccgagaacgacgtgccggtggacaaggaaaagcccaacttcggactaagtggcgcgttaacagaggacactaataagttaaacggtgtggtggttaaatactctgagcccccggaggcacgcaagcccaaacggcgctggagattgtacccgttcaagggcgaaacagcattgcccacgctccatattcatcggcagagttgctttctggttggacgcgatcgaaaagtggtcgatctggcagtggatcatcctagttgctccaaacaacacgcagccctgcaatatcgactggtgcccttcgagcgggaagatggtagtcacggaaaacgcgtgcgattgtaccttatcgatctggattcggcaaacggaacgtttctcaacaacaagaagatcgatgccaggaagtactacgagcttatagagaaggacgtcatcaagttcggatttagttcgcgcgagtatgttctgctccacgaaaacagtaaagaggaccaggaggacgatgatgtgcatatcaaggatgagccgcacgatgcaccaacggaagtggcaaatccctagatgacatttgtgtcattatggtttaatatgtttactccaaaaccatttgaatgtatcgcgttttgtacccccaaaccttcgccgaaagatatgtaaaaaatctgctacggaacacggccaacacaaaaataaattctcacacacatcttttttgttttgatgaagcgacataaggtcaggcggaaagagctgacaacgaaaattttctgtcgaggtagatctcaaaagtttcagctttcatttgattgttaacacgatgcgatggcagttggcaattatgtggcttttcgcctccgcgtttgcagtacctttcataaagtggcgccgccaaatagtcacgccgaagcacttgatggcaccacctttgtcacccatcgcacaggacaaggttgtggtcaccccgcagaagcttagagaagtggctgactttaaggccatgatccaaaaggccgtcgatgagaacacttacgtggtggccgctgcaccatcaaaggtgagtcatcaaagtaatcatcaaaacttcatttaattttaacatagaaggtctgcacgaagatttattttgactttttcatgaagcaataataagtctaataagtctcgaatgataaaagccgcgaatgagatatttacgcttattactcattacctcacaaaaattttgtgggaactagaaatgtctagctcttattgcttccaagatctcgacgatctcatacaaagaaattaacaatcgttttttaaactgtcattttgttggtctccctgtttctagatttcttatatatattgaatgtctaattctatcattaccacgctttaccaggattttctagcgacactgggtggaaattggggagcacctatatccttgcctcactcctggaccgcgccagcctttaatcttacctttttttggcatggatttggctaacaacatgcaagaaattttatcaaattcgtagctcatactcgtagtaagtattagcattagcgatcgaagaagtgcggcaatcgcataagcttcgagccgggccttttaaggaactgcaagacgagagatcaaatgcgacctctgattaataaagtcaagcagtaactatcagttgttaagcttttattgttcatccaatcgacatcaaatcggggtgaaactacggaacggtatggtttagcgaatatttgtgtcatggattgataatgaatctttttcctgtacaaaattatcttaaaccactacctaataattttacttatatatataaggtagcgtgaaaaagaaaaaagctctaaaatatgtttaacattatttaatggatattctatgtggaatcgcaacagaaaataatttacatttcatatgttaatggagacaacaacaatcatatatgttctataactaggacatgttcattcaaatatatcaatatacatacatatatgtatggttatagcttatatagtagctaaatatatattaggtgtttacgcaatacatcaatttgttcattgtttaaaaacattttttctaatgcggctttataagttttgttcccattgcaatgaaaaaacaaaatctaacaaattacatttaacaacaagcacatcacttataattgatatctacgatatgcctgttttgctgcccagcactttgtgatttaacttttttactgaactaataacaaatatttgcttattttgttcttgccctttgaaaaatgatcagattttaagtccacagtatattaatttaaatttaaattgaaaaaaaaaaatgtaaatgtataggagtgttgtttgtaagcataatttccagattatcattgttagcttccctctgcctagagtttctaaaacttcgacgttcctacctttttactttactattcgacaacgttttcttttgactaatacatagttccaacgattttggtataaccttttaatctaagagtaacaggtatagttaagatcaacaaatgtcatttctattaacaactaccaaatgctatgaaaagtatacttattccacttaatttatttaaaaaattttaaaacaaagtattaaaaaaagggagattacactgtgtatcata

SEQ ID NO: 38144 - DNA, 246 bp, DROSOPHILA
atggcaccacctttgtcacccatcgcacaggacaaggttgtggtcaccccgcagaagcttagagaagtggctgactttaaggccatgatccaaaaggccgtcgatgagaacacttacgtggtggccgctgcaccatcaaagcgatcgaagaagtgcggcaatcgcataagcttcgagccgggccttttaaggaactgcaagacgagagatcaaatgcgacctctgattaataaagtcaagcagtaa

SEQ ID NO: 38145 - protein, 81 aa, DROSOPHILA
MAPPLSPIAQDKVVVTPQKLREVADFKAMIQKAVDENTYVVAAAPSKRSKKCGNRISFEPGLLRNCKTRDQMRPLINKVKQ

SEQ ID NO: 38146 - DNA, 3664 bp, DROSOPHILA
gtgcgtcgtcggtgctggtggaggcgtcaaaggccttaatgggattctggataatcttgcaggtgaattggcgatgggggccacgctcctgctgaagaagtacaaatacaagttttgaacttcgtattgcctagtgaacatacataccttaggttgtatggggaagcagcaccaaaggataaatgctataaatgccaccagggtgcctaccagcagtatgaagtcctcgatggtctacagaaggccgaaaaggcatgtcttgtgagtactaaatggtattggccccatgaagtccacttaccggctcctcgcccagcagcacatgattgattagatagacaaagtcatcaaagggtgtcatcgtgactatccttttcgcacttttgtgcgtaaggcaactgcaacagctgctactgacaaatgccgctacaatccgcacagcacaacagcatggcggtccggaggattacaccgcaataaccactggcatatcctccgggttttatgaatttctcgattttcgcacggcttttcgactgtgtggccaggtgcgaccagctaacagaaacaatttttaaacagcttatcgcgcaatgcatgtgtaagcaaatgtacatgtgttttgagcaaaaaatgcattaattgaattgaactagctgtaggctgtgcctttaatgcagtcctcctttaggtaaactcgtactgttttttaacctgttcattcgggcaggctgcgctttaagcgtcttcatccctaagtagtacatatacatgtacattaatacgcgagagatacgcaaagccacgaaatcttgcttgggcgaaattggtgcagttgtatatgaaacacccaaaaatctttatttctataagactttgtgttttaaattgtaaaaactttttcagagtaatcgatatggctgcaaactcgataggaaatacgataatttctcttaattttttttcctctggtcactctcgttttaacagctgaccgtatcagaaaagacccattttttaatttttggtttgttttcccatcgatttctggaattcgacgtgcatcatatgtaaaatgagcaagcaacgcaacaaggagcatgaactggaacagcaacgcaccggtcacgagggggacactaaaatgagcgaccgcaacttatccaaaacgaagaagattaagcaaagggcgaccgccgattcctctagttcatcagattcctccaatgaaagcaaaaaatctaatcacagctccctgtcgcctaacagaaagcagcggacagccggtaagcgacaaagagactcctctcaatcgcaggagaaacgccacaagcagttaacacatccgtcggaggacgtacatgaacagcgctctaagtgggacagtccggaacgcagcaactcccatcgcaacagtacaaggcagcgccggaacactcggagtcgctcaagggagcgtagcgagagagaacgggatagggattgtgagcgaaacaaagagcgggactataacatgcaatccagcaaggagcgctggcagcgttcgcctgctctgcggcatcgttcaaggagcagcgaacgcaaaaatagggagcgtgatcgccagcggaggcctactgaaaggcgcccggttcggtaggttttcgtaaatcatctgtactaaaacttgtaataagtaaaaattcattccatattcttctatatatatattacataaactgattttaccataattcctattaaatctataactagcttaacttagctactatttatacttttattctgctcagttatacttcatctaaaatactattaaattattttaattagtaaggtttgcgttatataaaaaaaaactttttaaattagttaaatttaaagacagtctagcaaaaatatttgtccaacccctgaatggctagtatatttcttcttattattatctttattcccagccgtagtcaaagtccacgagatcggtgccacggcgggcgggatcttgaccagagacgccaacgaaatcagcgtcacaacaacagcaacaagaatgaggatgatcactacgtctggggaaaggaagtcgacgaaaaagtgccagccgagaacgacgtgccggtggacaaggaaaagcccaacttcggactaagtggcgcgttaacagaggacactaataagttaaacggtgtggtggttaaatactctgagcccccggaggcacgcaagcccaaacggcgctggagattgtacccgttcaagggcgaaacagcattgcccacgctccatattcatcggcagagttgctttctggttggacgcgatcgaaaagtggtcgatctggcagtggatcatcctagttgctccaaacaacacgcagccctgcaatatcgactggtgcccttcgagcgggaagatggtagtcacggaaaacgcgtgcgattgtaccttatcgatctggattcggcaaacggaacgtttctcaacaacaagaagatcgatgccaggaagtactacgagcttatagagaaggacgtcatcaagttcggatttagttcgcgcgagtatgttctgctccacgaaaacagtaaagaggaccaggaggacgatgatgtgcatatcaaggatgagccgcacgatgcaccaacggaagtggcaaatccctagatgacatttgtgtcattatggtttaatatgtttactccaaaaccatttgaatgtatcgcgttttgtacccccaaaccttcgccgaaagatatgtaaaaaatctgctacggaacacggccaacacaaaaataaattctcacacacatcttttttgttttgatgaagcgacataaggtcaggcggaaagagctgacaacgaaaattttctgtcgaggtagatctcaaaagtttcagctttcatttgattgttaacacgatgcgatggcagttggcaattatgtggcttttcgcctccgcgtttgcagtacctttcataaagtggcgccgccaaatagtcacgccgaagcacttgatggcaccacctttgtcacccatcgcacaggacaaggttgtggtcaccccgcagaagcttagagaagtggctgactttaaggccatgatccaaaaggccgtcgatgagaacacttacgtggtggccgctgcaccatcaaaggtgagtcatcaaagtaatcatcaaaacttcatttaattttaacatagaaggtctgcacgaagatttattttgactttttcatgaagcaataataagtctaataagtctcgaatgataaaagccgcgaatgagatatttacgcttattactcattacctcacaaaaattttgtgggaactagaaatgtctagctcttattgcttccaagatctcgacgatctcatacaaagaaattaacaatcgttttttaaactgtcattttgttggtctccctgtttctagatttcttatatatattgaatgtctaattctatcattaccacgctttaccaggattttctagcgacactgggtggaaattggggagcacctatatccttgcctcactcctggaccgcgccagcctttaatcttacctttttttggcatggatttggctaacaacatgcaagaaattttatcaaattcgtagctcatactcgtagtaagtattagcattagcgatcg

SEQ ID NO: 38147 - DNA, 1341 bp, DROSOPHILA
cagaaaagacccattttttaatttttggtttgttttcccatcgatttctggaattcgacgtgcatcatatgtaaaatgagcaagcaacgcaacaaggagcatgaactggaacagcaacgcaccggtcacgagggggacactaaaatgagcgaccgcaacttatccaaaacgaagaagattaagcaaagggcgaccgccgattcctctagttcatcagattcctccaatgaaagcaaaaaatctaatcacagctccctgtcgcctaacagaaagcagcggacagccggtaagcgacaaagagactcctctcaatcgcaggagaaacgccacaagcagttaacacatccgtcggaggacgtacatgaacagcgctctaagtgggacagtccggaacgcagcaactcccatcgcaacagtacaaggcagcgccggaacactcggagtcgctcaagggagcgtagcgagagagaacgggatagggattgtgagcgaaacaaagagcgggactataacatgcaatccagcaaggagcgctggcagcgttcgcctgctctgcggcatcgttcaaggagcagcgaacgcaaaaatagggagcgtgatcgccagcggaggcctactgaaaggcgcccggttcgccgtagtcaaagtccacgagatcggtgccacggcgggcgggatcttgaccagagacgccaacgaaatcagcgtcacaacaacagcaacaagaatgaggatgatcactacgtctggggaaaggaagtcgacgaaaaagtgccagccgagaacgacgtgccggtggacaaggaaaagcccaacttcggactaagtggcgcgttaacagaggacactaataagttaaacggtgtggtggttaaatactctgagcccccggaggcacgcaagcccaaacggcgctggagattgtacccgttcaagggcgaaacagcattgcccacgctccatattcatcggcagagttgctttctggttggacgcgatcgaaaagtggtcgatctggcagtggatcatcctagttgctccaaacaacacgcagccctgcaatatcgactggtgcccttcgagcgggaagatggtagtcacggaaaacgcgtgcgattgtaccttatcgatctggattcggcaaacggaacgtttctcaacaacaagaagatcgatgccaggaagtactacgagcttatagagaaggacgtcatcaagttcggatttagttcgcgcgagtatgttctgctccacgaaaacagtaaagaggaccaggaggacgatgatgtgcatatcaaggatgagccgcacgatgcaccaacggaagtggcaaatccctag

SEQ ID NO: 38148 - protein, 421 aa, DROSOPHILA
MSKQRNKEHELEQQRTGHEGDTKMSDRNLSKTKKIKQRATADSSSSSDSSNESKKSNHSSLSPNRKQRTAGKRQRDSSQSQEKRHKQLTHPSEDVHEQRSKWDSPERSNSHRNSTRQRRNTRSRSRERSERERDRDCERNKERDYNMQSSKERWQRSPALRHRSRSSERKNRERDRQRRPTERRPVRRSQSPRDRCHGGRDLDQRRQRNQRHNNSNKNEDDHYVWGKEVDEKVPAENDVPVDKEKPNFGLSGALTEDTNKLNGVVVKYSEPPEARKPKRRWRLYPFKGETALPTLHIHRQSCFLVGRDRKVVDLAVDHPSCSKQHAALQYRLVPFEREDGSHGKRVRLYLIDLDSANGTFLNNKKIDARKYYELIEKDVIKFGFSSREYVLLHENSKEDQEDDDVHIKDEPHDAPTEVANP

SEQ ID NO: 38149 - DNA, 4438 bp, DROSOPHILA
aaaagttattgaagctaaaggaagatatatatttaattaattgtttcaataaggagctaatccagcttcatttaaacctattttcattgaattgaaggcctgtcaaaatacttatgccgaacaaaaaattatcatatgtcattaagttgtttataaccttttaagattcaataaaaaaaatttcgtttggtaatttttaagtttatattacttacacacaaaaaaaaataaaaaataatcaatactaccatatcaaatcatttaaaagttttactgacaaatgtgcagcgtttattttgtcaaaatacttatgccgactagtgtagagaaggtaaattaattaaaagtagtctactattgtagaatagggaggtaatataaggtttgcatcccaattaaggcgccgcaaggcaaacagtaagaagattttttggaccgattaattgcggtccgagtgaaatacgtattgtgatccatactcaagaatcggacggactagcgaaataaataaggtttcggtcatgtatggataatcaaattcctttgacatatttttttaaaaccaagcacacccctcaccttattgaaaatagtcgaactatggtctgcaaattttagtttagggtccagaagaacaccaagatcatcaacccatgttattctgtccaaagggcatccacttagagtgtaagtaagtcgtgcgtattgggttgacacgataaaaagtcataattttacatttggagtcatttaagttttgtaggttatcacgaaaccatatttgaaagctgtctagatcggattgtaagtccaaatggcaagaaatgtcctctaagcttatctctctttaggcgctttgccaagctttttacaagtgcgtggaaggtgaatgttacaaagagagggacgactctgttgacattttgtaaaatcgctgctctctgtataagagagaaacgacagcgatgtaattggtgtatatttgttttcaaaatacaaaatgcaggcctccatcgggtggcccgtcatcacttcgtcattgtgtatatcagtatcttgtccaccacaatttttcttcaattgctgtcgacattttattgtgggggtagctatttatggtgacttagtaataccagtacccaagtaataaaatttattattaattttcagccggtgcaactggactggtggcccatagctcgcgactgctttatttatgtcttcaacacgattatcctgctggtcttggcctggagtggaagcattagtttcacggagtcctgcatcatgatgggattcctcatcctttactaccttatcacgtttaacaacaacaagtttatgcccgccatccgggtgtttatcgaggatcgtatgaactgctgcttctccacgcgatatggtatgggaatgtttatagtctcttgttagttattataaattcttaaaaaaaattaatttttgtaaattagatctaacggagcctccagagaacagtgccaaggcgcagcttccactcaaaaaagatcctctgtccggcgatggcctctttgttcttaatcttcccgaaaacacctcgtccatgtcttccaccgccaacctcacacgtaacaagcatcgtaagctgagattatttccatataacagattcgttgaaatcatgtaacagagcgagaaatgcgttgccgaccctattactttaccatctgtccctccgtatggaggttgggttctcagtaataataagagcgagagaattggaattctcccatctcaaataagattcatatttagttactgattccaccctcgcactttgtttagcataatatcggatataaaatagtcgacccaccgactaaagcattctctctgtgttgtataatcgttactcgtagacgtacgcccacatatttgaacaattttttgaaattttttcataattttattagtcttgtaaatttctatcgattttccaaaaagccgacgaaccggtcacgcccacataccccaatatctatcgatatcccaaaaaatgatattctatcttgttttaatcttgaaaataattatcgattccagttaacgacgaggacgacgtcgcagacgtagtgcccgggagcatatacgcttacccgcgtgacgcatccggttggatgcaattctggtggatcttcgtcttccccattaaggtcacgctatccctattgatcccgcacccgatgaagtaccgccgactgtacccattatcttttatcatgtgcatcttgtgcattggcggaaacgcctaccttattgtctggatgctgactgcctttggtgtggccattcatgtgcctaccattgtgatgggtctgaccttcttggctgctggctctaccatgccggaagccgtctccagtcttatttcccttagaaatggtgagtggtgtcttaattaatatcttctcctttatgacttttaagggaggttggtttatacgacacgctgaaaacgaacctataagttccttaccattaattaggtagaaattgttgtgtggaagctgactggcatacaaacagacggaagggcattaatatttctgctcgaatatacacacaaatactgtatacggtggcaaatgtcgcctttactgccagcaatcttctgaaaatctgaaatatacatcctcagagagataattagagaggtattaaaagatcctcgattgttatatatcagttactcagttaaagggaatctagttgcaatgagccttgaaatttggattggcggctacaataattgcctactatctaaagtcgtaaatgaagtaattcgggaaattatttgtacttgactatatactgacaaaacaaatataaaatcgaaaaaaatttaaaaatttggtccgtataatgacatttccaaaaaaaaaaaaatatacaaaaaataaatcaaaacatttttagacgtatagacgtgggcaaatggtctcggctagtgattctgatccggaatatttttactgcataggaaacgcttcctacatgatctacacgatgtccaaaagtcataaaaacactattatacctattattttgaactaatagtaatatgtattgcaatttataggggaaaatggcattggagtttctaattcgttgggcgctaactccttggccatcttgctatcccttggagtgccttggttcatcaagaattgtatacactacggaactggggagccccagcaggttggcacccagggcatcgagtataacatcctgatcttgatcatatccactatggcgctgttcataatcctcagcttcagtggatatcggcttacgaagcgagtgggcgtagccctcttcacggtgtacggagtctttattgttctacagatcctcatcgagatgaatgtattctttcccagagattgcagcagctagtgatggacaaagatttgttgtaaaaaaatcacccttgcacaaatcttttggtgccggcaccaggagtttatcactattacaaagacaccctatttacaggacctacatttgtgtaattatatttaggaaatactataccatctaaaaaagtttgaatgttttaaatgataagtacaacaattttatgtcttggctgtactttgtaattatcattttaatactcaaccaggaatcagaggcagtacacatcctgtatttctaaccctactttacgatataattaatacgtaagactgtctatagatttagaagacgaggcttccatcagctatttctatttatttcgtgagtgtatcttaaggcccgtagtacaaccaacaaatgtttaaaccgttaccaaagcacaaaacgagatactagcagttaagaaaatattacacgcttatccggaagagtccatgatattcacccattctgcccaggcctgtcgctgacagaagaaattcgtaacatcataaaaacgttctgttgatattccgcgtatatacttagcgctttagcaactacttgttaactctgcctaatatacttgataccattattattaatttataaatataccttaagacaattcttaccgaatcattatattattattaaattgtctttcaaactgatcccgagactatctaggggccaattcattagactttgaagccagtttaaaaataaaacagtgataattgggtggcggtttgtcgttaggtttttagtttcatttaggggaataattgaaattaccttgaagttgttacatcacaaataatatcattgaatgagatcaaatacaccttaatacacatccagtatgcaaaattcgtagaacgatacccaaagttaattaattggagtgtatctaggcgtgtacactatttatcttaaagatatataagtacatttgtaaatatataaggagaaactttatttccccattaccact

SEQ ID NO: 38150 - DNA, 1089 bp, DROSOPHILA
atgcaggcctccatcgggtggcccgtcatcacttcgtcattgtgtatatcaccggtgcaactggactggtggcccatagctcgcgactgctttatttatgtcttcaacacgattatcctgctggtcttggcctggagtggaagcattagtttcacggagtcctgcatcatgatgggattcctcatcctttactaccttatcacgtttaacaacaacaagtttatgcccgccatccgggtgtttatcgaggatcgtatgaactgctgcttctccacgcgatatgatctaacggagcctccagagaacagtgccaaggcgcagcttccactcaaaaaagatcctctgtccggcgatggcctctttgttcttaatcttcccgaaaacacctcgtccatgtcttccaccgccaacctcacacgtaacaagcatcttaacgacgaggacgacgtcgcagacgtagtgcccgggagcatatacgcttacccgcgtgacgcatccggttggatgcaattctggtggatcttcgtcttccccattaaggtcacgctatccctattgatcccgcacccgatgaagtaccgccgactgtacccattatcttttatcatgtgcatcttgtgcattggcggaaacgcctaccttattgtctggatgctgactgcctttggtgtggccattcatgtgcctaccattgtgatgggtctgaccttcttggctgctggctctaccatgccggaagccgtctccagtcttatttcccttagaaatggggaaaatggcattggagtttctaattcgttgggcgctaactccttggccatcttgctatcccttggagtgccttggttcatcaagaattgtatacactacggaactggggagccccagcaggttggcacccagggcatcgagtataacatcctgatcttgatcatatccactatggcgctgttcataatcctcagcttcagtggatatcggcttacgaagcgagtgggcgtagccctcttcacggtgtacggagtctttattgttctacagatcctcatcgagatgaatgtattctttcccagagattgcagcagctag

SEQ ID NO: 38151 - protein, 362 aa, DROSOPHILA
MQASIGWPVITSSLCISPVQLDWWPIARDCFIYVFNTIILLVLAWSGSISFTESCIMMGFLILYYLITFNNNKFMPAIRVFIEDRMNCCFSTRYDLTEPPENSAKAQLPLKKDPLSGDGLFVLNLPENTSSMSSTANLTRNKHLNDEDDVADVVPGSIYAYPRDASGWMQFWWIFVFPIKVTLSLLIPHPMKYRRLYPLSFIMCILCIGGNAYLIVWMLTAFGVAIHVPTIVMGLTFLAAGSTMPEAVSSLISLRNGENGIGVSNSLGANSLAILLSLGVPWFIKNCIHYGTGEPQQVGTQGIEYNILILIISTMALFIILSFSGYRLTKRVGVALFTVYGVFIVLQILIEMNVFFPRDCSS

SEQ ID NO: 38152 - DNA, 3974 bp, DROSOPHILA
ccaccaacaccaccaccgtggtttgctgaggtcagcggtggttcagcttgtagacacgacacgagaaacaaaagcttctgtcatcgcagcgggtggcttttgtggaggtcagcaaaaagtgcgaaacgaaactcggtacagcgacctttggctggctccgatttggtttcggattaacgcagactctgatctttataaaattactcatgagccgcagctatctcacatttaatcacgattccggcgactgaaatgcgtaagctgcctaagaaaaaactcattgaattaaaatcttaatattattcacaacacaggtgtggttttgtatggcaaagaatcaaatacattttttgactataattgatatcttacaactctttttttttatttatttttgaataacccttgagctctgcaaaattatgtcaggcttgtcaaaaagcaaaaaaaaaaaaagcaatgcaaaggtgttaaaaaatatgtttagtaattattggcatattgccaatgtaatcaaatattttccataacctacattcaagtatatttaccgtgccctttttgtatttacacaagaaatgtgaaagcaataaacatcgatgtgtatacggctttttggattttatatatttaaagttaatttattgtgcatttgcattttcagatttcgccgatagagctttcagcacgcaatttgacccgtcagttaagtgattcctgtttagatactagtaacgagctgatgcacagaaaaaaatgccaagtgttatgagaactgctattcaaatatgcataaaacaaattatttacaaaaatcattattataataatgaaacaatatttacgagtagtactttttctacgatgtaaaacctttagtaatcagaatgttttggcatcacactcatcaattaatatttccagcgttgcaaacccgtcatgcgatggagttggccaaagtgcaggacatcagtttgctaggagccaccgatgaaacacgatgttgcacagcgccgtgcacaatgtgagcctggtttacgccctcgtttgggccatagataactactatggaatggccaccagcacaccactggctgtggtgcaattccccacgagtcgggaaagtagaagactgcacaacgatctgatagatgccgccctgggcagatcatcgggcacgggaagaattcagtttctgctggaggatgaccgtgtggagatgacggaaaccgatacggatccgccacctccaagtggattaacgggcagacccattgctatctggttcctggacagtttgcgatcatactttcgcttggagatgtacctgaatcagttgggcagtccgtacaagagaaatggcttctttctggttatttacaccggactggaggatcagcccatggagtcactgaagatcatgtttcgacgattgctaaatatgtacgtgctgaatgtgaatgtgtttctgcaaagagatggaacggtccatttgtacacttactatccctatggaccgcatcactgtcagtcctcgctgcctgtctactatactgctttccaggatctagccgcaccggcgaacggattcggtcttaccaagccgcttttccccagaaaactgaccaacatgcatggctgtgaaatggtggttgcaacctttgagcatcggccatatgtgatcatcgaagatgatcccaagactccgggaggcagaagcattcatggcatcgaaggcttgattttccgatccctggccgagcggatgaactttactattaaattggtagagcaaaaggataagaaccgcggcgaaattttgcctgatggaaattttacgggaatcctaaaaatggtatgattaattaagagcacttatttaatcgtaaccgtaaccggtcgtatacgtaatgaaccattatttttattaagtatacgtattcctttgcagatggtcgatggcgaggtgaatctaacattcgtttgctttatgtacagcaaagcccgttcggatctgatgctacccagtacatcgtacacaagtttcccgattgtccttgtagttccgagtgggggatccatatcgccaatgggccgattgacacgaccctttcgctacataatttggtcctgcatcctggttagcctgattttcggtttcgtgctgatttgtcttctgaaaattacggctttgccgggattgagaaatctagtgctgggcagacgcaatcgtcttccctttatgggcatgtgggccagtttgcttggcggtctggctttatataatccacaaaggaactttgccagatacattctggtgatgtggctcctgcaaacgctgattctccgggccgcctatacgggtcagttataccttctcctccaggatgttgaaatgcgatcgccaattaagtcccttagcgaggtgctggccaaggactatgagttccgtattctgcccgccttgcggacgatcttcaaggattcgatgcccaccaccaatttccatgcggtgctctcacttgaggagtcactgtaccgactacgtgatgaggatgacccaggtattacagtggctcttctacagcccactgtcaaccagtttgactttcgttcgggaccaaataaaaggcaccttaccgtccttcccgatccactgatgaccgcccccttaaccttttacatgcgaccgcattcctacttcaagaggcgaatcgatcgtctaatcatggccatgatgtcatcaggcatcgttgcccgttatcgaaagatgtatatggaccgaattaaacgagtgtccaagcggcggaacctggaacccaagccattgtccatctggcgactaagtggaatttttgtttgctgtgcagggctatatcttgtggccttaattgtcttcatcctggagatcttgaccacaaatcatcgaagattacgcagggctttcaatgtaattaacagatatgcggcataatatattaatcatattaatttgtttaaatacatttaaggcgtggtaaacaaaaacaatatgtcaataaaaagtaatggcgcgaaacataatagttattttcggcggcttaagtataaatgtttatatttttttccatatacttttcagaataatttaataccactcaaactctttcaaatagccattctaatcccgtccagtggcgtcttcgactcagcaactccagaccaaagaccacaatggaaatacagagtgctcccatcaagcaattaagtgctgccacaacgaagctcatggactcagcaaatccagtggctacactctccgtagaggaatgaattcttttacccggcgtatccgtatccgtggtggtgggcagattgtcccaggcgaggatctgcgaatggtgctggaaaatgccaaagctacgcatgttgaaaagcaatttattgatctcccaggcgaaataggagccatgtggaaagtacatgcaaagcatattgtcgacgatcttttcagccaaaatcaccagctgattgcgatgtttccgatgcctaaccaagtgatcggctaaaaaggcgcgactggtaaaggcgcctgtcttccagggagccttcaagagagcatcaaatacatccaccggctgtcccgcggatattaaagtcttgccctgaaaagacggtatcttcagggtcatccgataggaggcatgatcggtgataaaacggaagccaccactcaaagcttgatccaaagtgcgaggagatggcttcaccggtgagttctgtatgaagttgaatacggatgcctcgtaactggcccgaatgacaaagatccagagcatccaaccggccaaaatgggggatggcattcgccatcgactgcccacaatccaatgaagacccaatatcgtactaagcagcagccaggtgtatttttcgaaagggaacagcataacctcatagatactataaccgcctctggcctgcaacacgattat

SEQ ID NO: 38153 - DNA, 1878 bp, DROSOPHILA
atgttgcacagcgccgtgcacaatgtgagcctggtttacgccctcgtttgggccatagataactactatggaatggccaccagcacaccactggctgtggtgcaattccccacgagtcgggaaagtagaagactgcacaacgatctgatagatgccgccctgggcagatcatcgggcacgggaagaattcagtttctgctggaggatgaccgtgtggagatgacggaaaccgatacggatccgccacctccaagtggattaacgggcagacccattgctatctggttcctggacagtttgcgatcatactttcgcttggagatgtacctgaatcagttgggcagtccgtacaagagaaatggcttctttctggttatttacaccggactggaggatcagcccatggagtcactgaagatcatgtttcgacgattgctaaatatgtacgtgctgaatgtgaatgtgtttctgcaaagagatggaacggtccatttgtacacttactatccctatggaccgcatcactgtcagtcctcgctgcctgtctactatactgctttccaggatctagccgcaccggcgaacggattcggtcttaccaagccgcttttccccagaaaactgaccaacatgcatggctgtgaaatggtggttgcaacctttgagcatcggccatatgtgatcatcgaagatgatcccaagactccgggaggcagaagcattcatggcatcgaaggcttgattttccgatccctggccgagcggatgaactttactattaaattggtagagcaaaaggataagaaccgcggcgaaattttgcctgatggaaattttacgggaatcctaaaaatgatggtcgatggcgaggtgaatctaacattcgtttgctttatgtacagcaaagcccgttcggatctgatgctacccagtacatcgtacacaagtttcccgattgtccttgtagttccgagtgggggatccatatcgccaatgggccgattgacacgaccctttcgctacataatttggtcctgcatcctggttagcctgattttcggtttcgtgctgatttgtcttctgaaaattacggctttgccgggattgagaaatctagtgctgggcagacgcaatcgtcttccctttatgggcatgtgggccagtttgcttggcggtctggctttatataatccacaaaggaactttgccagatacattctggtgatgtggctcctgcaaacgctgattctccgggccgcctatacgggtcagttataccttctcctccaggatgttgaaatgcgatcgccaattaagtcccttagcgaggtgctggccaaggactatgagttccgtattctgcccgccttgcggacgatcttcaaggattcgatgcccaccaccaatttccatgcggtgctctcacttgaggagtcactgtaccgactacgtgatgaggatgacccaggtattacagtggctcttctacagcccactgtcaaccagtttgactttcgttcgggaccaaataaaaggcaccttaccgtccttcccgatccactgatgaccgcccccttaaccttttacatgcgaccgcattcctacttcaagaggcgaatcgatcgtctaatcatggccatgatgtcatcaggcatcgttgcccgttatcgaaagatgtatatggaccgaattaaacgagtgtccaagcggcggaacctggaacccaagccattgtccatctggcgactaagtggaatttttgtttgctgtgcagggctatatcttgtggccttaattgtcttcatcctggagatcttgaccacaaatcatcgaagattacgcagggctttcaatgtaattaacagatatgcggcataa

SEQ ID NO: 38154 - protein, 625 aa, DROSOPHILA
MLHSAVHNVSLVYALVWAIDNYYGMATSTPLAVVQFPTSRESRRLHNDLIDAALGRSSGTGRIQFLLEDDRVEMTETDTDPPPPSGLTGRPIAIWFLDSLRSYFRLEMYLNQLGSPYKRNGFFLVIYTGLEDQPMESLKIMFRRLLNMYVLNVNVFLQRDGTVHLYTYYPYGPHHCQSSLPVYYTAFQDLAAPANGFGLTKPLFPRKLTNMHGCEMVVATFEHRPYVIIEDDPKTPGGRSIHGIEGLIFRSLAERMNFTIKLVEQKDKNRGEILPDGNFTGILKMMVDGEVNLTFVCFMYSKARSDLMLPSTSYTSFPIVLVVPSGGSISPMGRLTRPFRYIIWSCILVSLIFGFVLICLLKITALPGLRNLVLGRRNRLPFMGMWASLLGGLALYNPQRNFARYILVMWLLQTLILRAAYTGQLYLLLQDVEMRSPIKSLSEVLAKDYEFRILPALRTIFKDSMPTTNFHAVLSLEESLYRLRDEDDPGITVALLQPTVNQFDFRSGPNKRHLTVLPDPLMTAPLTFYMRPHSYFKRRIDRLIMAMMSSGIVARYRKMYMDRIKRVSKRRNLEPKPLSIWRLSGIFVCCAGLYLVALIVFILEILTTNHRRLRRAFNVINRYAA

SEQ ID NO: 38155 - DNA, 3453 bp, DROSOPHILA
aaccctgataggagtccaccatcaacaggctgacgcgtttcctgcccggcaccggattgaccaccagatccggacgaatgcgtagcagctgcaccgccaccattcgccacgaatccattaggatgttcatcatatactcaaaccaatgggcggtgcccaggtgacgcgtggaaatggtcaccaccagggtggtgctcagctgggccagcacattctcgatgaccagacgtagtgcccgggccacatacagattggcgtcctccccctgcatatcgatcctcgaattctccaggtagcttttatagatcgaataaccggaaccggaacttaagcttgaacccgcattggaatcggaggtggtattcatggcgccaacttttatgctcgactgcaaggacatgatttcaattgaaacctggactgggttatttggattcacgttcattcatggtctgatctttatcgagattgtactaattaaaggcaaataaatggaaaattaaatctggcgaaggatattaaaacaatcaaatgcaatcaaaacaatcattcgtttattcgtacatcgcgtataattgaattaatttttatatcaaatttaatgtcttgtgaaaatataaaagttcagtgtacgttatataattagagcgttagctaaagaaagaatttcgagttaacagattacatcaatcaatgaagcaatgcccaccaccttgtaaacggagcatacctgccgacccataagcatatacgattatggacatcagttagggtcgagtcataaccaccaccttttataggccatataaatttagatatttacgattgaccagctgatggacaaaatccccgcctaattgtccaacttggtgcgtgtcccacaatagtcttatttgacttggcaactaatgagatgcaaatagagaccggatagaaatggaattcgccgcgtgtacttgtcaatttcggcagtattcttcccggatttcgatagacggacatgaacgtgaccagcctgctgaatttcgagtcgatgaagtacatcggcgcccagacgcaagcggcgtcaataaatcatcacgtggcccaggcccttcgtgtcttcatcgaggacttctatcagcggatcgctcccgcctttattgtggtcctctcctgccggcgacccagtcccatgaacttctaccgcaacattatgcagctgctctacgagagcgtggacacgatgatcgttcagctagtcctggtcgagctcggtcgtccgcgtcggatcgccggtcccaggactcacaatctactgctggtggattcgctggatgcactgctgtaagatattaaagtgattagcaacttctttcgagggctaaccacttaaatgtaatatcctgcagatttcgatagattttcagtcgtaacttggtcaaaataagccacataaacgaaattagtgactgttttgtgagtctgaaaagatcagctaacaatctgtataaatttaggataattcatataattttattttttttggcaattttttgctgttttttaggggcttaaaatttgcaaaaaatgggtaaaaaatttttttcccaattttggacactattcgattgggaatttcgtaacaaattcaacgagctataacattccacgtttggaccaatattgtttttgttttggccaaaaaactgatatttttttcacaaaaaaaaacacttttacgcaaaaaattcggtaacctaaaattatatgcatattccagcgacatcgagatccacacgtatacggcgcagtcggacaccagcgagtactactttatcttcctgcagcagcgggatgcactgattccgcacgatatgcagggtgtgttcgcgtactgctggcgccaccagttgatcaactgcaatgtgatgacgcagagttccggtggccaggtgctgctccacacgtacttcccttacgcgcctggccaatgcaacgattcccagccgaccaggatcaatatgtttttgggcgaatcgtggaagcatcgcgactactttccctccaagttgcataacctcaacgggtgccctttgattgttttggctaggaaagtgtcgccctttttagacctagatgaggggcagcgagagcttcgcggcttggaggggcgtctgctgcaggaattgtcgcgcaggatgaactttagcatacagttttcgggcttacaggatcaactgaagaatcgcacaacatggacggagaaacagttgctacagaagctggtaggatcgatcatttgagaatttcattgaacgataattttaataatatttgaacaggtccaggagcgtatagcccacctggcgattggttatgtgaggaagcgcatccagtacgcaacgaatctgacgcccgtgtttccgcattactcgaaccgggtggtgggatgtctcctgttgaatgcccacaacctgaccagcctggagatttggtcgtttccgtttcaggcactcacttggatctgcctggtgtttagttttttgagtatatcctgcctagcattgctccattgacgcggcgcgggggatcggttggctctcgttctggcggtctatgccgcctcacttggcttgcccatcgatccccctgagcggccgtcgctgcagttgctcttcgccagttggctgatttttggcctgatcgttagatccatgtactcggcgctgttgttcttcatcctgcgataccatctgcaccagcgattgccaggaaatctgcaggatctaacccatggcgactatgcggccgtaatgggtcggaccacgttgcaagatctgagggaggtgcccagtctgcaggatctgctgggtctcaaatccgtgatagtgacctctgaacgggaggaggaggtgcttcgcacgttagatcggtgtacgctgcgagaaggagccggctcacatccacttttctttggcctgatttcccaggatgcacttctccatctcacccaacggggccatcgggctggagcgtatcacatcataccgcaagacgttctggagcagcagctggccatttatctgcagaagcactcgcatctggccagccacttggaccacctcgtcatgtccattcgatccgttggcctggtgcaccactgggcgggccaaatggctagcgagcggtacttccgcagtcggttcctgtaccgggagaagcgcatccgacagccggatctgtgggcggtctacatcctgaccgcaggactatatctcctgtcgctggtcgtcttcatatgcgaacttctggcctccagacgagcagggctctgaacaaaatattttacttattattactaaataaattatgaaaacaagagagaatgctaatgcttttactttacgagtaacgggtataatatccttaaatgccgaaattatcatttttttaggtatatattaaatggtg

SEQ ID NO: 38156 - DNA, 1629 bp, DROSOPHILA
atgaacgtgaccagcctgctgaatttcgagtcgatgaagtacatcggcgcccagacgcaagcggcgtcaataaatcatcacgtggcccaggcccttcgtgtcttcatcgaggacttctatcagcggatcgctcccgcctttattctgctctacgagagcgtggacacgatgatcgttcagctagtcctggtcgagctcggtcgtccgcgtcggatcgccggtcccaggactcacaatctactgctggtggattcgctggatgcactgctcgacatcgagatccacacgtatacggcgcagtcggacaccagcgagtactactttatcttcctgcagcagcgggatgcactgattccgcacgatatgcagggtgtgttcgcgtactgctggcgccaccagttgatcaactgcaatgtgatgacgcagagttccggtggccaggtgctgctccacacgtacttcccttacgcgcctggccaatgcaacgattcccagccgaccaggatcaatatgtttttgggcgaatcgtggaagcatcgcgactactttccctccaagttgcataacctcaacgggtgccctttgattgttttggctaggaaagtgtcgccctttttagacctagatgaggggcagcgagagcttcgcggcttggaggggcgtctgctgcaggaattgtcgcgcaggatgaactttagcatacagttttcgggcttacaggatcaactgaagaatcgcacaacatggacggagaaacagttgctacagaagctggtccaggagcgtatagcccacctggcgattggttatgtgaggaagcgcatccagtacgcaacgaatctgacgcccgtgtttccgcattactcgaaccgggtggtgggatgtctcctgttgaatgcccacaacctgaccagcctggagatttggtcgtttccgtttcaggcactcacttggatctgcctgttgctcttcgccagttggctgatttttggcctgatcgttagatccatgtactcggcgctgttgttcttcatcctgcgataccatctgcaccagcgattgccaggaaatctgcaggatctaacccatggcgactatgcggccgtaatgggtcggaccacgttgcaagatctgagggaggtgcccagtctgcaggatctgctgggtctcaaatccgtgatagtgacctctgaacgggaggaggaggtgcttcgcacgttagatcggtgtacgctgcgagaaggagccggctcacatccacttttctttggcctgatttcccaggatgcacttctccatctcacccaacggggccatcgggctggagcgtatcacatcataccgcaagacgttctggagcagcagctggccatttatctgcagaagcactcgcatctggccagccacttggaccacctcgtcatgtccattcgatccgttggcctggtgcaccactgggcgggccaaatggctagcgagcggtacttccgcagtcggttcctgtaccgggagaagcgcatccgacagccggatctgtgggcggtctacatcctgaccgcaggactatatctcctgtcgctggtcgtcttcatatgcgaacttctggcctccagacgagcagggctctga

SEQ ID NO: 38157 - protein, 542 aa, DROSOPHILA
MNVTSLLNFESMKYIGAQTQAASINHHVAQALRVFIEDFYQRIAPAFILLYESVDTMIVQLVLVELGRPRRIAGPRTHNLLLVDSLDALLDIEIHTYTAQSDTSEYYFIFLQQRDALIPHDMQGVFAYCWRHQLINCNVMTQSSGGQVLLHTYFPYAPGQCNDSQPTRINMFLGESWKHRDYFPSKLHNLNGCPLIVLARKVSPFLDLDEGQRELRGLEGRLLQELSRRMNFSIQFSGLQDQLKNRTTWTEKQLLQKLVQERIAHLAIGYVRKRIQYATNLTPVFPHYSNRVVGCLLLNAHNLTSLEIWSFPFQALTWICLLLFASWLIFGLIVRSMYSALLFFILRYHLHQRLPGNLQDLTHGDYAAVMGRTTLQDLREVPSLQDLLGLKSVIVTSEREEEVLRTLDRCTLREGAGSHPLFFGLISQDALLHLTQRGHRAGAYHIIPQDVLEQQLAIYLQKHSHLASHLDHLVMSIRSVGLVHHWAGQMASERYFRSRFLYREKRIRQPDLWAVYILTAGLYLLSLVVFICELLASRRAGL

SEQ ID NO: 38158 - DNA, 4328 bp, DROSOPHILA
tctcaagctcttaccgaaagagcctcctgtgaatgatgtataaaaaccaaaaataggaaacattttataaaaggaattgcataaagtttggctcctttttgcttgatttttccctaaacagcgcagcgtattaaagaggtttgggggggaggggggtgtggaaaagcggttgcgaaatggaaaatgtagatgggggtggcagacgccagttgctggatgggatgtatcgcttcagacgctgactgcgactgcttcgaaaacgacatcgcaggcaatgagcttaagttcaatacatttacttgaatttccaacgaacgacaaggacgaagacgatgtcgttgactagttggctcccaaggatgagtcggaaactttgggggcacagggaaggcaaggaagctaggcaacaacacgcagaactatactttttgtgatacgaatattttatgtgaatttatcaaactgcgcttttagttaacttagtccgagtttttatacatacacatcaagttcacaataggattcgtaaatatttacctttattgaagaaagaaatttttttgcgagtgcataaaaccgaagccgggcaacgttgtgcccattacagacagtttttgtggcgagaaatttcaaaaagctcaaatgtgcgaggcgataagcaaagcagcaagagattgccaaggatggtggccaagtgcggggtcgggttggtcggttcagggggcaatggcagcacttacatgtaaccaaccagtcgatggcgacaacggcagccgcaaatgttgcaaggattgccggcaagaagcacacacaaaattgatgtctatgtgtgcggcgggtggattggggtttcggagttcggtttggtgggttctgctgggcggctgaaggacaactattcggcgaacggggagggggtttcagatcggtgggggttgattcgccagcgcaagttttggttttcaaaatttatcgcttttagataaaacgttttgcgtttttacgatacgagcagcgaacactttggccaactatcctggaagccatccttgcagctgaaggggatgtcctttgtcgtggaaggggaggacagagtggatgtggtagtggcactggctctcgtcgactctgtggattatgaagtaatttaattaaaacgcctggcccgcaaataaatctggcattattaatgtcttcaagcagaaagaatgtgacttttttgaacagggatatcagtattattctcgttaaaacgatacgaatttattaggaacacgttcattttaattgcaacactatttttttgatcttttgtttaaatgttgtgtgttttctttagatattaacgatgtgggcctctattttctaaccaacttagaaatttgcttttttatgtcacttttcattttccttaatattttcctaagttttattctgggtaacagcaattccagaacgaagacaaccaccgctccaagattcgcccagaggattagccaaaagagagcagccagttcccgcattgagagtacattttgtcgaacgggagccacctgctggtcctcctccgactccgatagactcgggtcgccatcgatgccatcgagggtgctataagatgtggaggctatcctggccacactctcgtccttctcatcaacggcactgacatactgccgcgtccagtgctccaaaaatccatgggtatgggcatgttgaatctgcttgtttagcacaccaaccaaatgcgaatgacgccttacatagaaggccaactgctgggtgtagatgcgttcccgaaccaaatgcaatctcctgctcattggatgcactttcctaaagtaaccgaagtactcgtacggcgtaagaatggccacccgggctgatgagccactttgctgggccagagccggaaaggattgcaactcactgccctccagataaaccaattgctcgggcctcaattccggcaaactggccaggattcttgcctcgttgacctcagccaactgaatggtgaaatgctgggccagcacctccgaaatagtttgcggtggattcctttgggtatcctgccttagcagctgatacattcccgactggtagccactcctaaggaccaaggtggcaaacagccaagtgagcaataccaatctactgggaaacctttgtggcacccatcggtcctccagatttccacccattgttaggaccaaaagctcgtagtaaggattccttggcaattcgtggtgatgtcgccagcgcaccagcagcatgaggagcaggcaggccaggatcaggaccaagccaatggctctccacagaagcggagtaaagggaaaggacagcttctcgtaggcggagtaggcactctgcagattggtcaccagcatgatgtggctcatgaagtagtaggtggactgggagtagggaatctcactgccagcgctgggtttgaagtggaatccacctagggagaagtcggcatgatggccaaagatctgaaaattacacaaattgtataacaatacctggatttagatccaagactcacctcatcgaaaattctgcccgactcatcgaaagtggccagcacctcctccttgttcatccaatagagacccacagtgaaatttagattttcagccatgaactgaagcagagcaccctcgatgcccacaaagctgccactgccatcgggacgccaaaccaaatagggcatatcctcccaagtggcgcaggtcaaaagacagccatagaaattccccaacttgctaggaaaataatcttggctagcccaacgttttgtgcccacttggtagcgatttactacattggccgagattacctggcagccgtgtaacgcactgaatggaaagtaactgaccatgaggatatgatcgccaggtggacgcagcactacgcccacgttcagtacacttagtcgccacagaaatcgaagggtcgcctgcatctcctcaccatatgcatccgtgggcatggacatgtatatcagtgtgtgcgacaaatcctgggtggctcgaatccgagcgtagatcgccgaaagagacggaagaccatcgaccagagccaagacagcatggacatatggtttatactccatggactgctggagcaagagcctacgtgcctgcaaattgttaggcacaatcatcagcacctggtcaagcagctcctccaaatggccaccagttgactgggaatttgtgtgggtgtatatgtacaaggtcttgaagcgacccatttccgagttggccaccacttgagccagagcttccgccaagtcccaatccgaactggattccattgtactggccaccaaggagcagcaagaaagtatatataaccagtacttcatggctaaagagttgccaaaggaatgtgttaatgtggccactttggagtactgaagtcttcagatccccggggaaattttggtaatggcccggaccaatcgcgttaatcatatcacattaaagtcgattcccttgggaaactaacttactgttaacgatactgatttataggctggctaaaaagagttgatagcccttactttttttggaaaatgttcttgtttctacatttataatattaatttttattggcaattataataaaagtcaatcatcaacatcatcgtcatcgaaattgaagtaatcgatgtcgttctcatcccggctttttttgctgctgaatcccctaggttcactgctctcgctgggctcttccacatcccggtcatcctcctcatccggttctggttcgggatctttctctaaagaatcgttggtctcgtcctcgaacaggctacgctcagcggctcccaattcgaagacgggttcgtcctcattcttgggcttggtcttagttttcggcttagaaatcttgcccagaaccggaggctgtacctctacacgggtaagattcgtatggtgattcagcatacccttgtacaaatggggaaatctacgctggaaatccatcttgatccgaagaagtctctccaacatgccgggtgtcaggatgccatgctgcgtaccttgacccatgatgtgcgtgtcccttcgatggcgaccgtccctcagataggcatcgtagctcccaccgcccgtgtagagaggatggtgaggatcgtatggcttctggttccacggatcatcgggcctctccaccggcagcagacccataaacggatgcagcaatccctcgccgtaggtgaaaatggaacccacttgggggtcagatgatggtgcgttttcgatttcggtttcggatggtgctgatgatggactggcgatatggac

SEQ ID NO: 38159 - DNA, 2004 bp, DROSOPHILA
atggaatccagttcggattgggacttggcggaagctctggctcaagtggtggccaactcggaaatgggtcgcttcaagaccttgtacatatacacccacacaaattcccagtcaactggtggccatttggaggagctgcttgaccaggtgctgatgattgtgcctaacaatttgcaggcacgtaggctcttgctccagcagtccatggagtataaaccatatgtccatgctgtcttggctctggtcgatggtcttccgtctctttcggcgatctacgctcggattcgagccacccaggatttgtcgcacacactgatatacatgtccatgcccacggatgcatatggtgaggagatgcaggcgacccttcgatttctgtggcgactaagtgtactgaacgtgggcgtagtgctgcgtccacctggcgatcatatcctcatggtcagttactttccattcagtgcgttacacggctgccaggtaatctcggccaatgtagtaaatcgctaccaagtgggcacaaaacgttgggctagccaagattattttcctagcaagttggggaatttctatggctgtcttttgacctgcgccacttgggaggatatgccctatttggtttggcgtcccgatggcagtggcagctttgtgggcatcgagggtgctctgcttcagttcatggctgaaaatctaaatttcactgtgggtctctattggatgaacaaggaggaggtgctggccactttcgatgagtcgggcagaattttcgatgagatctttggccatcatgccgacttctccctaggtggattccacttcaaacccagcgctggcagtgagattccctactcccagtccacctactacttcatgagccacatcatgctggtgaccaatctgcagagtgcctactccgcctacgagaagctgtcctttccctttactccgcttctgtggagagccattggcttggtcctgatcctggcctgcctgctcctcatgctgctggtgcgctggcgacatcaccacgaattgccaaggaatccttactacgagcttttggtcctaacaatgggtggaaatctggaggaccgatgggtgccacaaaggtttcccagtagattggtattgctcacttggctgtttgccaccttggtccttaggagtggctaccagtcgggaatgtatcagctgctaaggcaggatacccaaaggaatccaccgcaaactatttcggaggtgctggcccagcatttcaccattcagttggctgaggtcaacgaggcaagaatcctggccagtttgccggaattgaggcccgagcaattggtttatctggagggcagtgagttgcaatcctttccggctctggcccagcaaagtggctcatcagcccgggtggccattcttacgccgtacgagtacttcggttactttaggaaagtgcatccaatgagcaggagattgcatttggttcgggaacgcatctacacccagcagttggccttctatgtaaggcgtcattcgcatttggttggtgtgctaaacaagcagattcaacatgcccatacccatggatttttggagcactggacgcggcagtatgtcagtgccgttgatgagaaggacgagagtgtggccaggatagcctccacatcttatagcaccctcgatggcatcgatggcgacccgagtctatcggagtcggaggaggaccagcaggtggctcccgttcgacaaaatgtactctcaatgcgggaactggctgctctcttttggctaatcctctgggcgaatcttggagcggtggttgtcttcgttctggaattgctgttacccagaataaaacttaggaaaatattaaggaaaatgaaaaagtcgacgagagccagtgccactaccacatccactctgtcctccccttccacgacaaaggacatccccttcagctgcaaggatggcttccaggatagttggccaaagtgttcgctgctcgtatcgtaa

SEQ ID NO: 38160 - protein, 667 aa, DROSOPHILA
MESSSDWDLAEALAQVVANSEMGRFKTLYIYTHTNSQSTGGHLEELLDQVLMIVPNNLQARRLLLQQSMEYKPYVHAVLALVDGLPSLSAIYARIRATQDLSHTLIYMSMPTDAYGEEMQATLRFLWRLSVLNVGVVLRPPGDHILMVSYFPFSALHGCQVISANVVNRYQVGTKRWASQDYFPSKLGNFYGCLLTCATWEDMPYLVWRPDGSGSFVGIEGALLQFMAENLNFTVGLYWMNKEEVLATFDESGRIFDEIFGHHADFSLGGFHFKPSAGSEIPYSQSTYYFMSHIMLVTNLQSAYSAYEKLSFPFTPLLWRAIGLVLILACLLLMLLVRWRHHHELPRNPYYELLVLTMGGNLEDRWVPQRFPSRLVLLTWLFATLVLRSGYQSGMYQLLRQDTQRNPPQTISEVLAQHFTIQLAEVNEARILASLPELRPEQLVYLEGSELQSFPALAQQSGSSARVAILTPYEYFGYFRKVHPMSRRLHLVRERIYTQQLAFYVRRHSHLVGVLNKQIQHAHTHGFLEHWTRQYVSAVDEKDESVARIASTSYSTLDGIDGDPSLSESEEDQQVAPVRQNVLSMRELAALFWLILWANLGAVVVFVLELLLPRIKLRKILRKMKKSTRASATTTSTLSSPSTTKDIPFSCKDGFQDSWPKCSLLVS

SEQ ID NO: 38161 - DNA, 9142 bp, DROSOPHILA
ctggttagcctgattttcggtttcgtgctgatttgtcttctgaaaattacggctttgccgggattgagaaatctagtgctgggcagacgcaatcgtcttccctttatgggcatgtgggccagtttgcttggcggtctggctttatataatccacaaaggaactttgccagatacattctggtgatgtggctcctgcaaacgctgattctccgggccgcctatacgggtcagttataccttctcctccaggatgttgaaatgcgatcgccaattaagtcccttagcgaggtgctggccaaggactatgagttccgtattctgcccgccttgcggacgatcttcaaggattcgatgcccaccaccaatttccatgcggtgctctcacttgaggagtcactgtaccgactacgtgatgaggatgacccaggtattacagtggctcttctacagcccactgtcaaccagtttgactttcgttcgggaccaaataaaaggcaccttaccgtccttcccgatccactgatgaccgcccccttaaccttttacatgcgaccgcattcctacttcaagaggcgaatcgatcgtctaatcatggccatgatgtcatcaggcatcgttgcccgttatcgaaagatgtatatggaccgaattaaacgagtgtccaagcggcggaacctggaacccaagccattgtccatctggcgactaagtggaatttttgtttgctgtgcagggctatatcttgtggccttaattgtcttcatcctggagatcttgaccacaaatcatcgaagattacgcagggctttcaatgtaattaacagatatgcggcataatatattaatcatattaatttgtttaaatacatttaaggcgtggtaaacaaaaacaatatgtcaataaaaagtaatggcgcgaaacataatagttattttcggcggcttaagtataaatgtttatatttttttccatatacttttcagaataatttaataccactcaaactctttcaaatagccattctaatcccgtccagtggcgtcttcgactcagcaactccagaccaaagaccacaatggaaatacagagtgctcccatcaagcaattaagtgctgccacaacgaagctcatggactcagcaaatccagtggctacactctccgtagaggaatgaattcttttacccggcgtatccgtatccgtggtggtgggcagattgtcccaggcgaggatctgcgaatggtgctggaaaatgccaaagctacgcatgttgaaaagcaatttattgatctcccaggcgaaataggagccatgtggaaagtacatgcaaagcatattgtcgacgatcttttcagccaaaatcaccagctgattgcgatgtttccgatgcctaaccaagtgatcggctaaaaaggcgcgactggtaaaggcgcctgtcttccagggagccttcaagagagcatcaaatacatccaccggctgtcccgcggatattaaagtcttgccctgaaaagacggtatcttcagggtcatccgataggaggcatgatcggtgataaaacggaagccaccactcaaagcttgatccaaagtgcgaggagatggcttcaccggtgagttctgtatgaagttgaatacggatgcctcgtaactggcccgaatgacaaagatccagagcatccaaccggccaaaatgggggatggcattcgccatcgactgcccacaatccaatgaagacccaatatcgtactaagcagcagccaggtgtatttttcgaaagggaacagcataacctcatagatactataaccgcctctggcctgcaacacgattatgtaggacatttggctgtacggactcgtggcctctaaaaaggtggatctttctggtgtacaggcagcacatcctatggttatattggcccttctctcgcgaagcattttgtaggctcccgtaaaggtgccattcataaaactggaaccacctattagtccattcggttcattgggaatcaatttaagcgtaaagttcattttgcgcgccacgatccgcaaaagcagcccatccaatccgtccagtccgtccatcggatcactacttttccaattaattctcatatagggcggtatatcccaaacgataacgctcaatggacacccatgtaggttctttaatcgtctcggaaagacgtcccataaatcgccatcctttatgtcaatttccacgggctccaagctcgaacagctcgtgggtgtgtatggccggacattgaaggcttggactccgtgcaagcggggcaccaggatcaccacgttgatgttgtaacgttcctgcataaaatacgtgaatatcttcgtcattatgggtcgttccggctgggatgtcagcaatacgataacgcagagcccgtttctgttcactccttcggcaatggcactgaaatggaaatcaaatctaaattcaattattatgtaatatgtactttagaatattttatgcctatgtaataatacattgcaacttacatggcctgttcagcattctggacgaaaagcaactgcgtgaagacttgggcggttatctttcggttcatcttggaggccaggacaacggccactgggaaattcggtggatatagatttcgatttaggacttgatgcaccagaatcacccgatccctgtccatttcctcgtaggaggtgctgataaaaacaccaaaattataaaccgcaagcccattgatgaaaatcttttgcagagtagcggaaatctggctagccagttgctcctccaaaagatgttggtggggccacacaaccgcttgcactttacaaagacccaggagcagtgccacaacgcaacgaatgtccatggcgaatgtgaaacatttggcaacatttttgcgaatttatttgattgagttctcgccatccaagggactagatttgttttgttcagggattttggggctgcactatcaatttggaaaaatctgcaatgcatacagtagtatacagtatgtttcattagtgtataacacacaaagaaattataaatgtactttctaattcccttgcattgatgtgtaaataaggtagccattattttagcctttttaatttaacttaaaacgatagtttcatgccagttacttaaatttcccgagcgattcaaattaattctagtaacgtgcctgtaacggtaatgcattaacaaatctgtgttcatcacttaaactaattgctgcgtacgggcgagcaacccatggccaccacccaaacgccccaccattccgggccagccaggaatctagccaaccagcaccaacccacccaactgaaccgttccggaggcatgtgcgtgacaggtttcgggtgtcagtattatgcatgaggcgcataaccataaattaacaccatcagcggcacagacacacacacacacacctgtgggtggagtgggtggagtgggtcggcgggtagctgctagttgggtgtgtggatactgccggtaacaccccgtcagtgtcaggttcatgcgagcaccatgtcggccgtaagaggtttacaaatagctggataatgtcctgacctctatagagaccacacgcctgccacagtcacccacacttggaaatataatttagctgtatctaagaaattcgcaaataattaaattatacaatattttaattacattaaaaaaaaataaataattgaaagtaaatcgttttataacttcgcttgtaataaaataacttgaattctgatatagataaagctacttattcacttctacgaaatatagctagctaaatttatctttaagtacaaaactacgtaaaaagtttccttaaatagatggatcgcattgacacaagttccaagataaagacaagcaggccaacgatcaggccaaccaggaccattaaaaagatggcatatagctccatagtgccgaggacttggaagctctgctcgttgcgcaaatagctctcggacaattcccacctggaccaaacggagagcaaacccactgatctcatccacataatctcctcgttgagctggtcgatgagaaaggagtgcttggccaggtacatcgtcaactgcatgctgatgatatcctccggaacgatctcgaagtgagctcccgatccctgctcgcccctctgatgcactttatccgcactcaagcgattgaaatggatgaaaatgtccagagcggaggcagtgacatgctgccgtagctgatgattagcctccagaaagtacaagggatccagctcggagtttgcctccagcaggcggaatctcatgtgctgcacactgggaatctcgtccagcacctcctgcacaatgggtgtcagcaccacggtgaagttcttttgcaccagtgattcaatggtctgtggccaacgatttagctgatgcgttcgtatcaaatggtacagtaatccctgatagattgtccgaatgatcaaggtgtacatcatcagcatgacacaataaagacgagcggtgtgcgatctgggacactccaacagcggcatgcccacaaagactagctccagattaagccagaaccgcgatcccatgcgctcgcgcaacatcctgccaacgatcaattggataagagcggacaaggccaccactccgaggattcccatccagatctgtaggcggtacgggtagaagaggatgtcgaaggagctcagttcatagctggaggcaaggactccaaaaacctcgcgggtctggtgatagttgtgcgacgaggtggccaccatgcccctggccaccgtctggcggatcccgcccagagtcaagtccacctcgtctcgtcgcaactggaatatgtgaaatgtgaaaaatatgttccttggaaaatgaaaggactcaccatttccaaagcctcgtccctcatattgacatgcacctttcgcacagcaattgtgaaattcattttttcggctagcgccaggagcaaccgaccctcgtagccaccgttgacccgcagtacctcttcctggtcctcatccaatgtaaggaagggaggaacatcccaaagggcacatcttaggggacacccaaagaaatttctcaacttgcgagggaataaatccggttcgaccagcatactgccattatagcgattgattagctgcggttccatatccgaacagccatgctctccaaagggatagtagctatagaataggatatccccgttggacttttgcacctggatgctgcaatggattagccgatagcgccagcagtagtcgaagatcagccgcatctcgccctgcagcagacgatctctggcctgcaggaatatgaaatagtgctcattgtagttgtactctctggaatagtactccatccggatttcctcgaaggcggcaaatgagtcggtgaaaatgacattgaagtgacgacgacccggaaccggatgccatggaacaccacgcagcacattgacgatttgcaggggggccaagccccattcccggaacaaagtgctcatcatcttgttgtagaaattgcacgtgtgattgctccggcaacacagggtcaaaaccaacgatggggtcacactcaggatgtagtggtgcactacgtgaagcactgcccgggccacgaactcgttgatgtggttcatttgctccccggacaaatcgtagtacgagttgagcagtgcgctgatgttcatcccgccgggacatgaggtggctcaatgaaggatatccatatcctgaccagaatattgcctccgaatcatattagaagttttgtgtaactttcaagctaattgcccggaaaagtttcatgattaatggttgtttcacttacacacaaaaattgggtcaaaaccactgacaaaaaaaaaaaactaatcatgtgaaaagaatgcaatgcaaaatgcttcttttttcagaagaaagatttcattaaaatacccgtacattttaaaatattaaatatcttaattaatccgctaatctgtttgttatgtatacatatgctaacacaaattaaatactaactaaatatcttatttcaataaatacattacagatacagagcttctagttcctctgccgaagtaatacctctcctgcgaacaggagaccagctagaagatacagacccgccatgaccatgtagatcccggatagcttggcatggttaatgtaccgccggctggtcatgtgcacctgctcctttcgatggacggatgcaaaggatgcgcgtcgccaggcgtgaataaatccgctggcatccagccgccgaatatcatcgtccatcttctcgtatagaaacgagtgtttgggcatatacattccagcgtattccacattcacgggctgcttgaccacgtgaaacgcattgggatgtgcggaggagtgtagaaaggatagggtgacatcctgattggcaacggcgaatatttttcgattcctattccgtgtcaatacatttaaaacatcccaatcgaaaggtgtgtccacggattgtatactatccggatcgcgagccaactgtggcatctcaagcagcaatcgctgggtattcgcagtgcaaataccctggaatccctccgccagcagttgatccagggaaaacgatggagtattgtacagttgcaggcggatcaagtgaaagagcagggactgataggatatcctcaggggtatactggcccacagccagtgggcggcaatgaagcgatgcctccaggagcgcggcagtcgagccaaggcggcgcccaaaagcagggccaccacctgcaatcccccgccaccatcttcttcattccccctccttgcagatggcagatggatgcccaggtgaatcagcaatgccaggagcagaagcatccaaacggagagctcaaagggaaataccaacagtgcaagcgaacctatacgatagcgctccaactggagaacggccaccagattggccgagtagtacgacatgggggtggtgagcagttgattccggcgcgccgttttgcgaaagtaacccatgctgatgttgacatttcgttgcaggagctggaatgaaatcgatttgaaaatccaaaactcagcaataataattgctcaccttttctatgggtccctcgctggagccctccgccaggcgataagcgtttggacgcagcagcgcaatattaaccaactccaggctgaagttcatccgacgagccaggtgctccaccagctggatctcgaagccactgccacggctgcgattgtgcttcggatcccagaccaactctacgaagggcggctgatgccaggtgagcacagtcagtggacagccgtgcatctggctgagtttgtcgggaaacatctgggacgctttccatttgcgaccatcaaaagtattcactggaatgggataagccttctggcaggcgtccgctgtgtagggataataggtatagaccaacacctccacctgggcggtctggatcatcacgttgcagtgcagccaaaagtgagccaagcagtgatccaggatcaattgaagctccttgggaataagatggtctcgcgcttgcaagaagatgaagtagtagtccggatcatcgaaattcgcattgctggccgtgatgttggtgtccctaaagagaaagattaagactggcgaagattatagttgacttagttaacttacagcaaaccctgataggagtccaccatcaacaggctgacgcgtttcctgcccggcaccggattgaccaccagatccggacgaatgcgtagcagctgcaccgccaccattcgccacgaatccattaggatgttcatcatatactcaaaccaatgggcggtgcccaggtgacgcgtggaaatggtcaccaccagggtggtgctcagctgggccagcacattctcgatgaccagacgtagtgcccgggccacatacagattggcgtcctccccctgcatatcgatcctcgaattctccaggtagcttttatagatcgaataaccggaaccggaacttaagcttgaacccgcattggaatcggaggtggtattcatggcgccaacttttatgctcgactgcaaggacatgatttcaattgaaacctggactgggttatttggattcacgttcattcatggtctgatctttatcgagattgtactaattaaaggcaaataaatggaaaattaaatctggcgaaggatattaaaacaatcaaatgcaatcaaaacaatcattcgtttattcgtacatcgcgtataattgaattaatttttatatcaaatttaatgtcttgtgaaaatataaaagttcagtgtacgttatataattagagcgttagctaaagaaagaatttcgagttaacagattacatcaatcaatgaagcaatgcccaccaccttgtaaacggagcatacctgccgacccataagcatatacgattatggacatcagttagggtcgagtcataaccaccaccttttataggccatataaatttagatatttacgattgaccagctgatggacaaaatccccgcctaattgtccaacttggtgcgtgtcccacaatagtcttatttgacttggcaactaatgagatgcaaatagagaccggatagaaatggaattcgccgcgtgtacttgtcaatttcggcagtattcttcccggatttcgatagacggacatgaacgtgaccagcctgctgaatttcgagtcgatgaagtacatcggcgcccagacgcaagcggcgtcaataaatcatcacgtggcccaggcccttcgtgtcttcatcgaggacttctatcagcggatcgctcccgcctttattgtggtcctctcctgccggcgacccagtcccatgaacttctaccgcaacattatgcagctgctctacgagagcgtggacacgatgatcgttcagctagtcctggtcgagctcggtcgtccgcgtcggatcgccggtcccaggactcacaatctactgctggtggattcgctggatgcactgctgtaagatattaaagtgattagcaacttctttcgagggctaaccacttaaatgtaatatcctgcagatttcgatagattttcagtcgtaacttggtcaaaataagccacataaacgaaat

SEQ ID NO: 38162 - DNA, 5304 bp, DROSOPHILA
atgaacgtgaatccaaataacccagtccaggtttcaattgaaatcatgtccttgcagtcgagcataaaagttggcgccatgaataccacctccgattccaatgcgggttcaagcttaagttccggttccggttattcgatctataaaagctacctggagaattcgaggatcgatatgcagggggaggacgccaatctgtatgtggcccgggcactacgtctggtcatcgagaatgtgctggcccagctgagcaccaccctggtggtgaccatttccacgcgtcacctgggcaccgcccattggtttgagtatatgatgaacatcctaatggattcgtggcgaatggtggcggtgcagctgctacgcattcgtccggatctggtggtcaatccggtgccgggcaggaaacgcgtcagcctgttgatggtggactcctatcagggtttgctggacaccaacatcacggccagcaatgcgaatttcgatgatccggactactacttcatcttcttgcaagcgcgagaccatcttattcccaaggagcttcaattgatcctggatcactgcttggctcacttttggctgcactgcaacgtgatgatccagaccgcccaggtggaggtgttggtctatacctattatccctacacagcggacgcctgccagaaggcttatcccattccagtgaatacttttgatggtcgcaaatggaaagcgtcccagatgtttcccgacaaactcagccagatgcacggctgtccactgactgtgctcacctggcatcagccgcccttcgtagagttggtctgggatccgaagcacaatcgcagccgtggcagtggcttcgagatccagctggtggagcacctggctcgtcggatgaacttcagcctggagttggttaatattgcgctgctgcgtccaaacgcttatcgcctggcggagggctccagcgagggacccatagaaaagctcctgcaacgaaatgtcaacatcagcatgggttactttcgcaaaacggcgcgccggaatcaactgctcaccacccccatgtcgtactactcggccaatctggtggccgttctccagttggagcgctatcgtataggttcgcttgcactgttggtatttccctttgagctctccgtttggatgcttctgctcctggcattgctgattcacctgggcatccatctgccatctgcaaggagggggaatgaagaagatggtggcgggggattgcaggtggtggccctgcttttgggcgccgccttggctcgactgccgcgctcctggaggcatcgcttcattgccgcccactggctgtgggccagtatacccctgaggatatcctatcagtccctgctctttcacttgatccgcctgcaactgtacaatactccatcgttttccctggatcaactgctggcggagggattccagggtatttgcactgcgaatacccagcgattgctgcttgagatgccacagttggctcgcgatccggatagtatacaatccgtggacacacctttcgattgggatgttttaaatgtattgacacggaataggaatcgaaaaatattcgccgttgccaatcaggatgtcaccctatcctttctacactcctccgcacatcccaatgcgtttcacgtggtcaagcagcccgtgaatgtggaatacgctggaatgtatatgcccaaacactcgtttctatacgagaagatggacgatgatattcggcggctggatgccagcggatttattcacgcctggcgacgcgcatcctttgcatccgtccatcgaaaggagcaggtgcacatgaccagccggcggtacattaaccatgccaagctatccgggatctacatggtcatggcggccacctcatgtcccggcgggatgaacatcagcgcactgctcaactcgtactacgatttgtccggggagcaaatgaaccacatcaacgagttcgtggcccgggcagtgcttcacgtagtgcaccactacatcctgagtgtgaccccatcgttggttttgaccctgtgttgccggagcaatcacacgtgcaatttctacaacaagatgatgagcactttgttccgggaatggggcttggcccccctgcaaatcgtcaatgtgctgcgtggtgttccatggcatccggttccgggtcgtcgtcacttcaatgtcattttcaccgactcatttgccgccttcgaggaaatccggatggagtactattccagagagtacaactacaatgagcactatttcatattcctgcaggccagagatcgtctgctgcagggcgagatgcggctgatcttcgactactgctggcgctatcggctaatccattgcagcatccaggtgcaaaagtccaacggggatatcctattctatagctactatccctttggagagcatggctgttcggatatggaaccgcagctaatcaatcgctataatggcagtatgctggtcgaaccggatttattccctcgcaagttgagaaatttctttgggtgtcccctaagatgtgccctttgggatgttcctcccttccttacattggatgaggaccaggaagaggtactgcgggtcaacggtggctacgagggtcggttgctcctggcgctagccgaaaaaatgaatttcacaattgctgtgcgaaaggtgcatgtcaatatgagggacgaggctttggaaatgttgcgacgagacgaggtggacttgactctgggcgggatccgccagacggtggccaggggcatggtggccacctcgtcgcacaactatcaccagacccgcgaggtttttggagtccttgcctccagctatgaactgagctccttcgacatcctcttctacccgtaccgcctacagatctggatgggaatcctcggagtggtggccttgtccgctcttatccaattgatcgttggcaggatgttgcgcgagcgcatgggatcgcggttctggcttaatctggagctagtctttgtgggcatgccgctgttggagtgtcccagatcgcacaccgctcgtctttattgtgtcatgctgatgatgtacaccttgatcattcggacaatctatcagggattactgtaccatttgatacgaacgcatcagctaaatcgttggccacagaccattgaatcactggtgcaaaagaacttcaccgtggtgctgacacccattgtgcaggaggtgctggacgagattcccagtgtgcagcacatgagattccgcctgctggaggcaaactccgagctggatcccttgtactttctggaggctaatcatcagctacggcagcatgtcactgcctccgctctggacattttcatccatttcaatcgcttgagtgcggataaagtgcatcagaggggcgagcagggatcgggagctcacttcgagatcgttccggaggatatcatcagcatgcagttgacgatgtacctggccaagcactcctttctcatcgaccagctcaacgaggagattatgtggatgagatcagtgggtttgctctccgtttggtccaggtgggaattgtccgagagctatttgcgcaacgagcagagcttccaagtcctcggcactatggagctatatgccatctttttaatggtcctggttggcctgatcgttggcctgcttgtctttatcttggaacttgtcacctcctacgaggaaatggacagggatcgggtgattctggtgcatcaagtcctaaatcgaaatctatatccaccgaatttcccagtggccgttgtcctggcctccaagatgaaccgaaagataaccgcccaagtcttcacgcagttgcttttcgtccagaatgctgaacaggccattgccattgccgaaggagtgaacagaaacgggctctgcgttatcgtattgctgacatcccagccggaacgacccataatgacgaagatattcacgtattttatgcaggaacgttacaacatcaacgtggtgatcctggtgccccgcttgcacggagtccaagccttcaatgtccggccatacacacccacgagctgttcgagcttggagcccgtggaaattgacataaaggatggcgatttatgggacgtctttccgagacgattaaagaacctacatgggtgtccattgagcgttatcgtttgggatataccgccctatatgagaattaattggaaaagtagtgatccgatggacggactggacggattggatgggctgcttttgcggatcgtggcgcgcaaaatgaactttacgcttaaattgattcccaatgaaccgaatggactaataggtggttccagttttatgaatggcacctttacgggagcctacaaaatgcttcgcgagagaagggccaatataaccataggatgtgctgcctgtacaccagaaagatccacctttttagaggccacgagtccgtacagccaaatgtcctacataatcgtgttgcaggccagaggcggttatagtatctatgaggttatgctgttccctttcgaaaaatacacctggctgctgcttagtacgatattgggtcttcattggattgtgggcagtcgatggcgaatgccatcccccattttggccggttggatgctctggatctttgtcattcgggccagttacgaggcatccgtattcaacttcatacagaactcaccggtgaagccatctcctcgcactttggatcaagctttgagtggtggcttccgttttatcaccgatcatgcctcctatcggatgaccctgaagataccgtcttttcagggcaagactttaatatccgcgggacagccggtggatgtatttgatgctctcttgaaggctccctggaagacaggcgcctttaccagtcgcgcctttttagccgatcacttggttaggcatcggaaacatcgcaatcagctggtgattttggctgaaaagatcgtcgacaatatgctttgcatgtactttccacatggctcctatttcgcctgggagatcaataaattgcttttcaacatgcgtagctttggcattttccagcaccattcgcagatcctcgcctgggacaatctgcccaccaccacggatacggatacgccgggtaaaagaattcattcctctacggagagtgtagccactggatttgctgagtccatgagcttcgttgtggcagcacttaattgcttgatgggagcactctgtatttccattgtggtctttggtctggagttgctgagtcgaagacgccactggacgggattagaatggctatttgaaagagtttga

SEQ ID NO: 38163 - protein, 1767 aa, DROSOPHILA
MNVNPNNPVQVSIEIMSLQSSIKVGAMNTTSDSNAGSSLSSGSGYSIYKSYLENSRIDMQGEDANLYVARALRLVIENVLAQLSTTLVVTISTRHLGTAHWFEYMMNILMDSWRMVAVQLLRIRPDLVVNPVPGRKRVSLLMVDSYQGLLDTNITASNANFDDPDYYFIFLQARDHLIPKELQLILDHCLAHFWLHCNVMIQTAQVEVLVYTYYPYTADACQKAYPIPVNTFDGRKWKASQMFPDKLSQMHGCPLTVLTWHQPPFVELVWDPKHNRSRGSGFEIQLVEHLARRMNFSLELVNIALLRPNAYRLAEGSSEGPIEKLLQRNVNISMGYFRKTARRNQLLTTPMSYYSANLVAVLQLERYRIGSLALLVFPFELSVWMLLLLALLIHLGIHLPSARRGNEEDGGGGLQVVALLLGAALARLPRSWRHRFIAAHWLWASIPLRISYQSLLFHLIRLQLYNTPSFSLDQLLAEGFQGICTANTQRLLLEMPQLARDPDSIQSVDTPFDWDVLNVLTRNRNRKIFAVANQDVTLSFLHSSAHPNAFHVVKQPVNVEYAGMYMPKHSFLYEKMDDDIRRLDASGFIHAWRRASFASVHRKEQVHMTSRRYINHAKLSGIYMVMAATSCPGGMNISALLNSYYDLSGEQMNHINEFVARAVLHVVHHYILSVTPSLVLTLCCRSNHTCNFYNKMMSTLFREWGLAPLQIVNVLRGVPWHPVPGRRHFNVIFTDSFAAFEEIRMEYYSREYNYNEHYFIFLQARDRLLQGEMRLIFDYCWRYRLIHCSIQVQKSNGDILFYSYYPFGEHGCSDMEPQLINRYNGSMLVEPDLFPRKLRNFFGCPLRCALWDVPPFLTLDEDQEEVLRVNGGYEGRLLLALAEKMNFTIAVRKVHVNMRDEALEMLRRDEVDLTLGGIRQTVARGMVATSSHNYHQTREVFGVLASSYELSSFDILFYPYRLQIWMGILGVVALSALIQLIVGRMLRERMGSRFWLNLELVFVGMPLLECPRSHTARLYCVMLMMYTLIIRTIYQGLLYHLIRTHQLNRWPQTIESLVQKNFTVVLTPIVQEVLDEIPSVQHMRFRLLEANSELDPLYFLEANHQLRQHVTASALDIFIHFNRLSADKVHQRGEQGSGAHFEIVPEDIISMQLTMYLAKHSFLIDQLNEEIMWMRSVGLLSVWSRWELSESYLRNEQSFQVLGTMELYAIFLMVLVGLIVGLLVFILELVTSYEEMDRDRVILVHQVLNRNLYPPNFPVAVVLASKMNRKITAQVFTQLLFVQNAEQAIAIAEGVNRNGLCVIVLLTSQPERPIMTKIFTYFMQERYNINVVILVPRLHGVQAFNVRPYTPTSCSSLEPVEIDIKDGDLWDVFPRRLKNLHGCPLSVIVWDIPPYMRINWKSSDPMDGLDGLDGLLLRIVARKMNFTLKLIPNEPNGLIGGSSFMNGTFTGAYKMLRERRANITIGCAACTPERSTFLEATSPYSQMSYIIVLQARGGYSIYEVMLFPFEKYTWLLLSTILGLHWIVGSRWRMPSPILAGWMLWIFVIRASYEASVFNFIQNSPVKPSPRTLDQALSGGFRFITDHASYRMTLKIPSFQGKTLISAGQPVDVFDALLKAPWKTGAFTSRAFLADHLVRHRKHRNQLVILAEKIVDNMLCMYFPHGSYFAWEINKLLFNMRSFGIFQHHSQILAWDNLPTTTDTDTPGKRIHSSTESVATGFAESMSFVVAALNCLMGALCISIVVFGLELLSRRRHWTGLEWLFERV

SEQ ID NO: 38164 - DNA, 3616 bp, DROSOPHILA
agtaccagtatcattccctgtacaaatgcagacttacaatccatatgaattcagttcttgttgattcgttcgtccatcacttcctgtagccagatttgtttgttatgtgtatatgtctgtacataggtcagtattaagcgttgtaccaaatcgttgtttatatactcgtatagtaaattgtgacactcagtttggattgattttaattatagtttagtagcagatattgagcccaaagttgcgtctgcagctggcgttgagtcggtgcttgtgattcccatgccgcgccagctgtagatccatcctccccccaaaaatattatagaaacacaacaggtgagattagtttgaggcaagctaatgggcgtccagaacagtgcgttccatggccataaagcaacttccgtattgacacacattgtattctttttcgaatttgtattaaaatgattcaattgttgcacatcgataaccatcaattaaaaattgtatttgaaatttcctaattgaccaaaattggtaatggtatcaaataatcttaaagactaagcgttgattgaggctgtcttaaaaaacagaacgtttgataacacaataaaacagtcgcaagtcaggactttaaagaagcattaatccttaagcatttgtggttatccaaatgcattttgataccatgttaaaacacacaactcgaaattacaacatttagaattgacccaaaatcagttttgtggacctgaaacgccccgtagacacccacccaccaccaccacgacccaaagacaccggcaccttctgtaacactaggcaaaatgacacttagatgattcatccccaatgagccaaacgtatcccacttaggacccacattaagagtttcgaggcgctttcaatctatttatgtattgcagttgtacacttttatgtgaaaatgcgaaataaagatcgctatttatgtagatggttcaccagtattttgatgggaccaccccacatacacttagaaaacgaccatatttgcgacaagcttttccaggggaatggcttgcatgtcgacgaccacaatgacgagatgattgcgcactcccaccggctttttgatcatcaatcttacctcgaagtatttcagcagaaagcgccactttagctcgcttttctcgcgctccgccagtcgctcgaagtcttcagcccgaagtcccaggatacgttctgccggatgtccagctaaccgggcttcgacgagagtgccggtctggtcggacaaatgaatgttgatattgaagtagctaatggatcgtggttcatcattgtccaatgaaaaatactgctggcaggcgtccgaggcgcaatcttgcaggttccgtggtatatgttgttgacaggcaatgctgtaaaataaaagggcttttaagaatatgtcttgtaaactatgtaacggatagtgggaagcgtttcggcggttaggaagggatgggggatgtacaacacccaccacttcctgttgacgtgggaggtcaatccatccaagtcgaacttggtgaccatcccatacagcactgcagtaaactgatgtatggacggatcctgcagttcgccctcggcgcgtgaatatatctgtcttaccgtcatctgcgcctgaatgctggcaactgaaagagttatagtaaataataatactgcattaattatcctttactcacctgcaggcatgttgtccagctctgcctggtcacagccactaaaagttgttagaggcacagtggcggcgaaagctagcaagagacggcaatcatctccagccgcctgaggattttcgcaaataagtgtgcaattggaatgggagaggacgagagaacgatgaaagttcgagtaggaaacacgcacgtcgatcaaatgaaggacagtgcgacgtggctgccattgctgggcacgttgtatccagtcgggttgccaaacggagagcagcataccttccggatagctggcatcgatcacgattacttccaagcactgtagcagctcctggacctcacttagtggcccctgcagctttcgctttatctgacgcactggacgcactgcagccactactaccagtagattcacattggtggtgattatcttatcgggaaatcccaagccggaacgcacatccgccagcttaaggaccgcaccaagtggccttatgggctgatggagtaactgctggagaattgttatttggccaaagtcgtcattgtcgtggcgcaccacatagccggatccctcgttgaccaccagggcgcaggagaccgtcgcttggggctgataacgctgttctcccggagcagcaaacggtatggacatcactttagcgcccacaatgtctaccacatggccgatctgcagcatggccgcgtactcatccacacagtcccgctggccccagcacttgcaattggtcaggtgattgggggaatctcggatggtcaagctgagaacccctcgttcggtgccactcatcttgtcatagaagatgttcggcgaggatttggagacaatcagggcaacggtggagaaacgggtcattgtgggacgcatctctgccaaccgctggaacttaatacgccttgccattgaaattatttaagaaatcgcgaccagtcagattgcagtgcttaagaaaaccgttacattgccgttaccgccgattagtagttatcgatgtttgtagtgatggtacaccacaaatggccgtagattcagttagtaacagaaagtattgctaacaacttagtttgataaaaaccacaattaaaacatttacagaaagttgcgcttattaattgtaaccattggaatcgataataatcggatggcatccgaataccagacgtaccatccctaataagctgacacacactacgcatatgtgcacccgcgcacacacacacgcacacacagaggggaacggcacagatttactgcgttaaacaaactcacttgtcgcacttttccacgaatgccagtgcgctgaaagtgaaacccatccgccggagcatagtaggattagccaggacaaccgttcagctcagtgccccagaagcatttaattggaggagcaacagtcgagcaacccgcgacccgcagacccagtcttggcagcccacagccactcaaaatggtcaaactattcgcgttgagcatctttcacaagggcgccagcgaggcgcgtctcctgaagaccgcctcggacctgcagtccttctcctttttccaacgtggcaccgtcaacgagttcatgacgtgagtatgcatgtggatgccaaagaacggcgcaggctcaaagagtcatcaatgacgaacacccccctaaacaactcctcctcttgcagtttcgcttcgaagacgattgtggagcgcacacagccggccctgcggcaatcggtgaaacaggatgcctacatgtgtcatgtctatgtgcgggcggacaatctggccggtgtactgatcgccgatcatgagtatccgcatcgcgtggcgcacacgcttatcacaaagattctggatgactttacggccaaggtgtcggccgatcagtggcccaatggcacggaggccactatctcatttgact

SEQ ID NO: 38165 - DNA, 1461 bp, DROSOPHILA
atggcaaggcgtattaagttccagcggttggcagagatgcgtcccacaatgacccgtttctccaccgttgccctgattgtctccaaatcctcgccgaacatcttctatgacaagatgagtggcaccgaacgaggggttctcagcttgaccatccgagattcccccaatcacctgaccaattgcaagtgctggggccagcgggactgtgtggatgagtacgcggccatgctgcagatcggccatgtggtagacattgtgggcgctaaagtgatgtccataccgtttgctgctccgggagaacagcgttatcagccccaagcgacggtctcctgcgccctggtggtcaacgagggatccggctatgtggtgcgccacgacaatgacgactttggccaaataacaattctccagcagttactccatcagcccataaggccacttggtgcggtccttaagctggcggatgtgcgttccggcttgggatttcccgataagataatcaccaccaatgtgaatctactggtagtagtggctgcagtgcgtccagtgcgtcagataaagcgaaagctgcaggggccactaagtgaggtccaggagctgctacagtgcttggaagtaatcgtgatcgatgccagctatccggaaggtatgctgctctccgtttggcaacccgactggatacaacgtgcccagcaatggcagccacgtcgcactgtccttcatttgatcgacgtgcgtgtttcctactcgaactttcatcgttctctcgtcctctcccattccaattgcacacttatttgcgaaaatcctcaggcggctggagatgattgccgtctcttgctagctttcgccgccactgtgcctctaacaacttttagtggctgtgaccaggcagagctggacaacatgcctgcagttgccagcattcaggcgcagatgacggtaagacagatatattcacgcgccgagggcgaactgcaggatccgtccatacatcagtttactgcagtgctgtatgggatggtcaccaagttcgacttggatggattgacctcccacgtcaacaggaagtgcattgcctgtcaacaacatataccacggaacctgcaagattgcgcctcggacgcctgccagcagtatttttcattggacaatgatgaaccacgatccattagctacttcaatatcaacattcatttgtccgaccagaccggcactctcgtcgaagcccggttagctggacatccggcagaacgtatcctgggacttcgggctgaagacttcgagcgactggcggagcgcgagaaaagcgagctaaagtggcgctttctgctgaaatacttcgaggtaagattgatgatcaaaaagccggtgggagtgcgcaatcatctcgtcattgtggtcgtcgacatgcaagccattcccctggaaaagcttgtcgcaaatatggtcgttttctaa

SEQ ID NO: 38166 - protein, 486 aa, DROSOPHILA
MARRIKFQRLAEMRPTMTRFSTVALIVSKSSPNIFYDKMSGTERGVLSLTIRDSPNHLTNCKCWGQRDCVDEYAAMLQIGHVVDIVGAKVMSIPFAAPGEQRYQPQATVSCALVVNEGSGYVVRHDNDDFGQITILQQLLHQPIRPLGAVLKLADVRSGLGFPDKIITTNVNLLVVVAAVRPVRQIKRKLQGPLSEVQELLQCLEVIVIDASYPEGMLLSVWQPDWIQRAQQWQPRRTVLHLIDVRVSYSNFHRSLVLSHSNCTLICENPQAAGDDCRLLLAFAATVPLTTFSGCDQAELDNMPAVASIQAQMTVRQIYSRAEGELQDPSIHQFTAVLYGMVTKFDLDGLTSHVNRKCIACQQHIPRNLQDCASDACQQYFSLDNDEPRSISYFNINIHLSDQTGTLVEARLAGHPAERILGLRAEDFERLAEREKSELKWRFLLKYFEVRLMIKKPVGVRNHLVIVVVDMQAIPLEKLVANMVVF

SEQ ID NO: 38167 - DNA, 2546 bp, DROSOPHILA
gcatctcatacacgaatgcgtcctctccttccggattgtcgtacatgtccaggaaactatcgatcatcgacgccaggctgatattcatgctgcgcagaccgacgaacagcggcggcattgggccctcatgttccgtcctaatcagatcaacgggatagcaatcacgtggaagtacacccggcccaaaaaccccaccggcttcgaagcccatgggcaacataaccgtgggcataaagacgatcttatctatcggagcgttatccgggaaaagggaagccggcaaatcgaagcagggcgcctggaagccctcaaaatattcggctgactgctgatcgtgcttatggacatcgggatacaggcgggccatcacaattctgttggggctcttgaagaacatcttcggcatgaccagattgaacagatagggcaagtaatcggccttcttcaactctgtcacctggttttcgtcgcgattcgcggaagccacttgcaccatttcggccctcggtatgcctgcaatgccaattgaatttgaacgtttagaggcatgaataacttattaattattattattttttttttgatttgacagttgagattatcaaacgaagaaaaaagcaaagaaaaacaggctattttgtgttcttacctcccttttttccccgtttagccattttgattttccttattggtccacaacactaagaagcacttaaattaacaaagtatcaaattaaaagttcacaaaagttcgaagtcagccggtcagcaattcagagtttctattattcagagttctgcaaacgtgaaaactcacttcaatactgaaagttcgcctccgtttttagtgaggttaacttgacagttgccccaacaccaatacaaatgcctacacggatccctggactatggctatcaaaattatagaattgccacctttttggttagtagaaaatattacaaaaaaaaaatattgaaattggaaaaaaaattcaacaaaatggacgttgcaacaacactttggcgcttgcagcaggcgcatcagcggcaacttaacgagtgggacaggattggtagacgcctcaagcggctgacgggcaagaggtccagcgacttgctcatccacgatccgctcctgcagccaccgttcgtcgcccatcctggccaacggatgagcggtggtggtcagcagacgccgatgccgttgccaatggccaggaagcagacaacgcagatcagacgcaatcatccgaataaatcggttaaattcaaagcatccaataataacaccttggatctacttgtcgtgggtcaacagctgcaaatgcatcgtccacctggacgacggcatgtgcagctccacagtcccatgtcctctcagccccgccagcatatcgaagagtatgtctatttctatccggtccactaccatgagacggaccactggccaccacacggccagccggaaccaaatcttgtggtggatgcacgatttgtggccgagctactggatgagctgctgctgcctgcaggcaatcgtatttgatttgtgcttcgttcaaataaaaaagaaacattgcgaaaaaaatttgaatttttcaacggtcttgttttttctcatacctttcgtaaaaacgaaatatgatttcatttcatattttaaaattaacaattgaacatacataaaaagagcaaaatctgtttgtactccctttttaaatttatttgtttgcatttacaaaaaaaatccgaccattaaacaaaagatttgttgcctaaaataatagagagactacacgagtgtgcggcaattttggggctaaattttgtgttgagggggattcattgcgaaggagtctcaatttcggtactacaatatcggttgcttcagtaaaaatatataactatatgtatatacaaagtttgtggacttcttgtgccttccattacaatgtgtgtggattggttaggtgaatgagagggatgggatgcaggattgtgggttaatcgtttcatacgctaagctaagcctaagtcttggttgctataaaacctataggttaacaattttccttgtcattgctatattttacttcgtttcgttggagatttgatgattgagtagttgcggttgctttcttggtgaagtggggggggcgggcggttaccttgtgccgttgggcgtctggcaagcgaaaggcacctcgtcctcggcttgttaatgcttcttgttgagtatatagccacgcttcgaatttgcattgtatttgtaattgttttgtttgtccatatatagctagtttttggtttcgttattcgggctacttctgttctctttgttctcctccttgtctttatccaccagctgctcagccgtagctccctgatcctgttgctcctgctggagttcctgctcctgaccggtttgtgtttttgtggcttcagtggctccgctgccagtctcatccttgtgcttcacaccccaatgccaattagacatatgtctagcctcttccttgccgcgcatgtccgacctgctgttactc

SEQ ID NO: 38168 - DNA, 546 bp, DROSOPHILA
atggacgttgcaacaacactttggcgcttgcagcaggcgcatcagcggcaacttaacgagtgggacaggattggtagacgcctcaagcggctgacgggcaagaggtccagcgacttgctcatccacgatccgctcctgcagccaccgttcgtcgcccatcctggccaacggatgagcggtggtggtcagcagacgccgatgccgttgccaatggccaggaagcagacaacgcagatcagacgcaatcatccgaataaatcggttaaattcaaagcatccaataataacaccttggatctacttgtcgtgggtcaacagctgcaaatgcatcgtccacctggacgacggcatgtgcagctccacagtcccatgtcctctcagccccgccagcatatcgaagagtatgtctatttctatccggtccactaccatgagacggaccactggccaccacacggccagccggaaccaaatcttgtggtggatgcacgatttgtggccgagctactggatgagctgctgctgcctgcaggcaatcgtatttga

SEQ ID NO: 38169 - protein, 181 aa, DROSOPHILA
MDVATTLWRLQQAHQRQLNEWDRIGRRLKRLTGKRSSDLLIHDPLLQPPFVAHPGQRMSGGGQQTPMPLPMARKQTTQIRRNHPNKSVKFKASNNNTLDLLVVGQQLQMHRPPGRRHVQLHSPMSSQPRQHIEEYVYFYPVHYHETDHWPPHGQPEPNLVVDARFVAELLDELLLPAGNRI

SEQ ID NO: 38170 - DNA, 2126 bp, DROSOPHILA
ttcgaatgcactgcgatcttagctcttttcccgctaaatgtttctttgtgtgtcattttgtcaaccattcgatcgatatcgatattcctttgtgaaggctaaaaataaaattcttacatgctcatcttatacaataatggatcgcacatatagctactcctttttcatgtatccaattcactaggtaagctacaaagatagccagacggctgtgctaacagagcgctgctatggtgagaagccgccgcaatggcaacagtgccatctctggccggcgatacaaatagcgcaacttcgctcgcaacgggtttcattcccactggagtgcagttcgtgagcggtcgttctctcctctctctcgcaaaagtaaaacttaaagttttgtgcgcgcatgcgtctcgtcttagaaaaacctgcaatcagtaatctcgaatcgtgaaaatccttttctgccataccaaaaaaagagccggacaaagcaaagcgttcgattgccttctgccaatttgagcaggaaattacaaattaattgccgccctgaccgtgatttgtttacgtttttttcttcacttttttttacattgtgtgagtgtgagaaatttgttggccaaaaaatattccagatattcccagagatatatatattcgaaattcgaattggcgaagtgaagggtgtgacgacagacgcacacacacgcacgcacacgaaaacgcactgaaaaaacaccggctaaaaggcagacaaaaaggagacgagagagcgagtgctaaatagaaaacgcgaaaacaggataataatcagcaaactaatactataaaacaagcaactaagtgacatctcgatctcgccgagaaacaacaaaaacaacagttacaacttcggcaacagcaacaaaaacagcgccagcagcagcaacaacaacaaaatcagcgaagagcatagagccaaaaagaaggagcagcaaaagcaaagaaagtaagtggaattccttgcccaaagatggctctcctctcctttgcctttgctctctcatccagactagagatggcccgtgctccattttgtgccacgaccaatttgttattttccaaaaaatctaacaaatattataaaaatttcctgtagcttgttgcctcgaaatgggaatacagcttcaagcaaatatacatacttgcacttaaacattgaatctgggacttcttgcgttgcaaataggaaacctaattagtttcatacttcgacttataaatagtttttaattggggaaaatagataatcgtgtcacgcgaccatctctacttccagacgtcttgtgcaaattagacagagccggctgctgctgctccatttccaggtgtaatgccaatgccaatggccacggtctttactctgggcctcttgcaagtcataaaatctatggcagttgtcagttcgcttcgctgcctgttttttcctctgtctcttcacttttttgctttagcatttttcactttagcatttcattttgagctctccttcggctgctccacctcactttgtggcattgttttccagttcggccgctgatttttccaaccggctttcggctggctaattgccttgacattggcatttctcttcctctccttgtctgtccttcacgccccgctctgctccactctcctctctgtggctttttgtactcctctcttttctgactcgtttcaatcattcaagttcaactataaacagacataaacacgcagtaaaggtgccgccgcccccttttcgtggccccgccccctttctaaccgttattcctctctctcgctctcacttatcgctccctcttcatgtttagctttgccgtgtttacattttctccggctccgttccttccgccgcacggactttactctttggtcctttgtttccatgctcaaaaacgcatccaatccatatccatcccaatccgattcctatacgtattcgtgtgtatgtatccgtgtctgctcttccgctcctgtccgtcctgtcgtttgtcctgccggtccgtctgcactggaaaatggaaatggaaattaaatttaagctattttagaatgcaatattaaagttacgccatctaaacttagttaattcctaa

SEQ ID NO: 38171 - DNA, 126 bp, DROSOPHILA
atggctctcctctcctttgcctttgctctctcatccagactagagatggcccgtgctccattttgtgccacgaccaatttgttattttccaaaaaatctaacaaatattataaaaatttcctgtag

SEQ ID NO: 38172 - protein, 41 aa, DROSOPHILA
MALLSFAFALSSRLEMARAPFCATTNLLFSKKSNKYYKNFL

SEQ ID NO: 38173 - DNA, 3852 bp, DROSOPHILA
acgatactacacaatataaaattgcctacattggactcatgagtttgtgcatgtaaaaaatgaaaaaaagattatatagttaatatatacaaatacaatatacactacagttaattgcaacataaacgaaaaatgatacaaaaaaaaaaaaaaaaacaataaacgaaaagcgaattgtgaaatgcatagaaactagtttgcatgccccattatacataaatattatgtaattaagaagcataagaaaaaagatgattgaaagaacgagaagggtaatcaatctgaattggaaacgctaggatcatcggatgtgaatttgttattagtttttacaaattgtgtgttatttaggcggcgcttcaagggaacttcgatattgtttgagcgcatatgtttattttgaacgatcaaattgagccactgcaaagactagctaatatttcaatatctagaagtatatacatacatatatataataggtttttcaagcaaattcaaaattgttgaagatagtatcttcggcaaaaaaaaacctggttgtctagtaattggtataaatttccatcaagttatagaaaaattgcatgtgcgttacacgaaaagacatggaagaattgctacgaattgtaaatacactgaaaacgaagctgcatcttgtataattaaatattaatatatcacagttttatcttttttttttttttactagttatacaaatctagatgttttggttggcctcctagactaactaaattcaattctgcaaaacaaacaaacaagaaaaacacatgatttaagagattaaatggcacagcacagcaatacacaatacacactcaatacacacaatacacacacagcccctagtactctagtacacccaaaaaagataatgtaaacgtgcattctgagtgacaaaccgaaaacccttaataaaattaaaaaaaaaaccattacaacattatatgtaatcaaaatacaaacattggaataatgcatctagaagttcactgtgcattcgcagcacttgcggattggctgacgcagagccagcatgagatcacgctccatcctgtatatgtgatcccgcatcaagtcgtcggtgttggatcgaatctcgccgcgattctctaagacctcgcgcagctggtccaaggcgagttcggtatcgaccccgggcactgggttctcctcgcccagcatactcaattcggcgacggtcaattcggcaatggcatgagacataacatcaatgtcgctatcaatcttaaagcacgagaggcatttcttcttattggccacatcttcgccttcatcctccggttcaggttccggttccggttccagttcgggaaattgagactgatagtctgctgtatttattccatcatctcgagtatctgtgattttactggcacattccttggtcaccttcgcaatgcatccatcttcagaggcctcttcgtagctttccacactgtaagcacccgctggaggcgtcggtttgtccgattccattaccaagaagcccttggtggaggttatgtgcctactaagccccccgagagtttcaagcgttaaacttgcaatggacttggcactttcgcgggctttcttgtcaaaattcattctgatttcctctatcatatcggtgcactcaccatcgcgggagtatttgcccacaaacagaggtggtgtaatggtacagttgtgctgctgttgcggagtgccgaatcgacctatccgtttaatgaaccacagctccgaaagacttcccggcttgaagacgcagcaggcttcgaatcccttgggcatgaaacgcttgggcagaaagattggacgattgacgccctcacaaatgggaaagacatcggtgggcaggtcgaacgtggggcactcctcctcatcacacatggtggcgaatgccacagatggaacatgcggattgttaacggtggacagaatggacaccgtaatgttcaactggtgcggcataagcatcaggactttggacaaatccggggtataaatgttgtcctgcgcctggacacaaggatatggatagggcgacggtagacgcattgttgccggcaaactgtaggccaccgacaaggtgaagtcagggcgaagcattagctcctcggttatatcatcatcgtaatgatgatcggtggcatgcatctcatacacgaatgcgtcctctccttccggattgtcgtacatgtccaggaaactatcgatcatcgacgccaggctgatattcatgctgcgcagaccgacgaacagcggcggcattgggccctcatgttccgtcctaatcagatcaacgggatagcaatcacgtggaagtacacccggcccaaaaaccccaccggcttcgaagcccatgggcaacataaccgtgggcataaagacgatcttatctatcggagcgttatccgggaaaagggaagccggcaaatcgaagcagggcgcctggaagccctcaaaatattcggctgactgctgatcgtgcttatggacatcgggatacaggcgggccatcacaattctgttggggctcttgaagaacatcttcggcatgaccagattgaacagatagggcaagtaatcggccttcttcaactctgtcacctggttttcgtcgcgattcgcggaagccacttgcaccatttcggccctcggtatgcctgcaatgccaattgaatttgaacgtttagaggcatgaataacttattaattattattattttttttttgatttgacagttgagattatcaaacgaagaaaaaagcaaagaaaaacaggctattttgtgttcttacctcccttttttccccgtttagccattttgattttccttattggtccacaacactaagaagcacttaaattaacaaagtatcaaattaaaagttcacaaaagttcgaagtcagccggtcagcaattcagagtttctattattcagagttctgcaaacgtgaaaactcacttcaatactgaaagttcgcctccgtttttagtgaggttaacttgacagttgccccaacaccaatacaaatgcctacacggatccctggactatggctatcaaaattatagaattgccacctttttggttagtagaaaatattacaaaaaaaaaatattgaaattggaaaaaaaattcaacaaaatggacgttgcaacaacactttggcgcttgcagcaggcgcatcagcggcaacttaacgagtgggacaggattggtagacgcctcaagcggctgacgggcaagaggtccagcgacttgctcatccacgatccgctcctgcagccaccgttcgtcgcccatcctggccaacggatgagcggtggtggtcagcagacgccgatgccgttgccaatggccaggaagcagacaacgcagatcagacgcaatcatccgaataaatcggttaaattcaaagcatccaataataacaccttggatctacttgtcgtgggtcaacagctgcaaatgcatcgtccacctggacgacggcatgtgcagctccacagtcccatgtcctctcagccccgccagcatatcgaagagtatgtctatttctatccggtccactaccatgagacggaccactggccaccacacggccagccggaaccaaatcttgtggtggatgcacgatttgtggccgagctactggatgagctgctgctgcctgcaggcaatcgtatttgatttgtgcttcgttcaaataaaaaagaaacattgcgaaaaaaatttgaatttttcaacggtcttgttttttctcatacctttcgtaaaaacgaaatatgatttcatttcatattttaaaattaacaatt

SEQ ID NO: 38174 - DNA, 1716 bp, DROSOPHILA
atggctaaacggggaaaaaagggaggcataccgagggccgaaatggtgcaagtggcttccgcgaatcgcgacgaaaaccaggtgacagagttgaagaaggccgattacttgccctatctgttcaatctggtcatgccgaagatgttcttcaagagccccaacagaattgtgatggcccgcctgtatcccgatgtccataagcacgatcagcagtcagccgaatattttgagggcttccaggcgccctgcttcgatttgccggcttcccttttcccggataacgctccgatagataagatcgtctttatgcccacggttatgttgcccatgggcttcgaagccggtggggtttttgggccgggtgtacttccacgtgattgctatcccgttgatctgattaggacggaacatgagggcccaatgccgccgctgttcgtcggtctgcgcagcatgaatatcagcctggcgtcgatgatcgatagtttcctggacatgtacgacaatccggaaggagaggacgcattcgtgtatgagatgcatgccaccgatcatcattacgatgatgatataaccgaggagctaatgcttcgccctgacttcaccttgtcggtggcctacagtttgccggcaacaatgcgtctaccgtcgccctatccatatccttgtgtccaggcgcaggacaacatttataccccggatttgtccaaagtcctgatgcttatgccgcaccagttgaacattacggtgtccattctgtccaccgttaacaatccgcatgttccatctgtggcattcgccaccatgtgtgatgaggaggagtgccccacgttcgacctgcccaccgatgtctttcccatttgtgagggcgtcaatcgtccaatctttctgcccaagcgtttcatgcccaagggattcgaagcctgctgcgtcttcaagccgggaagtctttcggagctgtggttcattaaacggataggtcgattcggcactccgcaacagcagcacaactgtaccattacaccacctctgtttgtgggcaaatactcccgcgatggtgagtgcaccgatatgatagaggaaatcagaatgaattttgacaagaaagcccgcgaaagtgccaagtccattgcaagtttaacgcttgaaactctcggggggcttagtaggcacataacctccaccaagggcttcttggtaatggaatcggacaaaccgacgcctccagcgggtgcttacagtgtggaaagctacgaagaggcctctgaagatggatgcattgcgaaggtgaccaaggaatgtgccagtaaaatcacagatactcgagatgatggaataaatacagcagactatcagtctcaatttcccgaactggaaccggaaccggaacctgaaccggaggatgaaggcgaagatgtggccaataagaagaaatgcctctcgtgctttaagattgatagcgacattgatgttatgtctcatgccattgccgaattgaccgtcgccgaattgagtatgctgggcgaggagaacccagtgcccggggtcgataccgaactcgccttggaccagctgcgcgaggtcttagagaatcgcggcgagattcgatccaacaccgacgacttgatgcgggatcacatatacaggatggagcgtgatctcatgctggctctgcgtcagccaatccgcaagtgctgcgaatgcacagtgaacttctag

SEQ ID NO: 38175 - protein, 571 aa, DROSOPHILA
MAKRGKKGGIPRAEMVQVASANRDENQVTELKKADYLPYLFNLVMPKMFFKSPNRIVMARLYPDVHKHDQQSAEYFEGFQAPCFDLPASLFPDNAPIDKIVFMPTVMLPMGFEAGGVFGPGVLPRDCYPVDLIRTEHEGPMPPLFVGLRSMNISLASMIDSFLDMYDNPEGEDAFVYEMHATDHHYDDDITEELMLRPDFTLSVAYSLPATMRLPSPYPYPCVQAQDNIYTPDLSKVLMLMPHQLNITVSILSTVNNPHVPSVAFATMCDEEECPTFDLPTDVFPICEGVNRPIFLPKRFMPKGFEACCVFKPGSLSELWFIKRIGRFGTPQQQHNCTITPPLFVGKYSRDGECTDMIEEIRMNFDKKARESAKSIASLTLETLGGLSRHITSTKGFLVMESDKPTPPAGAYSVESYEEASEDGCIAKVTKECASKITDTRDDGINTADYQSQFPELEPEPEPEPEDEGEDVANKKKCLSCFKIDSDIDVMSHAIAELTVAELSMLGEENPVPGVDTELALDQLREVLENRGEIRSNTDDLMRDHIYRMERDLMLALRQPIRKCCECTVNF

SEQ ID NO: 38176 - DNA, 2719 bp, DROSOPHILA
ataaaacattttcagctgtaaatatcattcgattggtagttgaattaaaagtttattgagttacagcatccaacatttggactattgttttttttcatgaataccgcatccgaaacaagtaaatggctgacgcagggccagcatccgatcgcgattcattcgaaagatatgatcctgcatcaactggtcagtgtgggagcgtatttgattacgatcctcgaggacatgacgcaactgaatcaaagcgttatcaccatcgatgccgcacaattcctcctcgtcggcgtgcagactcatatcggcgatgcccaaacgggccatggccatggcaatattatcaatgtcgctatcaacatgaaagcacgataggtatttctgatcagcctcagttgagcatttatccaactcctgcgactgatcgcccactgtacacatttcattcctttctcgagtttctgtggcttcttcagcagtggccggtttcttaaccaccctcacaatgcatccatcatcaaaggcctcgtcgtagttttgcacactgtatgccccctttggtgacttcggctccttcgtttccattaccataaagcccttggtgatggaaatatcaaatttaggtttgacacctgctagcgttgcctttgactcagcatcatcgctggctttcttttcgatctcaaattgaattttctttatcatatcgacggccggctcttcgcgacaaatcttgccaacgaatagcggtggtgtgatggaaccattatactgtggctgtggtggaccgaaacgtccgatgtagtccatgaaccacagttcggatagagttcccggcttgatgacgcaaccggcttcgaatcctttgggcatgaaacgtttgggcagaaaaattggtcgattgacgccctcacaaatgggaaagactccgatgggcagctcgaacttggggcactccgcatcatcgcccatggtggcgaatgccacagatggaacatgcggattgttaacggtggacagtatcgccaccgtaagatcgcgttggtgcgacataagcaacagaacattggacagatccggcgtataaatgttgcactgcaacgggatacggccatatgaatagggcgatggtggactcggtggtattggcaaattgaagaccatcgatagcgaaaattcatcacgaagctcttgtccttttggctgtgccccatttataagatcattgctggcatgcaaccaattcatcaatgtgtcctgaattggttgggactcaccgtctttttttaggagactctcgacccttgtcggcggttggacttccatgcgcaaaccgacaaacagcggcggcgtttgacccttgtgacccgcggccttcaagtcaatgggataggaacgacgcgtaaggatacccggcccaaaaacaccgccagcttcgaagcccatgggcaacatggacgttggcagaaagacaatcttgtccattggaaccttatccgcgaacagggatggcggcacatcaaagcatggggtctcggttccctcgaagttttcggctgcctgcttatcgtgcttattgacatcgagatataggcgggccaccacaatcttctctgggtaaaacaacttcggaatgaacaggttcaccagatagggcaagtaattggccttcttcaagattaccacctgatctttatcacgatgcaccgtatccattcgcagcatttcggttactaacaattggttgaatttaaaaaaaaacaaaaaaaaaatctatacttaatcccgctctggaatttgttctcgattcaatgaataaaaataaatttctcacaatttctgatctgacaactgatattgtgaatatgggaatataactattccaaagcagcgtactcaaatgaaaacatatttcaaaacaaatccgtcgccaaggatgattctttgtggaatttttaagcgatcgatggcactgggctgcgaaatgtgcaatgcgaaaattgcaaacttgaaaattgcatttttagccaaaaatggttttcagatttttcgcgaaaaacaaaaaccgtattttgagcaaaactttgaaaataatggtccaaatttggaatgtcatacctcgttgagtttgttttttaaatcccaatcgatttgcattcaagtttgggaattctaggattattcaatttttcgcaaattttgatgacttacagaaaatgcgaaaatttgggcaaaaattaattttacaaaatcagtttaagagttgttgttgttaatattggttgttaggagtataaaatggtacttctttttgctctgtgaccattttttgtcaagttatagacaaaaaagccaacttgaaaatgaagttttttgccaaaaatcgttttcctgtttttttgtgaaaaaaatatttggttttttgatcataacattggaagtaattacccaaataaagaatttcatacctcgttgagtttatttcttaaatcccaatcgatttgcaatcaagtttggcaattctaggaattttaatttttttgcaaattttgatgatgtaccccttacaaaaaatgcaaaaatttgaccaaaaattatttttacaaaatcctttaaaaagtgatagggatggttagtattggtaattaggagcacaaaacggtaattcttttggctgtgtggtcatttttggtcaagttatacccaaaaaacccatcttaaatat

SEQ ID NO: 38177 - DNA, 719 bp, DROSOPHILA
atgctgcgaatggatacggtgcatcgtgataaagatcaggtggtaatcttgaagaaggccaattacttgccctatctggtgaacctgttcattccgaagttgttttacccagagaagattgtggtggcccgcctatatctcgatgtcaataagcacgataagcaggcagccgaaaacttcgagggaaccgagaccccatgctttgatgtgccgccatccctgttcgcggataaggttccaatggacaagattgtctttctgccaacgtccatgttgcccatgggcttcgaagctggcggtgtttttgggccgggtatccttacgcgtcgttcctatcccattgacttgaaggccgcgggtcacaagggtcaaacgccgccgctgtttgtcggtttgcgcatggaagtccaaccgccgacaagggtcgagagtctcctaaaaaaagacggtgagtcccaaccaattcaggacacattgatgaattggttgcatgccagcaatgatcttataaatggggcacagccaaaaggacaagagcttcgtgatgaattttcgctatcgatggtcttcaatttgccaataccaccgagtccaccatcgccctattcatatggccgtatcccgttgcagtgcaacatttatacgccggatctgtccaatgttctgttgcttatgtcgcaccaacgcgatcttacggtggcgatactgtccaccgttaa

SEQ ID NO: 38178 - protein, 239 aa, DROSOPHILA
MLRMDTVHRDKDQVVILKKANYLPYLVNLFIPKLFYPEKIVVARLYLDVNKHDKQAAENFEGTETPCFDVPPSLFADKVPMDKIVFLPTSMLPMGFEAGGVFGPGILTRRSYPIDLKAAGHKGQTPPLFVGLRMEVQPPTRVESLLKKDGESQPIQDTLMNWLHASNDLINGAQPKGQELRDEFSLSMVFNLPIPPSPPSPYSYGRIPLQCNIYTPDLSNVLLLMSHQRDLTVAILSTV

SEQ ID NO: 38179 - DNA, 1261 bp, DROSOPHILA
ctatgtatttcactgttggctaattgttgtgacctcctaatttactcaagaagaacctgagatttgaggcgctggagagtcgagggaacccctagaacactttgcttgttcttcgcatttttcccattttcccactttacctaatcgtttgggccaatctcagtggattcgagtcgagtcgagtcgagttgagttaagttcttttgggcctggttggctgggcaacgaaaactgttctaacgatgatcgcgtaattatggctaacagtttcggttttgctgccgtttgcctcacatttatggtcggtgctgtaataactgttacacttaatgagccaggcttagttttgataatgtatctttttttgtttggcggcaaaatatcccaagaaagacttccaatcaataggttgtcccatctatttggatttccctttcgcagcaatcaagaaatcagtggcaaagaatcgaaaatcaaattgcttttgttttacattttcgtcgtcttcaaaatgcacttaaaacgtttctaaaacgcaacccatagaaatttacagggtatgtgaagttgatgcgactgaaaactattttatgatatttctttttaaaattttggaaatactttagttctggcagcttaaatcatttggcagatgaacttaagcgaactttgtgaatggattgtttttcccacttgtttttcccatcgattggcccgatataccctctagattgataccctctagatgtcgcacataaaaatgaaagttaaatgcgatcaatcgcagatcgccccacagcatcgagatcgtggctaattaatgactttccgttcgtctcgtcgcatccaagttaagtttctaacggtctggtctggcgtagaatgtcgcgccgccggcacctgttacgcaaatgaacgatccaccagatacgtccatatatatatgcatatgcatatagatagatagcttcagctgatcgcttcactcacctgctcgtcgatgggacagccgcgggcatcgagtaattgctgcgtggattcgcccagtccatcgagtgccgcacagtccaccacccgcactccgatgtttccgggcacgatggctctcaccgtcagcgtggtggcgacgcccacctccacggatccggtgccattgggaccgcccaattctaaccagatcctaacgcgtggcgtctcccgctgctgttgattgatggacgaagtggcgccgagagctggaactgcagcagcagctgccaag

SEQ ID NO: 38180 - DNA, 210 bp, DROSOPHILA
atgggacagccgcgggcatcgagtaattgctgcgtggattcgcccagtccatcgagtgccgcacagtccaccacccgcactccgatgtttccgggcacgatggctctcaccgtcagcgtggtggcgacgcccacctccacggatccggtgccattgggaccgcccaattctaaccagatcctaacgcgtggcgtctcccgctgctgttga

SEQ ID NO: 38181 - protein, 69 aa, DROSOPHILA
MGQPRASSNCCVDSPSPSSAAQSTTRTPMFPGTMALTVSVVATPTSTDPVPLGPPNSNQILTRGVSRCC

SEQ ID NO: 38182 - DNA, 3722 bp, DROSOPHILA
gctctgtgcgggccgcctgctcggtggcgtattcgaggtagacctccttgcgcgtctgctgctccttgaagtgccgcgttttcacacctttcggctgcacttgctcgccacgtgagtacttgtcgaggatctccttgggaatcgggttcttcttgggcctagcttccagctcctcctttgtgggtttggcgggagccttttggggacgcggcttcttcgttttattaatcatactgataaaatcgccagtgaaattctgtcggtttttgctgaacacttttacatgttttagatcgccgtcgcccgtttctgtgtccttttggccgtcgaagtagcgtttgtacggcgtcttagccttcgggcgccctttcggcgttactttcgtcatcttgatgtgtcagcaagatgaaattaacttaaaagctggcttcaaataaagttaatttgaaatttgacaacaacgtgcacgtgctgcttcttcttcttcaaatcagctgtcccggagtgtgaccatgtggcattagcgttgtttaccagagcagctttaaatactaaacaaataccgcatgctaagaaatttaaatattgagcgcgcaattttaaaaatctttaaaatgaaataaacataaaagttgtatattagaagtatgtttattccaaattaaaacttgttcaggaaataaaaaaggtaaacaaaatatataaaaaatacctttaaagactcaaagttccttaagtttgatttggatgcaactatgttaggtttttactcttagatctatgtagatattacatacagctacagcgaaaggatatcaaaacgcattttggccccaaaccgcttgcaaaacgctttcaagatcctttccaaccaaccgaaaagttacagaactacgcataatattgctaaagttagaccttattttggtgtaccactcgttagacgattccgtcagtctctgggaggcgcctccactaaataactccgccacgcaatcaattagtagacacggccatagggcagggtattcggatagtagggcatcaggaacttggccccgaaacgcggctgcgattgcgccgattcgctgctggatgagaacatcgaggtgcaaatctcggcccgatcccgatgcaatcgactgctgctgttcgacgtgctcgtcccggcgatgcccagtcctactcccagacccagactcaagccagctccatgacgacgctcccggcgacgcgatcgaatcagcgaaaagatggccaccaccacggccaccagaaagatcaggcccagaacgcagaacgagatggccagcttggagatggacagacagagcgttccctcgccgggcatcacttgacccctcacatgcggcgcataatcctcgcctgaaatatgaactcactttactattgatcaagtttcgaagtttaaattttagattacaaatctatacttcatagtacacttaattaaataatatcaaacttcaatcgaaggcatacatttatatacaattatatgatgaaagcgaaaacctcatgaaggaaaccccccaattaatttgcgagtgttacgagtgtttacaagtaattagtgaaggaaatcgaaatgtttgggcttttggcacagcacttggttttcgggtggtacggcagccgtgactggcacgtactcccactcccactgccacgcccacagatccaaccgctggtggcatccacttaccgctcatgttgtgccgcctatcgtagcgcaggcggtccacctcgatttggggtgctgtcacggccagcgaattgaaaacctcgatgcgtgccagatgctgctcggcgctcaacgccggcggaggcgtctttaggcgacaatttagctggaatcgagacataaacataaatcttaatcacttagctcttactgatttgtgtgtattttttgcccatttcttgtacttcttctccccatcaatatcttttgcttatcaagctgctcatctttcaagtggagctagtgcatcggtttgtgcactgttgcctctaagtgggtatgtggctccacttggctgcatttcggtgcaataaccacattaattagcagacgcaacaacacgctacgctgggcagcagaagaaacagaaaacatcagaagcggcagccagcgcggtggcaacactttcgttttcgttgcaattaattgagatgcatgcgagcggtgcattttgtcggtacacagcgagaaatagaggctagccagcaatgataaatcagcttattcagtttgccacttccgtttgagcagcaaatcaaggctagcataatttacatatgtactcaaaggtaatttaagatctgcaagatggcttactaaacttataatatttctagctgattctagttaataaaactatgagcaaaagtatttcaaaaattaggaaaatatgtatgccctggttggaagttaaactcggaccttctgccttacgaactaaccactgcattctcgcagtgcacttaaagtgcggtgtgtgtcacaagtatttgggatactcacagtcggacacttccccttgcaaagttgcacgccacagctgacgtgtaggcgctcgcggtccgggaacttgaaggcgggaaacgtggccgcgaacgtccgctcgaccaggtcttcctcgtgctgcttggaccaaccctcctccgccggtcggtgctgggtgtgcagagcgggcattacctgaccatggcggaaaattaatagattcataggcgatggatgcatggcgaacaaggttgttttttttttttctaagtggctaaacccagtttgggtggttttcggtttcgtttgctcaagaaagtggactgctaaaggttctcattacttggtgcacttatgttttgtattataatgtgtttaagaaagaacctaatgagatggtaactttaagaactccagcgaactgagaacttatggaaccaccccatttgttatgtcacatttgcgattgaatctgggaatatgaacctgtctccgtttatggtcaccactgtccctgaacctgaactccaaccagttgtgcgcttttcatggccctctctactttttttttttatcgcctgttatacaataattcgggttgacaaaacacggtcgcttccgttacgtatatatgtaatatggtgccatagttagtaccaagaaaccagcgagcaaaaggtggccaagccaagttcaatgacaacaacgcccgagtcgcaagttgcaagtggtgcacattgtggatatggatgctacatgtgaatggtatgatgcatgtgcgatcgctggaaacagatgtatggaattacaagacgctgcgatttacatctcgccattgttggtggtaactaaagcaaaaaagggttcaagccggaaaaacgaatgcgaaaataccctaactgatatgatacaaacatacgaataaatggaatatctacagatactatttgcatctgatctttgatagctgctgagagttcaagattgatataagttgattatagtacatatatccaaagagggtatgtgcgaatcgtagtattgcatccaaggcacgttgattggcttagatggcgtaccacagtttcaatttacacgcccaagcacgtgttttttcaatgtgcgggtggatgtgaatgcgaaatccgagacaataacgagaaaaagcaaattgttgcggaagttcaaatga

SEQ ID NO: 38183 - DNA, 705 bp, DROSOPHILA
atgcccgctctgcacacccagcaccgaccggcggaggagggttggtccaagcagcacgaggaagacctggtcgagcggacgttcgcggccacgtttcccgccttcaagttcccggaccgcgagcgcctacacgtcagctgtggcgtgcaactttgcaaggggaagtgtccgactctaaattgtcgcctaaagacgcctccgccggcgttgagcgccgagcagcatctggcacgcatcgaggttttcaattcgctggccgtgacagcaccccaaatcgaggtggaccgcctgcgctacgataggcggcacaacatgagcggcgaggattatgcgccgcatgtgaggggtcaagtgatgcccggcgagggaacgctctgtctgtccatctccaagctggccatctcgttctgcgttctgggcctgatctttctggtggccgtggtggtggccatcttttcgctgattcgatcgcgtcgccgggagcgtcgtcatggagctggcttgagtctgggtctgggagtaggactgggcatcgccgggacgagcacgtcgaacagcagcagtcgattgcatcgggatcgggccgagatttgcacctcgatgttctcatccagcagcgaatcggcgcaatcgcagccgcgtttcggggccaagttcctgatgccctactatccgaataccctgccctatggccgtgtctactaa

SEQ ID NO: 38184 - protein, 234 aa, DROSOPHILA
MPALHTQHRPAEEGWSKQHEEDLVERTFAATFPAFKFPDRERLHVSCGVQLCKGKCPTLNCRLKTPPPALSAEQHLARIEVFNSLAVTAPQIEVDRLRYDRRHNMSGEDYAPHVRGQVMPGEGTLCLSISKLAISFCVLGLIFLVAVVVAIFSLIRSRRRERRHGAGLSLGLGVGLGIAGTSTSNSSSRLHRDRAEICTSMFSSSSESAQSQPRFGAKFLMPYYPNTLPYGRVY

SEQ ID NO: 38185 - DNA, 2546 bp, DROSOPHILA
tcaccatccgtcatatgcgcaatcacggcaaggtgcacacggagcaaaagaacttcgtctgcgagagctgcggctacagctgccggaacaaggagacgctgcgcgtccacatcaggagccacacgggcgaacggccgttcgggtgtcaagtgtgcgacaaaagattcccctcccattccggcctgcgagagcacatggccatgcattccacggagcgaccgcatgtgtgcagcgtttgcggtgcgaccttctcccgacagaaaggcctctaccaccacaagttcctgcacgcggacaccaagcagttcgtgtgcaagctgtgcgggaatgcctatgcccaggccgccggtctcgctggacatatgcgcaagcaccggaacgacgagctcaacggataggatccggatcaccgaggtcgtagtctaagttgtacgttttgtatcttccaattccgacgtttaagttcaggaactcaggcataggctatatataggattaccatagaaatcaatggttttttgcattgctccggcatggagcgggtatcatgtgactcttcggtcctcgtttcacgggtttccatcgaatttatttgacacgcactgtaaataatatccctagttttagataaactgaaagtttgttaatctgtttcgagtgaacttagtttgaggcaaatttaattggctcgattgtaagtactaagactaaactacatttccatgaattttctaaactaccaactcaaataataactaaactttgttaaggtttaaactatacattaagcacacaatgcttccaagaaccaaatcgaacgccgtaatctcggcaaccggatgtggctagtattcgaatggttaacttttttgtattgataaatatacataacatgaatttgattcgcaaaagagagcccgcgtttaaaattagccaagcgatttggtacctttgacagcaattaatcggtcgactgctgctaaagcggccaaatgccaagatggtattggatggggtgcgtctaacaatagtgccgacgattagatttggcacacgcggaccgaccatgtcggcggaacgtccagctgccagctccgataatcggcgacttatgtgcgagttctgcggctatcggacgcgcatctattggaatctgcagatccatcgtcggcgacacaccggcgaaatgcccttcagttgccagcaatgccaggcgcgtttcccggccagctatcagctgaaaagccacttggagcggcacttggacgccggcgagcgacgccagcggcacatttgcaccgactgcaacgtgggtttctccagttcgcgggccctgtaccatcaccggacgctccacgaggatgggaagcgcttcaagtgctcccagtgcgacaagtcgttcgctcaggcggcgggctacgcccaacacaagcggattcaccgccagaggaaccagcgagccaccgaaaccacggatctgaaggatctgcagatcaaaagagtggtttcaagtgtttttcatcggcgcgagtttaacactgcataaaattcagtggagtaattaacattttatttttgtgtcatattcaaatttaaaaaaaccgggtaaccgattcgttatttcaactgaagtgccttataaataaaacaggcagtatcactttctaagagtctggtaacaaattggtaacacttgagaggagcatattgcttagctatttaatatacatagatcaaatataattaattttgaacttaaaatttattttgtagtttattcggtcaaacggttagtttggtttgaaacatagctgaatggctgtgaaatcagtgctggtttgagtctgcactaaatgtctatcgaagtcgatcgaaattttgtttacatattttattttaattttggtaaataatattgcaacaattttaatgtaaataagaatcagaaaatgttgagacactgcctcgccaacgtcgactacgtccgcctgcacgcccagcagcagttgcgtcccaaatgcggcgagatcttctacgaaccggaggcgaatagattccaactggtctgcctgctctgcgacatgaagcactttggattcgaggacttcgcccgccatatccgtaatgtgcacttcgacaagcagggccgaccgctcaccaagacggtcacgggactgggcagactagcacgagaggaacaggagttccaaggggtcagcgcagaaccattggctgtggacagcttcaagaaagagtacctgcccaacgaggatgttctgtcggaggaggaggacgcggaacaggagctgggactggaacaggacgagggcaatccactacgcatcatggtgctcgggggtaaacagtccgtggacgaggagaccatcgatacgatgtggcagccggatcatgacagttcctccgcatccgtcaacgaggggtgcgctctggaggctctgttgggcgtggaaaatccgcaagactatcaaccggatgaggacggggaggagcaccagtctgtttttaaggtagaaaaactgtagtac

SEQ ID NO: 38186 - DNA, 546 bp, DROSOPHILA
atggtattggatggggtgcgtctaacaatagtgccgacgattagatttggcacacgcggaccgaccatgtcggcggaacgtccagctgccagctccgataatcggcgacttatgtgcgagttctgcggctatcggacgcgcatctattggaatctgcagatccatcgtcggcgacacaccggcgaaatgcccttcagttgccagcaatgccaggcgcgtttcccggccagctatcagctgaaaagccacttggagcggcacttggacgccggcgagcgacgccagcggcacatttgcaccgactgcaacgtgggtttctccagttcgcgggccctgtaccatcaccggacgctccacgaggatgggaagcgcttcaagtgctcccagtgcgacaagtcgttcgctcaggcggcgggctacgcccaacacaagcggattcaccgccagaggaaccagcgagccaccgaaaccacggatctgaaggatctgcagatcaaaagagtggtttcaagtgtttttcatcggcgcgagtttaacactgcataa

SEQ ID NO: 38187 - protein, 181 aa, DROSOPHILA
MVLDGVRLTIVPTIRFGTRGPTMSAERPAASSDNRRLMCEFCGYRTRIYWNLQIHRRRHTGEMPFSCQQCQARFPASYQLKSHLERHLDAGERRQRHICTDCNVGFSSSRALYHHRTLHEDGKRFKCSQCDKSFAQAAGYAQHKRIHRQRNQRATETTDLKDLQIKRVVSSVFHRREFNTA

SEQ ID NO: 38188 - DNA, 3287 bp, DROSOPHILA
gctgtggaatgtcgtactttgcactgggcactcggtatcagcatcccatccagccagccatagtatacgcgtatgtctggactgtgatcgccgcattgacgtagctattgcccatccagatgacccgttgacccatggatcgtaagctcgcctctcaattggctaccacttctaggtcagatgcgtcatggtggtgacctctgcgagctcgagaaggattcatggattagttcaagtccaaggtacatgtttatgtgatgattgggatttaattcccaatatttaatgatgatgatgatatatattgtatataaaggccacactgaagttttcccaggcctttttgtttggtgtagttaagctggcaaaaatatagcacagtgtgaggtctagttcaagagagtccagcattataatcagcattcagcattcagcaacgtgacgcaattaaatataaataaatattttgtattattattattcactattgattgattggccgtttacaacagaggggcccgtccgtattggagcttgtaaatacttcctgccatttggattcaatgtcatcgcatcccatcgtaatcgtagctttcgttttttttttcgcgtaaactcgactttggtttgaggtacgtatgtatactcgtagtacaacagtgcgtatactcaatgcattcgaattgttatgcgcaagcagtttatttgctgattttcgcaaatagttacgtcacgaaaactatttgtcgatttgcaaatggaaagtgatattctcacgcaatttggaaattaaaaacaatattaataatattaattgttaatcatggttgtgtttttccgtttcaaaatcaatcaacattgaatcaccaagtagctcgccgttgagttttcagagttttcgaaactatatttgctttgtcaaaattttagaagagttagtgcgatattttagatttatttggcattgtgtgttgcacgtgaaaaaaaatcgctgccggacatggacacaacaatgccgatgggcatggtgcccaacagtctcaatccgatcctcaatcctcgacccctgccgatacccgttaccaagcccagaaccaaactccagccggatgagccacacgatggcgttttagcgtttaagtaagcattggtttcgtcactgtccaaagtccttatcccactgacttccaaccctattaaccacaaaagcaagggaaaagtacctccgccggtatcctcacgtcctattccgctccagcgtgcaatgtctgaggttcgggacgcgctgcgagctcagcctcaggccagtgacattcgcctgttgatcttcacggcggcggccagcagtgtggagcacgagagaactctcattccggtgccgccacaatttcaagcggcaccaggctccggctgccaagtggatcgattgcgtcacgccgtcgccgataattggccctcctgtcgcatcatgttggactgccccagtactgacgagcagtatgccgctttgatgccggacgatgtggacgccctgcatttgctgcactggatcctggtggccacgccctcgtcgcccactctgcgccgcatgtcgggattgcatttgcggcgactttgccgctttctgggcctggcacgacccaccttggagcccggccatctgctgagcatcagttatgagcggaatgttcagcggctgggcgattcgagtccaaggccaagatccagttacgcctatctgggcttgccctttcagtacctatatcgtttcctggccactggacgtctggagcaaccgccaggtgttgccattcgtttgtatgcccaaccggaaacagccttggttcactgcgacgagctgagctcgctgccgcagcagcagcatgtccagtcggaggagcaatcgtccagccaatccattgcagagagggagcagtctggaaattcaagctcgctgtgctggcggaactccacgctcactgcaccgcaaagggcactggtcatatgcgaactaccctcggagttggacgaatccattgcccattcgccggagaagcattttctcgagtactttgtgcaggaatcgctgtcactgcgaccctgctatctgctcctcttcgacgaggcggtggcctccaacataatgttcgtctggccgggcaaatgtattgagctggagcatccgggtccttcgatggtccagagatcgcgtatcaggatcatgaatatcgtccggaatctgagcaaccggttgggagcagttaggcgggctttagccgccatttagatttttattttatatatggccaaggacactgatctcggccaggtgccgtccgtcgttcaaagtcctggacatgccaactccggtgaactggagctacttaatttttttggaatttctcaaacaattgttaataaatatttggcaacttatactaatttattgatttttggccattctataaaagaaaaaactaaataaggatcagtggatctttgttgtaactgatggatgcctgcagattctagatgccttcagcgctaccgggactgatagttgatacgattgcgaggagtgtagtccatgacgaatctgtggcgcctctgttgatactgcgactggctaaggaagatactggccaatcccttgatggtcacaaaggtcagtccgcccaggaggatgctcaataacttgttctcctcgtagatcctgccgaagagcttctgtcccagcaccacggaaatggtgggcagacttagggcaatgcagaagctggtggaggcgcgaccaagttgctccgttgccaagttaccgccaattaggccatccgaggccggatactcgcgctccagctcatcgaagtactcatcgctcagcggagcaccgggcaggggtagacccacagcatccagttgctcggcgggaatggcgctacgtttgcgccgacgcagccaacggatcacgcagtcctcccagcgcacaagcctgctgagaagtaggagcgtcggcaccgatggcagcacaatcatcagcagcgagggatcctcttggagcagcttcatgcccgtgctgtagccggccagttggagcacggtgagtgctccgtagatcaccgcggagaagtaaacggtggccgccaggatgcccatcagaacactgggacacatacgatcgcagcccttgtccagtcgctccagcatggcatcgaagcggcatagtggcggcatcactataatgtactccgtgcggcattgggtgcacgtcacgggagcacccggcgata

SEQ ID NO: 38189 - DNA, 1218 bp, DROSOPHILA
atggacacaacaatgccgatgggcatggtgcccaacagtctcaatccgatcctcaatcctcgacccctgccgatacccgttaccaagcccagaaccaaactccagccggatgagccacacgatggcgttttagcgtttaacaagggaaaagtacctccgccggtatcctcacgtcctattccgctccagcgtgcaatgtctgaggttcgggacgcgctgcgagctcagcctcaggccagtgacattcgcctgttgatcttcacggcggcggccagcagtgtggagcacgagagaactctcattccggtgccgccacaatttcaagcggcaccaggctccggctgccaagtggatcgattgcgtcacgccgtcgccgataattggccctcctgtcgcatcatgttggactgccccagtactgacgagcagtatgccgctttgatgccggacgatgtggacgccctgcatttgctgcactggatcctggtggccacgccctcgtcgcccactctgcgccgcatgtcgggattgcatttgcggcgactttgccgctttctgggcctggcacgacccaccttggagcccggccatctgctgagcatcagttatgagcggaatgttcagcggctgggcgattcgagtccaaggccaagatccagttacgcctatctgggcttgccctttcagtacctatatcgtttcctggccactggacgtctggagcaaccgccaggtgttgccattcgtttgtatgcccaaccggaaacagccttggttcactgcgacgagctgagctcgctgccgcagcagcagcatgtccagtcggaggagcaatcgtccagccaatccattgcagagagggagcagtctggaaattcaagctcgctgtgctggcggaactccacgctcactgcaccgcaaagggcactggtcatatgcgaactaccctcggagttggacgaatccattgcccattcgccggagaagcattttctcgagtactttgtgcaggaatcgctgtcactgcgaccctgctatctgctcctcttcgacgaggcggtggcctccaacataatgttcgtctggccgggcaaatgtattgagctggagcatccgggtccttcgatggtccagagatcgcgtatcaggatcatgaatatcgtccggaatctgagcaaccggttgggagcagttaggcgggctttagccgccatttag

SEQ ID NO: 38190 - protein, 405 aa, DROSOPHILA
MDTTMPMGMVPNSLNPILNPRPLPIPVTKPRTKLQPDEPHDGVLAFNKGKVPPPVSSRPIPLQRAMSEVRDALRAQPQASDIRLLIFTAAASSVEHERTLIPVPPQFQAAPGSGCQVDRLRHAVADNWPSCRIMLDCPSTDEQYAALMPDDVDALHLLHWILVATPSSPTLRRMSGLHLRRLCRFLGLARPTLEPGHLLSISYERNVQRLGDSSPRPRSSYAYLGLPFQYLYRFLATGRLEQPPGVAIRLYAQPETALVHCDELSSLPQQQHVQSEEQSSSQSIAEREQSGNSSSLCWRNSTLTAPQRALVICELPSELDESIAHSPEKHFLEYFVQESLSLRPCYLLLFDEAVASNIMFVWPGKCIELEHPGPSMVQRSRIRIMNIVRNLSNRLGAVRRALAAI

SEQ ID NO: 38191 - DNA, 1592 bp, DROSOPHILA
agaacttctccatcttgttacattaactaaagcatttgtagaattacctatcgtgacccttttcctgtcgcaacaccggaagtggcatgcccatcgcattggccggaagttggcatctcaccgagctaaggatgtcggtgctctggcgcaacttctgctccttttgcagcatcacacgcaccgtatactccagactgccgtcctccagtggctctgccctcactccgcaacccgatgttgggatgcgcagatgcagacgcgtcgagtccttgccacgtgcgcgacactccagcggaaagtccttggcgtagagtaatccgcgaaagggacggctcaactccagatgcatctcgagcagctcccggctgcagttcacctgcatcgcctggatttgcatggtcttggttgtggtggtggtggtggtggtggtggtggtggtcgtatcgttaatgaaactttccggcgttctggttgtccaggcagcatgacacagaaactgcggcagatgcaacactccgatggcgatggccaatggcagcagctggccgagattgaaggatgtggacgcggccgaggcgctggaggagaacatgtttccgatttcccgttttctaccagtggcaacggcaaaccgccccgccgatgatcaaaaccgcaaaacgataatgatgccacttgttgctgctgtctttggatgttgctgctgctgtcactagatgttgctgtgttggaagcgacgacacctgttcgtgcggccgcgtggctaactcttaattggcctactcccagtccaagttcgagaatcttgtctgcgaaatggaaatgcattagttgcatacatagcatagcgatgattttgggtcaagtaattacgggggggggggggggggcatggtgtgtacttgttgctgctgggctttcgtgtttaaatgggttaactaaactggaaattttgtacttcaattgttaaataactatttaaaggtatagctagcaatattgatgattttaatcaattgtagggctaatagaaaaagggaaaggggcacaacgctgtcactttatgtaatttttaatggccaaataaacgagaggccaatctggggtagcccttccctgcccattttcgatgccatgcgatgcgatgtgatgccaaatccgcgacgaaagcgggtcaagtttgtcccatatttgtttgattggatggagtctataaagcaatggagctatggagccatggggctaccgggctaaagatgttgcagcacggcgaacaaataaataaataaatagatgcgataaaggcaaacaccgaagcttaaatcaacatcaacataatgcgtttgcaactttgcgtaatcctattttgtgatgttactagctggcagctagtatggttggttattcgcttattgtgctctctatttgtatttgtgattcccatctcttattaacttgactgggcattgtaatcagcccaattaacaatataacttggactctacttaaaaactaaatatacaagtatgtatgtatttgtatctttcgaagtgacggtgcccttcactcgttttgagttatttcaaaatcat

SEQ ID NO: 38192 - DNA, 549 bp, DROSOPHILA
atgttctcctccagcgcctcggccgcgtccacatccttcaatctcggccagctgctgccattggccatcgccatcggagtgttgcatctgccgcagtttctgtgtcatgctgcctggacaaccagaacgccggaaagtttcattaacgatacgaccaccaccaccaccaccaccaccaccaccacaaccaagaccatgcaaatccaggcgatgcaggtgaactgcagccgggagctgctcgagatgcatctggagttgagccgtccctttcgcggattactctacgccaaggactttccgctggagtgtcgcgcacgtggcaaggactcgacgcgtctgcatctgcgcatcccaacatcgggttgcggagtgagggcagagccactggaggacggcagtctggagtatacggtgcgtgtgatgctgcaaaaggagcagaagttgcgccagagcaccgacatccttagctcggtgagatgccaacttccggccaatgcgatgggcatgccacttccggtgttgcgacaggaaaagggtcacgataggtaa

SEQ ID NO: 38193 - protein, 182 aa, DROSOPHILA
MFSSSASAASTSFNLGQLLPLAIAIGVLHLPQFLCHAAWTTRTPESFINDTTTTTTTTTTTTTKTMQIQAMQVNCSRELLEMHLELSRPFRGLLYAKDFPLECRARGKDSTRLHLRIPTSGCGVRAEPLEDGSLEYTVRVMLQKEQKLRQSTDILSSVRCQLPANAMGMPLPVLRQEKGHDR

SEQ ID NO: 38194 - DNA, 2501 bp, DROSOPHILA
attaattgaacttcttcagtttttaacaacttaacaacttaatatttaatcgaataaataattgaacttagtcgttatcaatgcaaactgaaaattatgctaccatcaatggggctattgtaacacttgcattcatttaaaactattaaagattgaatatatcgaatgtcatgcacttcgattaaatcacataatgtgaaataattatttaaaatcacgtttcaaatggaatgtcgctgtcatatgttttccgttttgatattcggctatttcgtgatgcgcatgatttttgcagagaagtcggggaaatccatggaaaaggggggcttacagctgctgctgctgctgctgctgctttggccgctttggctgtttggcctgttttgccgatgcggatatggcctgatgatgtttgctgttgcatcgcggaacggaacgctgtgtatactgtgtatcctcactaccaacaccaccaaccccccacccacgccactgactctctcgtcgggcgcccaacacgcgcccttgtgtgggtggtgggtggtgtgtattgggtcggtggtgggtgttagtggcttgtggatgctgggtggcctagtccatgccatgtgtttagtaagtcccctccctctgctacgctcccttgaaaagttcggcggcgctcgtgtcctttcggctgcgacgctgcgccgttcatccttttggtccagcgtcggcatcgcacagtggaatggaatgctaatcaatcgctcaaaaaccataaaaatatgacattttaaagagttaagccgataatttaaaacaataattaactaattggttgtaatttagtgtattttatgcatctcaacatctttatacacatgtttatgatatttcaaggttttattgctaaaaaatgtacaagcagcgagtgctagaaacatagcgtagataattttcttcacatttatgttgcacaaatattgtaatattattaaccaattttgaacatctaattatggtccgattgggcccactgtgcttcggcaacagagcgactcgtgccgagccgatggaaaccgaaacgaaaccgggctgctggctgatgtggcgctacatccgcaactcccgtagtcgtagtgacagcctttgccggatccggagccaggagcagagcggcgcaggacactacggcccaggaccaggacctgtaccgctgggcaaacgccactcgcttcgcccggagaggagagcagtctcggcagtggtcggcgaggctgtgtgccagcatcaccagcagcagcagcggcagcggcagcggcagcagcagaagtggcagcagcaacggcggcagcaccaggctgtgccactcagttacgcgcaacatttcaacgcaacgtcgtggcaattccaaatcggcggcagacgcgggcgtgcgcagcgcacgggcggattgcacgtaataaatcctccggaacgggctaaaaatacggcaaacgcaactaatcacacacaatagaaaccgaaaagagagctaactcttcgctaagaaaatcgtaaattttgcgtagcgtcttgcatgcgccatcttgcacgaaatcccacgaataatgtagcagaaaccggaaaccggactgaaaatatacataaataataaactttacgcaccaactaatttgaacacaaaatataaccaaaaaatacaaaaaattgctcatattttttttccgccgcgtgcgcgtttttcagtgtgtgtgtgtgtgtgtgcgtatgcgtgcgtgtgtgtgcgtgcgtatgtgtgggtgtgatttcgcgcgcgtgtgtgtgtcgctattttcttgttgttttttttttgggtaacttttttttgccgttctttaatccctggctgaaatgaaatacaacaaaataatgatcgaaatgcgagaagccaaggcgaaaatgtaaaacgggcaatgatgcaaacgcacatgagtaaaaaagagtaaataaaaaattaaaagaaaaaatatatatatacatatatttatagaaattatcaagttaattttaaggaaaacgaaacgcacaacaaaaaagccaaaatagatccagtaataaaactaatttaaaataatcacctaagtcaacaaactgcagtttcagcagcgcaaaaccgaggtaaactattggttaattaaaacgattaaacatatgctattaactttagggcagggaaaacattgttaagcattaaggaacaaataactgatagaagcaaaaccaaaacagaaaaatagaagatatcagcgaaaatcgttcgcttgcaggctgttatcactatgaaaatgtaaaactgttagtctaaaattagtttggctcaaatctcgctgactgacagcttacttaatctattatttaatttctttaccgtctctcaatagtttccttgacactattttcgcttttgccaaaagaaaaatcgggggaaaatcggatggctgccttcactcacacaaacccacacagacacacatttt

SEQ ID NO: 38195 - DNA, 501 bp, DROSOPHILA
atggtccgattgggcccactgtgcttcggcaacagagcgactcgtgccgagccgatggaaaccgaaacgaaaccgggctgctggctgatgtggcgctacatccgcaactcccgtagtcgtagtgacagcctttgccggatccggagccaggagcagagcggcgcaggacactacggcccaggaccaggacctgtaccgctgggcaaacgccactcgcttcgcccggagaggagagcagtctcggcagtggtcggcgaggctgtgtgccagcatcaccagcagcagcagcggcagcggcagcggcagcagcagaagtggcagcagcaacggcggcagcaccaggctgtgccactcagttacgcgcaacatttcaacgcaacgtcgtggcaattccaaatcggcggcagacgcgggcgtgcgcagcgcacgggcggattgcacgtaataaatcctccggaacgggctaaaaatacggcaaacgcaactaatcacacacaatag

SEQ ID NO: 38196 - protein, 166 aa, DROSOPHILA
MVRLGPLCFGNRATRAEPMETETKPGCWLMWRYIRNSRSRSDSLCRIRSQEQSGAGHYGPGPGPVPLGKRHSLRPERRAVSAVVGEAVCQHHQQQQRQRQRQQQKWQQQRRQHQAVPLSYAQHFNATSWQFQIGGRRGRAQRTGGLHVINPPERAKNTANATNHTQ

SEQ ID NO: 38197 - DNA, 2915 bp, DROSOPHILA
cgcccacagcaacgcctgcttattcacttttgtgacccaataaagtcgaattattccctttttccattcgcttttttcacttttgttttgtaattaggcgatctctgcgttcttttctatatataagtaaatatacatatatctttgcacatttatatttatctcaactgggccgttatttatttatattttgttctcctccttgtttttttttttactattattattattattatttggtcgagggcccaggcttaaatgcttctcaagtgcttttagccaatttttggtttgcattttgtggcatgccggcatcattgtcgctgctctctttgtgtcgctttcattttgggcatttgtgtgaaatgaacttggggcatatttaaattgctatggatgtggaagaggttgcatctgtgcgaattaaatgcgacagccaatgaattattctaaggattcatgccaacgccaggtgaaactgaggcgtactgaggggaattttttttttttttttttttttttaaataatttattagcttgggaatgctgtgcgtcgtcactgaatgccacttagattgtcatggtccttgggcaaaagcatttccatttccatgctgatcttatttaagggacagaccaaccaaaaaacgagccagctttactatggtatttttagtgaaattgctacattctgttctcttggctatggaatgtttgccatttgttaattaattgataaatacttggagtattttcgaccgtacagtgcctgacatgaacataaatcgaaatgcatggatattatggctcgatgctaaagtgaatgtcaaactgtgggctaatcagagtcaccaccaacaaataccgcctaaaaacacccactaactggcctgctgcctactgattacacgctcgagggcgttggcattgggtggttcagggatatgtgggtattgccatgggctgtttggagccaggagccaggagctagcagctgggcatggagaatggagcatgggtagcgggtagtggagagtgggtagtgggtagtcccccgcaattgccgcatgagcataatttgttgtaattaacataacgagccagcccaagcaataatggccaaaacttcccacactcgcagaagtgtgggtatttgaactgaagttggattgtttgctcttcgaggctggctgtgttgcctttgtccttcatccttttgtgtaattaatttgatttttttcgttttgttttcagtagtaagtagaaacgaacacacacacacacacacccacattcgcccacatgccgtggcataaataagttgttctctgctatttaggcagcatttatgaaaatgactttatgttagacatttgcaaaagagtttgtaaatatttcgtgagcgaagggatcgtttggcattaagcatacgccgtgtgtgtggcaaaaaaaaaagggatgtaattattaaacatttataagctagcataaaatgtttgctgctcgaatcgtttattttaatcgtgcattccaaagagttggctaagaaactaagcattaagtatacagcccagtggctaagggactttcaagcattttacgttaatgatccttaaacaatattccattaattaattaaagcatcacacatcgtccattgtcgttgcagcaacaagttgtcgaactatcgggctatgtcatcatactcgtcgaaaatgtggagggtaaaattaaactatacggctcaccgcccgatcgcgataatctggaagtgggcgatgagatactcgaggtcaatggcctgaccctggagaatatatcgcgcacggaggtcattcggcacatacacgacgtacggttaccccattacccattatccccccttgtggtcaacatcctgagcattcctaattaatttctatattcgtttcttcttttcgatccgctcgatacgtccgcagtgcatcaaatcctgcaccatttgtctgcgtgtgcgaaagaagaatgattcacgactgggtaagttcacgactctaaaagtaccaattaaattaaattatattaaatgaaacaataattaattattaattaaagttctgaagaacattgcatttccatttgttgatatttcgtcaattgttctcataatttaaaacatttaattggagaaatgtttgtgaaaagtttgacactcacaattaagtaaaagccgctatcaatttaatcacaatggctgccaaacctctctctaatcgcacgatcacctgtgcagttggagagccactggcagcccagttagagaaacaagttgtagttaactgtatatgtacaccaacgcgaatgcggatgagcacaagttggccaaaattaaatttggcctaaatttacttgatttatgtgggcaatgccttttggacgatgtcaatgtacattttacatttacatgtacatgcagacatcaatttgtacacgcgatcacaattcttcacatacatgtttatgtacatacatatgtacatagtattgcatttttgcattcaactggctattctaacatatatgtacatgtattttatatgtttgggtaaaacagatgctgtatcgcgatcacttaacaacttttattttcattttgtaaacacctaaaccacgcgatctcattattattattattatataaatttaaaacagctgttcaaattatcaaaacaaatctttaagagaagggcatcaatttcgcaaatctagcgaaaaaaaagagaaaaacaagtctgttgcaaattgtctctttttgaagcataaaatttgagaagagaaaatttaaagcagtcttgtttttctcttattttcttagatcaatattcgagtattaagtcaaaataacggtttaccgccagtgttgtccaatcagcttt

SEQ ID NO: 38198 - DNA, 288 bp, DROSOPHILA
atggagaatggagcatgggtagcgggtagtggagagtgggtacaacaagttgtcgaactatcgggctatgtcatcatactcgtcgaaaatgtggagggtaaaattaaactatacggctcaccgcccgatcgcgataatctggaagtgggcgatgagatactcgaggtcaatggcctgaccctggagaatatatcgcgcacggaggtcattcggcacatacacgacgtacggttaccccattacccattatccccccttgtggtcaacatcctgagcattcctaattaa

SEQ ID NO: 38199 - protein, 95 aa, DROSOPHILA
MENGAWVAGSGEWVQQVVELSGYVIILVENVEGKIKLYGSPPDRDNLEVGDEILEVNGLTLENISRTEVIRHIHDVRLPHYPLSPLVVNILSIPN

SEQ ID NO: 38200 - DNA, 2729 bp, DROSOPHILA
aagagtgagggggcggtaggttcaacgacatgtagcgacatcgaggctgacaacgcggcgcctaattggatctggctcgagcgctccacttttgcccgggcacgcctgcggggtatcaaggcgggcgacgggagacgggggtcggctggtgggcggcgggtgttgggggatgcgccctcggatcgaggacgtctttagccccatacgtaccccatacccagcagcctgtaaagcccaccgcttttcgacgcaatcaacagccgaaaacgcaagggcagcgaaatgaaattaaagccgaggtcatggaaggggtggtggttgcttagtgggcgtattggacttggactggggctttggcttggtttcgcttcgttttttgcgatgggagtgcagccgaaaagcaataaaagtgacaagaaaagttgagacgctgagtgggcgacgaagaataaggataaggacaaggagaacgtggatttgggagtggggagtacagtgggttagtcgttactgtcagcaaccagcaaatttttagcaaaacttttggccacctccaacttcctaagcaaaaaaaaaccaaaaaaaaaaacccacacatactcaaaaaaaaaaaaagaaaaaaacaagaaaaagaaacaggcataaaaacgattcccaggtggcaagatttttgtgacccgtgaatgcactcatgaatatgtatcgaatgattcgtttagagcgccgtgaatgcagcgaatgagcgatcggggaataccaaaaatccaaaaaggactaagccgcacttgctgcctgtcataatgacgcaaatcattgcttaggtcagtgacggtgaatacccaaaacgatcacaggcggctttcgtcactagaccggaatgtattcgatacatatacacatgtatgtatatatgtggcatcctgttgggatgaattaagggttagcttataacgctaagttatgatacttaatgtacaatacaacaactaaatataagagcatgccttcgtcaccagaccaaatcttctgtcgatttttggggctctttctgctcgacagatcccggtcaattaggctccctgctaaatgtttaatgtcccaaattaattattccatccacttgtcctccctcttgcagcctgggacattggcaactcggtgcaggacgccttcgtcatcgccgtcgaggagcacgcccgcgaacgtctgcagagattggcggccttgaaccgggtcacgcccgtcgacatcacccagctgtccaagaaggtgagtgacccgcccaattggccttcatatccatgccaatttctggttgggagtttgatcacagcgttatggaattttttgtaagaatttcaagtttaattgaactcgcattttcccaaattgttaattcacttctgaggattttacgttttttttttttttaacgaaattttctttgcctacgaatttaacgggaggtttttaagagttttttttttcttccatttaaaaggtggaatatctagcatacttttccaattaaaaagttttctggcttgcaaaggagttatatacatatattctttggttattttcgggaaatttcggttgcaaacttgccagtttcttcacacttgccttgcatttccacggaattttccgaagttttaatgacacatggtctggaacatttttcaagttttcaacactaattaaatcaaaatttcagttgagaaattaatttttagctggcatgtaaggtaatgctttacgaaattgaggcaactacagagattggaaaccaatttgggattataggtcaactgcggcaattcgttgttgttgttgttgttttctatacaggattaacttattgttttttgccgaaggacattagcaagaccaagacttctttccgagaaataacattgctgtttttaggttttcccatgttttttttaagcggggggcttccgtaggattttctcttgcgtctgctgaaaatgcatatttgatggaaaggaaaagaaggaaagaaaaaaaatgggaaatcagaatggggaattcccggaaagtgctacaccatttttctcctctcctttttttttgccggtttgtgtggcgtgtggcattgaggcaaacatgaatgtgagccatttatttgcaggctgtgtatttggcccgatttggttgggaaactgaaattgaaaacgaaaacgttttatcaaaacagctttctatcacacatggtgtggagtccactgttattggcataactgagtgaccggaggccactcccaaataccaaatacaaaatagaaaatacaaaatacaaaaaacaaaaaaaaaaacaccacacagcttgcaagatacaaaatgcgaaatgcaaaaaatgaggaagtatgctcgctcacaaaattcaattaaaaattcaacaaacccaacacgagccagtagactaaactcgtagactacaaaaaccatataacatagtggactgaaactaaaagtggaaacaaaaacacagacacacaactaaggtaaaaagtgaataaaacaaagaaaagctcacaacaaatgttgtataaacttgaaaacaaaatcaaaaaaaaaaaaataaaattgccatcaaagttacgcaaaacatgaggaaaaaaaatcgaggaaaataaaacattaaaataaaagaaacagatacagatacaaatacagatacagatacatttacagatacaaataca

SEQ ID NO: 38201 - DNA, 171 bp, DROSOPHILA
atgccttcgtcaccagaccaaatcttctcctgggacattggcaactcggtgcaggacgccttcgtcatcgccgtcgaggagcacgcccgcgaacgtctgcagagattggcggccttgaaccgggtcacgcccgtcgacatcacccagctgtccaagaagttgagaaattaa

SEQ ID NO: 38202 - protein, 56 aa, DROSOPHILA
MPSSPDQIFSWDIGNSVQDAFVIAVEEHARERLQRLAALNRVTPVDITQLSKKLRN

SEQ ID NO: 38203 - DNA, 4130 bp, DROSOPHILA
ccgataaaatgcgaacaaaaaatacgctcacggcgtatgtgtggcttgaaaaaaaaaaagaaaaagaattatatagatatacgtacatataagccatagggagtgaagtgagaatgtgccacaggcgttaagtacgcagatccccatactcgttcatttttttctttgtatatatatatatatacatatatattttcattctactaacccccccatcagcttagccgtctcatcctcaggtaattgcatcaaaagagccccataattcaacttgttcatttatttgcacttttttttttttatttttttatatgctgacacttagccatagccattggcatacgtgtaagggcgcgacttaacctgccgatgaaggttaaggccaattggattggctaggatatagtatgtggagtatatatattcgagacctaaatgcgtcttaattgacaggcactgaatgcgttgtagattgtggggtgcagttccagtgggttttttggtgggtcgtataaaaaacccacaagaatggaacaaaaaaaaaaaaaaaatggaatgaaatacaaacctaacccagacgcagacacacccacacacacacacacatgacgcccagccacatccattatgtgttcgtcgcattaataattcatatttcattaggggaacagcatcaatacacagaaccacgacttcagcgtgggcgtggcagtgaaggtgggcgttagcttggttagctttattttaatggaatttgattgatttgcatactataactcgtacatacattcatatatgcgaaacgaagcctgtcagcgttgttaaacgatgacagtttttagctcttacttattttttggtgttcgctgttcgctgtttgtgctgccacaatgaaaagtgcaaacagaaatttagatgatgatggtttgacaatgtgtgctggtgcactcaataaaatggttatcataatagtcgcatgaagtgcaacacgtgtagtcaaatgtttgacagttttcaacgagtaaatatccatagcacgttgaaaaatgaatttatttcaagtttgagggcgtttttctcattgttttatggtgatctttaatgaagaataacaatttgatatatttgaacttttgtttaacacttgagaaggaaaaatattcgactttttggtgtttgtgatttctgtgctcacacctttacattctgaatttttttccacacatttgtcgattggaacagctgcagcaaacgaagagcggcactgcgaccagtcagcgccaggatctcagcttcctgaacgaatcgacgccgatctatgtgacatccttcacgagcaaccagatcacctgcagcagttccacaatgacgacggccaccgccggcggtccgatcagtgcaccatcgctggcgacggccactaccaccgtgccgacggcatcctcccacaccaccacggtggtggcccagatcgagcacggtgcatcggcgctggtcagtgccgctgtggcagcagccactgcagcggatcgcaatgcgaatagcacaacgtcggcggccctaaaacagacggccaattgcattgggaatagcacaagcagtcttggcacgaccagcaccaccagcagccaatcgaccagcagtgccacgggccacatctaccagaccagtcaggcgcagcagcagcagttgcaacagttgcagcagcagcttgcggcagcagcggcggctggaaagccattgcaggccaaatccctgctggccagcagcttgcaacatctggccgaggaggtggacaacgaggatctggacgatgatgacgatgtggatggggcaaactattgtggcataacctatataagctacaacaacaaacatgcccagttgccgacgacaacattgccggcgacgaccgcattgccagcggcagctgcatcattggccacaacggcggcgatttaccaacagaggcagcagcaacaacatcagcagcagcagcaacagcagcagcagccggtgcaccaccacaaccacccaccaacggcgagccaactgaatagagccacagcaccggcgccactgcagcttggaggtcctgtcaatcccagtttcgtggatgcccagacatccacatcaccgctgatggcacagcagcttcattcgcagcatgcggatgtggatgcagcgccaccatcgtcgtcatcatcatcagcggtggtggtggtggagcggcatgtgcatggcaccaccacgcccaaaacggagtactccacggccatatccagtggccaactgcaacaggcctttgccgaattgcagctccactcgagcaacaataatgcaacacagcagcagcagcaacatttacttttaagcaacaacaataatagcaataattcaatggcagcggcacagacaacggcatctctgatgaagaattgtgatctactgatatcgaacaatctgtatccaccgagaagagaggtgatatatttgaattacaggtgtcgcatgattgaccaccacgcatttgtgtgtattttgttgttattctttggttttttttttgtggaatattgagtttcctttttggcagcaattgattgattttcattaaattttaaattgagaaattcatttggttctagcttgtattgagtttcactctcttgaatttccttgtgcgtgtgcaagtgaattacgaattgatttcgaagttgttcaataatttatttaattgggcttataattggatttattatctgaaatgaatgatttgttttgagccagcatttgcctgcgattgtgttttattttataatttatatgcatttctcccattccacagttactagaagacgtcatagtccatcaagccagtgatgtgcattcatacagcacgagtgcatcagcagcagcgatcgccagcagcagcaacagatcacagcaacagcaacagcagcagcagcagcatcagttgctgagtgccgcctacgagttgcagcaacagcagcaattgcaacttcagcagcagcagcagcaacagaacagtcccacaagtagcatatcaattggaagaactgaacttttactgggcgatcagagtttgcggcaggatcccagagggtgagtttatacaacatctatttaatatctgcataagtttattagtagtataagttactgtattaatagggagtcactgtgtccttgctaaatgatctcgcgggaagtcgaataatgtgtagcctaacctgcaggcgctttccggtagcagtgcttgtcaaactgccttgtttttcgtttgtttgtctgctgatttatttgaccaacactgcgagcgtgtttgtgtgtctgtgtttgcattttatgaagcatttattaccgctcctcggcgctcccctctcttcccttcctttcgcttccttttttcatatttgttttctttttttttgccaactttggtagctactggtccacagcgatggccctccggcttgaatggaatttttcgcgctgcggaaatacccaacatgtggcccacacacacatacacacactcgcacacacatatgcacacccaaatgcactgacacactgcacgagctgagtttttatgactgcttatttatttactcgctctgctcgctgggttttccacctggctggatcgcagcagctccgccctgcatccttattcccattcacatccgcatccgcattcgcatccgcattcgtatccgcattcgcatccttgttcgagctccgcctttggccatcgctgacatttttcacacatttttcccagtgctcgcactccgtccctctcgttttggcaccacccaacccctccccctcgttcgtccttgccaaacgaacctgttgtgatttcgccttcagcgacaaactattcgcagacagcagcggaaaagtgattagcaaccatatgatgcgttgggtgcttaacgcaattatttctatgttttagttgtgatcttatttgcaaagcttgaaaattttttttaacaaggtatttaggtagaaattttatttcctcgggttcctgattttgaatatgtatatttatggcctgcgctgtacgcatccgcgtaagtcaacccagcatcctt

SEQ ID NO: 38204 - DNA, 1545 bp, DROSOPHILA
atgtttgacagttttcaacgactgcagcaaacgaagagcggcactgcgaccagtcagcgccaggatctcagcttcctgaacgaatcgacgccgatctatgtgacatccttcacgagcaaccagatcacctgcagcagttccacaatgacgacggccaccgccggcggtccgatcagtgcaccatcgctggcgacggccactaccaccgtgccgacggcatcctcccacaccaccacggtggtggcccagatcgagcacggtgcatcggcgctggtcagtgccgctgtggcagcagccactgcagcggatcgcaatgcgaatagcacaacgtcggcggccctaaaacagacggccaattgcattgggaatagcacaagcagtcttggcacgaccagcaccaccagcagccaatcgaccagcagtgccacgggccacatctaccagaccagtcaggcgcagcagcagcagttgcaacagttgcagcagcagcttgcggcagcagcggcggctggaaagccattgcaggccaaatccctgctggccagcagcttgcaacatctggccgaggaggtggacaacgaggatctggacgatgatgacgatgtggatggggcaaactattgtggcataacctatataagctacaacaacaaacatgcccagttgccgacgacaacattgccggcgacgaccgcattgccagcggcagctgcatcattggccacaacggcggcgatttaccaacagaggcagcagcaacaacatcagcagcagcagcaacagcagcagcagccggtgcaccaccacaaccacccaccaacggcgagccaactgaatagagccacagcaccggcgccactgcagcttggaggtcctgtcaatcccagtttcgtggatgcccagacatccacatcaccgctgatggcacagcagcttcattcgcagcatgcggatgtggatgcagcgccaccatcgtcgtcatcatcatcagcggtggtggtggtggagcggcatgtgcatggcaccaccacgcccaaaacggagtactccacggccatatccagtggccaactgcaacaggcctttgccgaattgcagctccactcgagcaacaataatgcaacacagcagcagcagcaacatttacttttaagcaacaacaataatagcaataattcaatggcagcggcacagacaacggcatctctgatgaagaattgtgatctactgatatcgaacaatctgtatccaccgagaagagagttactagaagacgtcatagtccatcaagccagtgatgtgcattcatacagcacgagtgcatcagcagcagcgatcgccagcagcagcaacagatcacagcaacagcaacagcagcagcagcagcatcagttgctgagtgccgcctacgagttgcagcaacagcagcaattgcaacttcagcagcagcagcagcaacagaacagtcccacaagtagcatatcaattggaagaactgaacttttactgggcgatcagagtttgcggcaggatcccagagggtga

SEQ ID NO: 38205 - protein, 514 aa, DROSOPHILA
MFDSFQRLQQTKSGTATSQRQDLSFLNESTPIYVTSFTSNQITCSSSTMTTATAGGPISAPSLATATTTVPTASSHTTTVVAQIEHGASALVSAAVAAATAADRNANSTTSAALKQTANCIGNSTSSLGTTSTTSSQSTSSATGHIYQTSQAQQQQLQQLQQQLAAAAAAGKPLQAKSLLASSLQHLAEEVDNEDLDDDDDVDGANYCGITYISYNNKHAQLPTTTLPATTALPAAAASLATTAAIYQQRQQQQHQQQQQQQQQPVHHHNHPPTASQLNRATAPAPLQLGGPVNPSFVDAQTSTSPLMAQQLHSQHADVDAAPPSSSSSSAVVVVERHVHGTTTPKTEYSTAISSGQLQQAFAELQLHSSNNNATQQQQQHLLLSNNNNSNNSMAAAQTTASLMKNCDLLISNNLYPPRRELLEDVIVHQASDVHSYSTSASAAAIASSSNRSQQQQQQQQQHQLLSAAYELQQQQQLQLQQQQQQQNSPTSSISIGRTELLLGDQSLRQDPRG

SEQ ID NO: 38206 - DNA, 7308 bp, DROSOPHILA
aatcttacttaagctattgcattgagtactttgctctctatgtagtccatcaaatgcatttacagatatgtactttttgatctgaaaaatcccccaaagtgatgtgttttgttttgtttttgctctgtgcgaatcggttggtgggtcacgtattggagctactgccactgacgttcatcattacccaaagggattccagaagggaaaactgaagatggagctggagctggtgatggtgatggtgatgaagatggggttaagactgcagtccaatgtcgttgccaggctgcggctgaaattgcttttgtcgcatcagcgcctgtagaagggcgataaagcgattgggggctgggatgggttgagttgggttgggttgggttgggaattgggactgactgaatggcagtgcatacttctaggctggtccggcattaaatccactttgagctttttgcaattagccagccgacttggcccacatccacatccacatccacatccctatgccatccacgagcaaagtccataatccgaaagccgaacaaattaaggcacaaattgccttcaaccccagccaccttgcataatgaaagagccacgcaaaagtgcaaagttataacaaagttttcggcgagcataccattttcaagttggcctatacctttaacgttacctctacttcgtctaagcgccgcaaaaaaaaagtctctttgtgcggataactttttgaaataataaaagaggctgtcaccgcccacccgacccccggccagtggctgccaaactgtgtccgccacctgggccaaaattgaaagcacagtaaatgcctgccatcgacagaagctgccaatttgcatcgacacagtgcatccgaaagtgcagcaaacgactttaatatttttcaccagaaagtagcttatttaaaatgcttttagacaatagaaaccagatcaatttgctaataaatactaataaattgataactttttacttgtacataatgactcaatgctcaaagtcaaccatttaagctattgcaaatcctttttattctgaccgagatctcaccggtaatccctttttgtgcgccggttcaactgatttgtatccggacctcaactgacggaatccaccttttcttttcgttttatgttcgatttgcgattgacaggaatcgccggcgctccggatcgagcattgttgtgctggatggcgacgatttgaagccatgtctgccggatgactacataagcggtcagcatcatttgaaccaccagcagcagctgcaactgcagcagcagctgcagcagcaacatccgctccagcagcaacactatcgcacgcactcgggcgacatcagggagattgaccaggaaatgttgaccatgttgtccgtgaaccaagataacggtgagtgtccaacatcgcccacgttcaccaacaatcgaactgacccaagttccgctctgttctatgccattccataccattttgttcaggtccacaccgtgagatggccgtcgattgtccggacacgttcatcgcacgcaacaagacgccaccccgatatccgccaccccgtccaccacaggtaagcataagcgggcatccgtagtccgtactatgcaatccgtaatctgcaatccgtacaagaaccacccacccagtccaacgtacaatcacaaccacagaaccactacacaacacacccagccaccagaaattccaaaccagttgaaaccataggccaacgataactttgcataaatcgaggcagcgtagtgcttgtgaaattgccaaagccgagaattactaacaacattttgccacattcacttaggctaatgtgtatatatatacatatatatgtgtttggaatctggcaaaaaccatgagtcccattaacagcaaccaaccaaaatcgaaatattcccaaaattgtaatgccaatgctcagttcatttacataacaaccgcttagtggactccaatggaaaccccttaaattaaaaacaataaccacattaagttgaaagtgaataacaaacatccagcaactaataaccaacccgcatttgtccttaactaacaatgactacaaccaccaaccaaaagacccaaaaaaaaaaacgtattttttaatcaacaaccaacgtttatgtagaaatcaacaacataaacccacctaaaaaatagacgtaactaaccaaagccactccaattcacattcaaatcattcacacatgcattcattcttttttcaccaacaccacatgcaccaccaccaacaccaccaccacatgcaccacttaacccacacgcacacagaaacacaagaaaagcaccaacaccaccaccaccaccacaatcacagctttgactaacaatgatcatgctaacaaaatgttaattgttgcatatcattcttcacatcaacatgaacaactacaacaacaacacccatcaaaaacatcaacaacaacaacaacaattgcactcgatgtggccacacaaaatttgtacaatcaaaaacaacaaaacaaattggaacaaatcgaaaactatgaaaattgcctgcaatcggaacgaaatgaacaacacgaacaacaatttgaacaacagaagcaacatcaagcgacaaccgcaatggcagcaacacaggtggcacaacagcagacgcccagccacaagttgcaggcaacattgagcagcgatccgaatggcaacagcaatagcaacaacaatagccacatagttggcatcagcagcagcagcagcagcaacaacagcagcatcaccgatgatttcctgtgcgttgtggatggcctgtatcagggacgcaaggacacggcctcgccctcatcgagcgccttcgatgaggtgatgagcaaacataccctggactcctttggcagcatcgcctatcgtcacctgcaccagcagcatcaggcgacgagcaatggcaacagcagcagcaacacgagcaataccaacagcaacaccaacagcaacaccaacagcaacagcaacaccaatggcaacacgagcaacaacacagctgtttcaaccaaaacggcaacggtgaccaaaacaggcgtgagcagcagcaacagcaacagcaactcgctgaacagcagcaacagctcgatgcacacgagcagcagcagcagcggtcacagcagcaacatagccagtgccacatcatcatcatccgccaccagcagctcaacggtgcccgatgatctgagcctggcgccacccggctacgaggtgagccagcagcagcagcaacaacatttggttgcaacgcccgtgaccatgttgctgccaccgatggccaagcatcgcgagctgcccgttgacgtaccggacagctttatcgagatggtcaagaccacgccaagatatccgccaccagctcatctctcctcacgcggatcgctattgtcgaacggcagcgcctccaccgcccacaccacgctctcctcgatgggcgtggcgccttcgcctgtcactgcaacagcagcagcagcagcatcagcatcagcagcatgtgcaaccactgcggttgctgctgctgcggtttctggtgttgctgacggcgatgcgaggcgggtggccgatgaggtataccacattgcattttgtactcgctatctgtctcagcctttcactggcgtctctccactctgctctctttctctctctctctctctatcacccgtttcgctctactccgtttctctaagtctctaattctctaattcactaatctctctgaatctgaatcctttcattttagtgtgtgtttttcagtgatgtgttttggcagttgattaagttcaggggcaaatggtaatccctgcaacgcaacgaaagcaaaacatttgaaatgtactcgaatatattattaattgcagactttaaagaagtgctaaactatattagttgaaagcatttaattacctttattctaaaaaaaaatgctcgaagtcaacgcgcaattttagccacaatttaattagtaaaattgggcatgcataggcgtgattataacggattatttgcaataatacataccgttagccaccaaaacaattgcgttaaaatgccaaaaagacaacataaagcataaaaccttgatagaaacggcaaatgaaaatccctgctaatagctatttaaaatagaattaaaaaaaaaagagagagaaaaaccatgacagttgaatgggttccatgaatatggcattaaatgtttagagaaccggaaattatgaaatgacccatatatgtatgtacatatgtatgtatgtacatacacacacataagcgagtattaaatgtgaatcgataattttagcgaccccaaacgcggctaattaacaccgggcgcacttaaccccgcatcatacgcattgattccctttcttgtattcggcggtgcaggtccgaccgggagccgtttcagcctccagttgacccatagaccccggtatccaaccaaccaaccaaccaaccaaccaaccaaccaaccagctacccaaaccactcagcttgtcaccttgttcagccggttggcctaattcacggcatcagagccgctgcgttggcctcgttagcggggcataatcctaacagcattgagccacacaaacacgcacacacacacacacacacccattcgtgccacctcctggccaaccaaccactcggtgggtggtgtcggtggtgccaccgcctgctgttccgcttatttcatcatttgcagctcgctagctagcactttgaaaaaacccaccacaccccgccacgcctcggctcagccgcccattttcctgcgctggaaaatgctcttttcaggcgatgaaaaataaatgccatttatatgaaattgctctcgattaattttccaatggctgcagaacaaaagcaaaatgtgcgcctttctttcattcgctttcgtcatattctttattttccgacgaaacaaaaaaggaatcataaaaggaaatgcatttaaatacgtactgtattcaatttgcgccagtaaatgaaaccaacaaagaaatgagccaaaatgttagggaagagtattttctttctttgtttttttaagttttaaatagatgcaaacataacaatatttatgaaatatcatgaacacatttttcgaaaataattgaaggtgaaggtttggtttcatgcacacttttcactcgatgtaaggacatttttcgtgtgaacactggcaacaaataaactcatgcaactttaatgaccatcagccatacacacacacacacacacacacacacacactcataagcacacactcacacacttacaaacactcgacttgaaaacgtatgctacgtagtatgcacgcaactaatggaacgctctactccgcacagctcaatgggaatgcgaagcccgtaccgccgccacgtgatcatctgcgggtggagaaggatggtcggctggtcaattgctcacccgcaccacagctgccggatcgcagggcgccgggaaatgcgagcagcggcagcagcggcgccacaacgcatccgctgcagcatcagcagatcgcccagattgttgagcccacattggagcagctggacagcatcaagaaataccaggtgagtggtatgcctctcaaactgtatgccatttgtgcacgcatcccaatggttaggctacaaaaactttcgcattctcaaactgtgccaagaatataacttaatttatacaaacgtttaaattacttttgaatgcatttttattgactttcttaagaaaatccttaattccttaaaaacaaaattaaaggttatattgatcacaatgaaattatcctgctaaatgcttctactttgctaaggagtggcattaaatagttatgttttaaaactacccaggtcttaattagttaattcgaattaaaaattgttcatccatttatttttcgttataactgtgctgcgaaatatttggtaaatcccagtaagagttccattgtttagaattttcttttggcccgaatgcagctcattagcattcatggcagtggcactcacccacttcctcctccgtcatccataaatgcctttttgattaatgtcggcttcaatgcttccggtttgagccacgttctttcgttgtttccattgttatgaccaataatcgctaaatgttcagttacttcttcgttggtaagccaatggccaatggccattgaccgtctccagttagctccaaactgtaatcatcacaagcggccgccctgcgaaagatcatccaactaaccaaatacaaagtgtgaaatttttcatgatttttattgtcccggcctgaccattgcatttaactagtaaaactattaaaaagtttaccgcaccgaaagacaataaacctgacgacaggggcgggggcaacgtcgggggcgtaacggtattgtgtgtgtgtgggggcgtgaaaaagttgcccaacaactttttctgtctgtgcactcgaaagtggcaagagttggggttcaaaagcgagttaaaagcagtggaaggtggttaatatgaggggggggggggtaaaggggcgctggaagtggaattataatgccgtttaaaagtaaaacattttgcattcatttggaaggctgcaggccatgtgggtgggattttccatgggcgtgctaacaaaattggaggggggtgggtatgatgaaacggggggtttatgatgattcaccaagcgagatggtaaggatgtgggaggagggtgggggctggtaatgtttgccataggcgttgtttcataggaagccatcaagagacgggggcatggtgaaaagttgtttaatgcaatgattaattatgcaacttttaatcgaattgttacgttccgccctcagccacgcccacccccacctacgtacagacagagacagagctatagaaacaaaaaatagagcgacagagacggcggatggagaagggaggcggcaatagggcaaagtggtggctaaaacacatttgctaaatgtaattaattgaaaactgcaaagcgactagtgccatacagtttgacagccattgagctgtgcgggggggaaatgaaaaaaaaaaacagcacacactattaagtgtaaaaagcgagtggggttgtgggtgggtgatggtggtgattatggatgtaagctcattaggagaacgaagccacaaatgggtgatgcaaaggggtggggggggaggtgggttggcgacggataatgggaacgcacataaaatctaccttcatgcatttgtgcgt

SEQ ID NO: 38207 - DNA, 1638 bp, DROSOPHILA
atgactcaatgctcaaagaatcgccggcgctccggatcgagcattgttgtgctggatggcgacgatttgaagccatgtctgccggatgactacataagcggtcagcatcatttgaaccaccagcagcagctgcaactgcagcagcagctgcagcagcaacatccgctccagcagcaacactatcgcacgcactcgggcgacatcagggagattgaccaggaaatgttgaccatgttgtccgtgaaccaagataacggtccacaccgtgagatggccgtcgattgtccggacacgttcatcgcacgcaacaagacgccaccccgatatccgccaccccgtccaccacagaagcaacatcaagcgacaaccgcaatggcagcaacacaggtggcacaacagcagacgcccagccacaagttgcaggcaacattgagcagcgatccgaatggcaacagcaatagcaacaacaatagccacatagttggcatcagcagcagcagcagcagcaacaacagcagcatcaccgatgatttcctgtgcgttgtggatggcctgtatcagggacgcaaggacacggcctcgccctcatcgagcgccttcgatgaggtgatgagcaaacataccctggactcctttggcagcatcgcctatcgtcacctgcaccagcagcatcaggcgacgagcaatggcaacagcagcagcaacacgagcaataccaacagcaacaccaacagcaacaccaacagcaacagcaacaccaatggcaacacgagcaacaacacagctgtttcaaccaaaacggcaacggtgaccaaaacaggcgtgagcagcagcaacagcaacagcaactcgctgaacagcagcaacagctcgatgcacacgagcagcagcagcagcggtcacagcagcaacatagccagtgccacatcatcatcatccgccaccagcagctcaacggtgcccgatgatctgagcctggcgccacccggctacgaggtgagccagcagcagcagcaacaacatttggttgcaacgcccgtgaccatgttgctgccaccgatggccaagcatcgcgagctgcccgttgacgtaccggacagctttatcgagatggtcaagaccacgccaagatatccgccaccagctcatctctcctcacgcggatcgctattgtcgaacggcagcgcctccaccgcccacaccacgctctcctcgatgggcgtggcgccttcgcctgtcactgcaacagcagcagcagcagcatcagcatcagcagcatgtgcaaccactgcggttgctgctgctgcggtttctggtgttgctgacggcgatgcgaggcgggtggccgatgagctcaatgggaatgcgaagcccgtaccgccgccacgtgatcatctgcgggtggagaaggatggtcggctggtcaattgctcacccgcaccacagctgccggatcgcagggcgccgggaaatgcgagcagcggcagcagcggcgccacaacgcatccgctgcagcatcagcagatcgcccagattgttgagcccacattggagcagctggacagcatcaagaaataccagttagctccaaactgtaatcatcacaagcggccgccctgcgaaagatcatccaactaa

SEQ ID NO: 38208 - protein, 545 aa, DROSOPHILA
MTQCSKNRRRSGSSIVVLDGDDLKPCLPDDYISGQHHLNHQQQLQLQQQLQQQHPLQQQHYRTHSGDIREIDQEMLTMLSVNQDNGPHREMAVDCPDTFIARNKTPPRYPPPRPPQKQHQATTAMAATQVAQQQTPSHKLQATLSSDPNGNSNSNNNSHIVGISSSSSSNNSSITDDFLCVVDGLYQGRKDTASPSSSAFDEVMSKHTLDSFGSIAYRHLHQQHQATSNGNSSSNTSNTNSNTNSNTNSNSNTNGNTSNNTAVSTKTATVTKTGVSSSNSNSNSLNSSNSSMHTSSSSSGHSSNIASATSSSSATSSSTVPDDLSLAPPGYEVSQQQQQQHLVATPVTMLLPPMAKHRELPVDVPDSFIEMVKTTPRYPPPAHLSSRGSLLSNGSASTAHTTLSSMGVAPSPVTATAAAAASASAACATTAVAAAAVSGVADGDARRVADELNGNAKPVPPPRDHLRVEKDGRLVNCSPAPQLPDRRAPGNASSGSSGATTHPLQHQQIAQIVEPTLEQLDSIKKYQLAPNCNHHKRPPCERSSN

SEQ ID NO: 38209 - DNA, 2426 bp, DROSOPHILA
agaaaagtgttaccatgcttcattgagagtgagatcgtctctgactaattaagtaaattcgtcgtacattcaagaaagcatataaattaaaaagaaattgtcatttgagctgagagtctatagtttttgcgtaaacagtatgaaagatgcgcattgtacatatttatgaataataaatatatcacatacttttatcatactccaatcaagtgattgcctgttttggactttgctctgactcacaactcgcaaatacctacagcaggcagctgaaaaattttaatataaatgataaacagttgaggtgaactgttttacttttttttcacttatttgttttattttttgttattttttttaccgtgaaggtgtatgtgtgcgagtgcttcttattgttattgatgtgccaagcgtaaatgcagcgtcaacagcagcagtgcggctcattccagagttcaggcacgttgaatgctgaatgctgaatgctgaacgacggcagcaacaataaagtgaaaaaaattcaacaataacaaaaaagcccataaataaacaaataaacaaatgtgtaaaagtaaatagttgtaaattacacgagctgaaaggaaagctgccgctacttttgttgtgctagcagtgcgtgtctgggccagaactatttcggccatctcaactttcgctttttatggcttttaatccactgcagcagcagcagcagcagcagcagaaaaagcagcagcattaacagcagcaatttgagttgaaatgcgcattaagttgcatttcatttggaacacactattcacaattccccatgcaaatttatgcactgcccaggtgtgggcgtggccatttgcatagttgctgctgctgctgctgctgctgcagcatctggtgacagtttccattttggttaccatttcggtttcggtttgctaggaaagattgtcgccgcacctcgtcgcgccacgcagacaaagatcgatgaaagtgcagctcgaaaatggtcgtgtccactttgcacataacgctggagaacaacggcaatgttgctgcggggcagcctgctgccgttgctgctgccagtgtcgttggggcagcaacatcgccgaccaagtttgccgtgctgtcggcgcagcagctgcaactgcaactgcagcagcagcagcagcagcagaacgaaaaggagaaccatatgaacaataataacaataacagcgactattgtgatatgaatggcaatggagttggaatgggaaacggtggtagtggtggaccgggatctctgaccccccaatcccccgaccaatatgtcggctcacctgtatcatccgctgccacgccccagcgcaccgcctccgccctgcgtcgcggcattcaaattcaacgatcctcgacgcgtttgcgacaacaacaggcaagtcaataggttatacctgcgtcatgggaagtacatacatatcttcacaaaggcacatactgtactcgtaattaagaagttattcaaagcacaataatgtgaccagagcctcaatggcggaggtgtgaccaaagtggcatttaaggctgccaaaactattaaactgatagaaactaaagtgtatcataaacttggggaaagttttgccttaatgtgattaacgtttttttaaacctcgaactttgcatatacctggatctgatcagatcgtacgtatatgcactgttgccagcgacaactggctttatctgcataaatgctaacgaaaacacagcggcaatagcaacaacagcaacaaccagttgacaacttggctaactggctgccgagccataaaaaaaattagaaataaaacgaaaaaaggcaaaaacaatttacctaagcgatagccaaactgtcgcattgagttgaggaattaccaaataccctaggttcccacacattgttaagacgtagagataaccgagcataccccacaaacgactcagagggtattggcagtaatatatttttaatttccccggtacgcgtttgtatttttcaatatttgttatttatttatgccggcatttgttggcaacggcaattgagatgatgatgtcatggtgttgttgccgtcgccaattgttattgtcttttgaagtatgccccttcttttaatatttttcaccttttatgctttgttttttttttagtattttacaatttgctcaaggtgtttttgttgttggcgtaagatgattgatggtctcaactcaccataaaatcaataccttcgcctatttataggacttttgcgtgggagttgttgcctgccttgttggttttaattgcttgagctgaaattcaaatctctaagctgcacctaaactctcatttaatgggaaaatgcatagtattgattacagaaagcagttttcctagaattacctaacataattaacgcagc

SEQ ID NO: 38210 - DNA, 426 bp, DROSOPHILA
atggtcgtgtccactttgcacataacgctggagaacaacggcaatgttgctgcggggcagcctgctgccgttgctgctgccagtgtcgttggggcagcaacatcgccgaccaagtttgccgtgctgtcggcgcagcagctgcaactgcaactgcagcagcagcagcagcagcagaacgaaaaggagaaccatatgaacaataataacaataacagcgactattgtgatatgaatggcaatggagttggaatgggaaacggtggtagtggtggaccgggatctctgaccccccaatcccccgaccaatatgtcggctcacctgtatcatccgctgccacgccccagcgcaccgcctccgccctgcgtcgcggcattcaaattcaacgatcctcgacgcgtttgcgacaacaacaggcaagtcaatag

SEQ ID NO: 38211 - protein, 141 aa, DROSOPHILA
MVVSTLHITLENNGNVAAGQPAAVAAASVVGAATSPTKFAVLSAQQLQLQLQQQQQQQNEKENHMNNNNNNSDYCDMNGNGVGMGNGGSGGPGSLTPQSPDQYVGSPVSSAATPQRTASALRRGIQIQRSSTRLRQQQASQ

SEQ ID NO: 38212 - DNA, 2713 bp, DROSOPHILA
ctgcctgcagctgcactcatagttgttgtttctgctatcctaggtaaaccttcgcaggtaacgggggttgcttatgtgtgttcgctcgtgctcacattgaatggcaattggagagagtaaaaaagagaagcaaaaattactcattcaactttgttattgcttcgactgcttgtttttgttgctctacgccaagcgcgttgctgcatgtcgcgtgcgtgtgacgtcacgatcgccaattggggtggcacgagtttaattcaatggtgaaatattgaaaaaacagagtggatcctattataatattacaaaattatttttaaaatatttaatttgaaagtggacagaaactgttggcaaccaaaatttaaactatatatcattttttagagtggaccaaaattatattttattattatattttgaatttcatattgttcattttcagcaagaggagtattcgggagcgcctgtccagtgcctgattcccggaacgaatcagtgggcgctcattggggtctcctcctggcggatcgcgtgcggacccacgggcgtggagcggcccaggatgtacgacaagatcgcctcgaatgccgcctggatccgcgagacgatcagcgcgatatagtcgggatagttcaccagggggcggcggcacgcccctcagcgcatttgtgtagaaaacggaaccgaaactcactgggtattatgtgtgtgtgtagcaaagcaagtaaggcaattaagcatatgtactatgtaactaacctgctctaatgttactcgaacctatgtaactctatgctaactgtattctttaaacgtccttttttttgctgttttgtgtaatatttattaactatgttgtaattgtatgttaaacatgtcgaaaaggaagcaaatttagttgttagtctgtacgtttagctgtttgtagaaagatattgttgaataaaatgaaatcgtccaaaatcaagataatggctttactgggggtataccacaattaggtggacacgtgcatggatttccatttcccatccttctgaaggcggtactgcacccggtctgcgatttggtcgagacccaccttcaggaagtcccaacgctgcggttggaatttccaagcggtactagaagaagttgtaattatgtatatgttaatttactaaatatagatatacatataaacttcgaaactcactagcttgctggtctctcgatggattttcctctgtgatccagaaggaactgatcgtgctttgccttgagatcatcgtagttaatcggttctccacagggacagatgtgacccctgatttgggcagccaaattctccttcgcccacaaagcatccatttcgctttggtcaagttccacggcggtggctccaatcaatctcacctgccaggcattctgatttccggccttatccttaacatctggcatatagaaggtgatgcaggccttgggattggcctgaaggttcttgaagttgcgaacgtaccgatgggtgatgtagaacacacagttatcctgggtgagtccgcggtacagaacagtgcggttgagcacaccgaattcctcgtccacggtggccaggttcatttcctgtatgaatccatcgggatgtcccttggcagcttcctgaaggatctccttaaaaaattcaacgggatcggagggaaagtcctcgattttggccaaagaggaggtcatattggtgggtccttgaagcgaaaaatattcttatacattttgaaaatgtaatacacatttaatgttaattggtaaagccccttataactgaagtaatgtactgtcattcaaatttggcgcactttgcgcgctgttaacgctaacagcactgtaacagaagcgcagtactttgcagcggttctataatcgatagccgttgatttcacgttatatttgcgaagctatcggttactatcgatacatagaaacgaaacaaattctcccaattttcggctgaaaacgaggaacaccaactcgcgattctggggcggcagaacgggaaatcccgccgaggagcagcatgacctccattctggacatgaaggccggtccgcccgactactgggcggagatcagcaacttctttctgccgctgaaatacctgatcaccaacgaccgcttcgattcgatggtgcgggacatagacctctattacctgatcaacggggtcttttggatattcgtggcgttgtcttgcggctactacgccttccagcggctcttccaggtgggtccagcacgtggcaaatcctttcaatcgcagcaccctcgacgcggcgcctccaattgcacttttcttttgaggggttgctcggccaatttgccgtttataaataaacagagcggacacggtgccggattcgcgcattccgggggtggacggggtgccaaccgagtggggcgctaaaaatactgttaccaaccctttgaaaagcttcaaaacacaacgaaatgcggcactttttgtattgttttggcttgcaactaagctgtaaatgattattatttaaatatgttgtctcttgtaaaatcaatataaggcgaagatagtattgattttactcccgacagtcattgtttaagggattcagatgtacttccttccccattcggttggcacttcgctcctggctttggtgatagcataagtccggtgacagtcgacccatcggcgctgacc

SEQ ID NO: 38213 - DNA, 642 bp, DROSOPHILA
atgacctcctctttggccaaaatcgaggactttccctccgatcccgttgaattttttaaggagatccttcaggaagctgccaagggacatcccgatggattcatacaggaaatgaacctggccaccgtggacgaggaattcggtgtgctcaaccgcactgttctgtaccgcggactcacccaggataactgtgtgttctacatcacccatcggtacgttcgcaacttcaagaaccttcaggccaatcccaaggcctgcatcaccttctatatgccagatgttaaggataaggccggaaatcagaatgcctggcaggtgagattgattggagccaccgccgtggaacttgaccaaagcgaaatggatgctttgtgggcgaaggagaatttggctgcccaaatcaggggtcacatctgtccctgtggagaaccgattaactacgatgatctcaaggcaaagcacgatcagttccttctggatcacagaggaaaatccatcgagagaccagcaagctataccgcttggaaattccaaccgcagcgttgggacttcctgaaggtgggtctcgaccaaatcgcagaccgggtgcagtaccgccttcagaaggatgggaaatggaaatccatgcacgtgtccacctaa

SEQ ID NO: 38214 - protein, 213 aa, DROSOPHILA
MTSSLAKIEDFPSDPVEFFKEILQEAAKGHPDGFIQEMNLATVDEEFGVLNRTVLYRGLTQDNCVFYITHRYVRNFKNLQANPKACITFYMPDVKDKAGNQNAWQVRLIGATAVELDQSEMDALWAKENLAAQIRGHICPCGEPINYDDLKAKHDQFLLDHRGKSIERPASYTAWKFQPQRWDFLKVGLDQIADRVQYRLQKDGKWKSMHVST

SEQ ID NO: 38215 - DNA, 2408 bp, DROSOPHILA
agacaatggcagcacgtggcgaatttacgatgcaaaatctgcacagagaaatggcaaaaagaaatcaaatgaaaagaaaagaaaggaaaagaaaagaaaagaagaggaaaatgggaaaagtcccgagtccgctggcttcaagcaatttcaataaatcgcaaatgatataaagcgattgaaggggaagatgtggcgaaaaggacgggtaatgcaatactttcagtcaatagccagtgcgataaacaagggataaacgagcggagaatagagttcgataatcgttaaatgttaagcaagaagcgttgcagcgtttacctgcaatcgaagatttgtttatcgataaaaacgatggtcctacacaattattctaggtgttattttaaattgagtttctgaggaaaaatttattgctgttggtgaacgattgcaattgcttcataatttttgaatagccacttgcaaaaggatcagtatcaattggtatgaaaataataaatatccttgcattctgagggataaattgaagaagaggcatgcaggtgcgttgagtgaaaacatagttttcactgtttaagcaaaccctctacgtacattctgtatgtgatgcacacgtatgtacatcctttactcctgcgaagctgacgcccattgtggcaagcacccaaacacattgaccgaccgaaggatgccgcaggcttccaatcgtctgtctcttcccagactccacttgagcatatgcactgcgaaaattgcactatactacatgctctttaaatgtaaaataactatttatatatatatggtatgtatgtatggtatcttcttacaaaatcgtactaatccaatttgactcgcactcctattaatttctcgcagtgcatgctgcatgtgtctgtgccgctttttgtgtgtgttaagtcgcgcgtagacgacgaaaacgacattgccatggtgcggtcatgaatcatgccaaaaaattgcagtcaccgtcgagaaggggatgctgacccaaattcccgctcccaattttactcccacttctacttccactccggctaccgcatctccatctccagcaccatctcctctgggtgcaggtccaacgattctgggattctcggattgcgagccgttgtggcacgtcgattgtggtggccagatacggcgaaactggctggtggtcgtcatccacttgaggcaacccaatggcccagcatcccagcatcgcagcatcctagcaacccagacgtcgaacgtgggacaaacgatggacgccgtggccatggagacgacgctcctgtttccacattccacttccacttttcccgttgctgctgcagtgaatttgccgcactgcctcagcaaaaagtgggcgttcagcagctcactcacttactgggcgcactgagagaaatgcctatgcaagtgtacataaaattaataactaatagtcactcaactagaactaaagtccagtagcatgtgagataaaacgcgaagcctatttacttttctctcagtgtagagtgactcgagcggggcgacgacacgccccatttttgcaagtgccatagacgctgttgttgttgttgtcgtcaacgttgtcggtggcacttcacttttctatattagcgccacgtaagtgcagccgcaggggcgtggcaattgcattagcgaaggacacgaaggacaacgagggatgcggtgcggtgcactggtgttggttgggcgaaaggataatgggcgttggaggacattagtatcgcagtagataaagtggttgcaagtgaaaaattatacgaagctttgctgataagcgtcgcacaatggcaatatttcaatacactttggagtttcgaaaatatatatatcagctgacattcgaagaatataaaatatttttcaatttatattcactatcgtaatcgatcaacatctaattgacttataaacttcaatatgacgagcactttacaaatatgcatttaaatgctttattgcatcttaaagtgcacaaatgaaagtgcactttttctgcattactttttgcaataaattcaagtcgtttgttttgacgccccacatcttgtgtgtaaaatcccccatggtcgcaaataaactcaaagtgcaatttattgtacatcatttgagaaattctttataaaaaacatgtacggaaccaactacgcaactcgtacgcaatcaaaacttagtattagggaaaaagtggctttttggccacaaaaaggtaccattcagcctatagtgcaacgtaagcacacacacacccatttcatgtgtgtgcatatgtatgtgtgtgtgtgtaatatatgccgcaaagttatagtttcccctttgacccgccgtttgaaataagcagtcgtggaataagttgccgactgacgggg

SEQ ID NO: 38216 - DNA, 408 bp, DROSOPHILA
atgctgacccaaattcccgctcccaattttactcccacttctacttccactccggctaccgcatctccatctccagcaccatctcctctgggtgcaggtccaacgattctgggattctcggattgcgagccgttgtggcacgtcgattgtggtggccagatacggcgaaactggctggtggtcgtcatccacttgaggcaacccaatggcccagcatcccagcatcgcagcatcctagcaacccagacgtcgaacgtgggacaaacgatggacgccgtggccatggagacgacgctcctgtttccacattccacttccacttttcccgttgctgctgcagtgaatttgccgcactgcctcagcaaaaagtgggcgttcagcagctcactcacttactgggcgcactga

SEQ ID NO: 38217 - protein, 135 aa, DROSOPHILA
MLTQIPAPNFTPTSTSTPATASPSPAPSPLGAGPTILGFSDCEPLWHVDCGGQIRRNWLVVVIHLRQPNGPASQHRSILATQTSNVGQTMDAVAMETTLLFPHSTSTFPVAAAVNLPHCLSKKWAFSSSLTYWAH

SEQ ID NO: 38218 - DNA, 2822 bp, DROSOPHILA
tttttcttcacatacacactcgcacacacacacacacacaaacaaccgcgagtgctagcacaaacacacacacaattaaagacacgcaaacacacgcacacgtacacgggccaagaagtggctatcttttttctcttttgcttgtttttcgctgcacggaaaaacgccggctatgcggaaaattcgttgctaattcggctagcaattgttcgcgtgcgacgaccctcacaggttggcaatggaaaatggcatatttttcattaattttccgacactttttcgcaaattgcatggaacgcaacgacgcttaaaacgataacacaggcggctcaggccgattaatcggtcgaatgcatgatcaagccgggctgttagttaacagccgaggaacagactgtgttagggttgatttcgaattcaaagtgtggttttatatgcttcattaagcacatttaaatataaaggtggtcaaaaaaaattaattaaatgactcggcatgtaaccaaatctcttaacaagtctttaagctatgtatagttaatttgaaatgacaacataatatggcttgcatgacgattaggactgaacgtgctaggtcgcctcaacatggcgttcgattgtgttgtaatcagtgttgtaacgcagcgatttgcagcactggttaaaatggataccggtttcttgttgttgctattttaaatgtaattttatttttaattgaaaagtgcaatattactttctaatttgtttacgattgtcctgcttgacttaattttacttagtaatttacttaagccatatatatatatatacataaatatattagtgaatttttgaaaacgtgtttattttaacgtctttttttttaattttacaatttgaataagactcatgacttagctattagttaatgcacatttactttttagctactcaacccaggtactttttaacgttagcagcactggctaatgcggttgaacagggtgattaatgcaatatcgatgtaaacaaaatcatttgttgatttgcttttggaatatgttgtaatattatattaaaatgtaagtgcatatgaactagaatctattgaaatatatatttaaatgtctgaattaaaggacaaagtcgagaatttgccgcacttgcttggaaagtccggaagtcatggtcaattcatttgatgttccacaaaatttgggatataatataatattaccatataatatatatcttatcccagtgcatacaatatccattttataaaggggatttcctacccgaaaccatttgtctgccgcgcctaaaggatgccaaaagtgcctttaagataattacaaaatgcagaaggagtcaccaatttctcaaggaatctgaaataaaaggttggtcggatgaaaggaaacgtttgatccacacttccacttagccgctagcaatgagcagcaattccaagtcgagatggaggagtttgaaactagtttatcaatttgaaagtagcaacgatttcggaacagaaagagatgcagaagtcgacaccggagaaggagagaattcaaaccatgagactgaagtgcatcagccagagcaagagtccaccgaggatgagcgattccaatgccacgtcaagaatgagtccatcaacgaagatctctcagaggaagaagattacagcgaactgagcacattaagactggaggacattgaagagaatgtcctcgaaggtactcctcgaatcgttgagatgcaggatgacagcaaagtgcaaccaaaccacaaatacgtcaatgtaaaaatgtttattttatatacatataaataaggaaattaaggatgttatctatgaagatgtattttgatttgtaaagatctatttgatagtattgtatgagcttgtgttatgatactaacaagtgctagcagaaaagtgatttaaaatatttaaagaataagtgtaactgctcatgtctgcgattattactgacttctttctgtgaaacaaactcgtaatgatgtatatatttaagtgaactaatgaagtagtttgttttgaactcgcatcgaaacgactattgtagctacttaactctgcttttcgaggaataaaactgagtgaaactgctgctgcaattaaagttctttaccgcacagccaattgtttattgcgataattaaaacgaatccatgggatatccgctgtctttgtccgctgcaagctgcctaatgcgaatttgaagtaggccaacatacatacatacaacatatgtacatatgtacatacatacatatgttgtagtgtcttgtctgcactaaataaaatgcaacttttcgccggattatgcgcatgtgagttgaacacgaaatgacttttttcagccattttcgctgtggcaactgtttctgcgtgtgcactgcaagaaattcgagcaagtttcttagtcagctaaatgtggattcattttggacgcgccagcctggaaattggaattaaatttctggtttcgaactattgaatatacatatatttctaacatcaagtgcatccatttccgtttgcagtgcatgatgtgtgtttgcctgcagattttcactttattcatgcataaacttgcctgagaaagttttcgcgtggcaaaaagttgccacgggatttgcttggctgtgtggaaaaccctaccaaaaaaaaaacccatacccatactcaaccctattcgctatggaaaatccccatcctttttggacacatgcaaataacatatcgatgcagctttttcaaataaaccgcccccttgcaccgcttcaccgcccatccaagcgctgcc

SEQ ID NO: 38219 - DNA, 623 bp, DROSOPHILA
atcgatgtaaacaaaatcatttgttgatttgcttttggaatatgttgtaatattatattaaaatgacaaagtcgagaatttgccgcacttgcttggaaagtccggaagtcatggtcaattcatttgatgttccacaaaatttgggatataatataatattaccatataatatatatcttatcccagtgcatacaatatccattttataaaggggatttcctacccgaaaccatttgtctatgagcagcaattccaagtcgagatggaggagtttgaaactagtttatcaatttgaaagtagcaacgatttcggaacagaaagagatgcagaagtcgacaccggagaaggagagaattcaaaccatgagactgaagtgcatcagccagagcaagagtccaccgaggatgagcgattccaatgccacgtcaagaatgagtccatcaacgaagatctctcagaggaagaagattacagcgaactgagcacattaagactggaggacattgaagagaatgtcctcgaaggtactcctcgaatcgttgagatgcaggatgacagcaaagtgcaaccaaaccacaaatacgtcaatgtaaaaatgtttattttatatacatataaataa

SEQ ID NO: 38220 - protein, 127 aa, DROSOPHILA
MSSNSKSRWRSLKLVYQFESSNDFGTERDAEVDTGEGENSNHETEVHQPEQESTEDERFQCHVKNESINEDLSEEEDYSELSTLRLEDIEENVLEGTPRIVEMQDDSKVQPNHKYVNVKMFILYTYK

SEQ ID NO: 38221 - DNA, 2781 bp, DROSOPHILA
catgtttcgggatcgaatttttattccacttatttttgtgaattggaatgtgtagatagggaaaaaaagaaaatgtcgttagttttctatgctatccttttttttatttacattcttgagcaaaatcacaacttttaggctgttcaacagaatagcagtgtctggttttgaccaacgtaaactcccgaaatgatcaatattttctaaaaagtgagtttgaatttgaatttgaatttgtatatttaaaagggcaataaattaaaaaaataaaaaataaagaaacgcagaagcaaatcggctaagaataagttcgttctaagtcaagttgaattttgttactattttttcatagcactgctatttctgcttgttttaatctatattttcgaaactattaaaaaaatgaatgtgaaacatttgttgaattgtttaaaattaaatacctaatgatattataaaaaaaattttcccattaaaacttgaaatcttaagatttttttattttaaactcaagcactgctatttttatgaacacagctgtatgtcagcggtaatttaatttctctttgtgatgaagtacatagttattccgtttcattattaaagttgaaacataatctcgtacattcgtactttcatgtaaacacttggtaaatatttaatatttactgccacctgatatgctaaatataatttgcttgcaagctttcgatttatagccaatgtaaattgactcttcttatcaaaaacatacaagtttgctgattcacttgtcatgggcatgttcgtaagaatcgattgtggaaaatcgagacaattgccatccgagtacagtgcgcgtcattgtaataaggcatgcaggtagatacataaaaagaaataatcaaacacattcaaacacatatgcactgtggtaggtaggcagactttgcacgaaatcaatatgatgtcattatgccaacgcaacgattacgaaaaacttgatctaatctaatcaggcatgactcaatcgaaacgctccgttccactcgctcaatttgcagatggatgcatccagtgcaattcgaaggacaacgaacgctgcgccacagatccattgagcctgctcaatcgcaactgttccgatggatcctccaactgctattcccgcgtcctgggtatgttatcgcattgattaccctggctgcaccatctaatggtatctttcgcagatggctacacaattcgcggctgtgccgtcgatctggacaacgccacgcgtaattcgtgcaacaacgagctactgtgccagctgtgcacctacagcgagggatgcaatcgaaacaccttcccgttgagccgcctcatgtgcctacagtgcacagggaactcgacctcgtcgtcctgcgccacagagacctatgtatcggccaagatctgcccgctgtacaagttcggcgacaagtgctacattcgcaatagcaatcgcaccgtggacggatccttccagcgcggctgtctcacctcggcgaatgccaggaagcagtgcgtcaaggatggcaactgttatacgtgcgagggacgcggctgcaactttctgctggccaatgataccaacattccgctggcacgcgacagcggtgcccagttgatcatctccatgacgctgctgatcagcggtcttgtcgccgcctggagactctaagatgtaacgacggccagagtcgaatgatggacgaaagtcaatcatgccacagacccagttcttttagaaattcccgtcttattattttctacattctaaaacatcattatacatacatacatacactgggatgttacatttatactcgtttatttcattactttgaacaaaacgttaataaagataactaaactaaagaagacaaaaatagaaatggtttagttattacattttgggattgggggataaccaaaacgttgctcactttgaacagttcttcatcgtaatgttttttgaagcaaaagtaagcataaaactttaatgcataaacacagtgaacacacatttcactttttacgaggtgtcaacgggttggcactgcagttgacaacatgccactgtgtttatgaagtcccgatttcaattgcgataccctatacctctattcctcgattccgatcccagaccaagagaaatcgacgacgagccgcaagtaccggagtggcagttggaaaaccggaagctctcggcgcaaatgaggagtgcataaatgtgtcgacgcctccgaatgtttgtcaattacttttcacggctcgcttttccggatgccattttccattcgatcgaactggatgtgcggaaatagatcagttttgtgcatggtactcggctccagcgatttgttaactaaactaactatttataggcaacatacgtacgtggaaatatatatacatatgtactgtgcgggtttttaaatgcaagttataatattagtcaatttgatttaaatgcttttttcttgttccaattaggtagtcaaattcatttcgctagaacttcgttgccatcaactttctgatagcttgtacttgattttcttcgattttgtttatgaaattcgattggagaatcaacaaatgttgattaggctataaggtaatccaaggatgccatgaaattttactcgcactggcattcgcatgacgacgacagttttacacaaggggttccagaagcaaacttctatccgaacaaagcagactacacctggagacacagagcttgtgtataaaatctaaaattatctatatata

SEQ ID NO: 38222 - DNA, 824 bp, DROSOPHILA
atgactcaatcgaaacgctccgttccactcgctcaatttgcagatggatgcatccagtgcaattcgaaggacaacgaacgctgcgccacagatccattgagcctgctcaatcgcaactgttccgatggatcctccaactgctattcccgcgtcctggatggctacacaattcgcggctgtgccgtcgatctggacaacgccacgcgtaattcgtgcaacaacgagctactgtgccagctgtgcacctacagcgagggatgcaatcgaaacaccttcccgttgagccgcctcatgtgcctacagtgcacagggaactcgacctcgtcgtcctgcgccacagagacctatgtatcggccaagatctgcccgctgtacaagttcggcgacaagtgctacattcgcaatagcaatcgcaccgtggacggatccttccagcgcggctgtctcacctcggcgaatgccaggaagcagtgcgtcaaggatggcaactgttatacgtgcgagggacgcggctgcaactttctgctggccaatgataccaacattccgctggcacgcgacagcggtgcccagttgatcatctccatgacgctgctgatcagcggtcttgtcgccgcctggagactctaagatgtaacgacggccagagtcgaatgatggacgaaagtcaatcatgccacagacccagttcttttagaaattcccgtcttattattttctacattctaaaacatcattatacatacatacatacactgggatgttacatttatactcgtttatttcattactttgaacaaaacgttaataaagataactaaact

SEQ ID NO: 38223 - protein, 209 aa, DROSOPHILA
MTQSKRSVPLAQFADGCIQCNSKDNERCATDPLSLLNRNCSDGSSNCYSRVLDGYTIRGCAVDLDNATRNSCNNELLCQLCTYSEGCNRNTFPLSRLMCLQCTGNSTSSSCATETYVSAKICPLYKFGDKCYIRNSNRTVDGSFQRGCLTSANARKQCVKDGNCYTCEGRGCNFLLANDTNIPLARDSGAQLIISMTLLISGLVAAWRL

SEQ ID NO: 38224 - DNA, 2363 bp, DROSOPHILA
aatgaccagtcttgaatggctggaacatcttggttggtgtacccctacttcattgttagccactcacatggtatcgtccaaagttcttggaattcaccagtggacagtggcagtgggtaatagcatcacatctgtctgtttatgttgatttaggggtattatcaaaagtgcgcggggctttcaagccgaagcacgtagcatcgcagctttagtgggcaggcgtggacctaatggaaagcatatttggaacacaggctatacctgaacctgaccctgtcctccgttcaatgtcgttcagcgggaaagtgacccctagaagatttcatttagctggaagaaagagtgaaaatttcattcacctcgatcaaaatcgagagcagcccagctgcggaaaactaatgcatgagcacagctttcggcgatctgcggttttcgggtttatcacggttatataagccgtgtggaccgctcccacagtcagtccaaacttttgacgagccaagaacacagtgatccgataagaacctttacaacatgctagcctgcaagcttcttctcgcgttggtcatgggaatgcactgcattcaattggtaagaaacttaaaaatcgattagtgtccatcgaagtgggagtgcattagaaagaaagtgaatttgttaaaaaaaaaacaaggataagctttcgaacgaactgatcaacactgcttagtgtgcagtgattacaaaagcttaagagtgcttcctagaaagatttttaacactgtttactgggtggttaaaggataaagggatacaagaagtttccgtgaattaagaatagttaatataaaaggattgaacagatgaaaggatgctgctggtcaatgaacactgtgtgaaattgcaattggagatagggatgataccccatgtgttacttggatctaacaaatatattaaagaactgaaccgacaaagaacaaggattattaataactaaccttaactacccctacagttgatggcggcctgcgtgtgctccgaaaagggaacggactactgccaaagctgtcagggatccacggtcatccggccgaagccccgatactacgagcccagtgacgttaacctgccgccgatcggagacaactgctggtgcagcaagcagctgatcgaacccgcccaactgcccaagacctgcggaaaagtacgtgagctgttccaatacatgaacgccttcaacaacctcttgggccgtcggatgctcgagggcgccatcgaagccaagacgctggcggcacagcgtctggccgaacggctgcagcgtctggagcggatcgactgcttcaagaggggcgcctccggccatcgctatcagctataatcatccatgactaatccacatgcacatccataaccataaccagtgaccagtgaccctatccaccagactaaacatatgcaatacacgaaagagttggaaaatatcatgtacaattttcaattgtacaatatatttcagatgtagttactatattttatatgctactccacgtttatagctaaacaatatgtgttacctatcataagcattagcattagtttcgacacctataatcagcaaccagtggcagtggcattcatccaacgtcatccccccccagctgcagttacgatttccgcatcgtgcatcattatcaccgtaccaattttgcgtcaccatgatcagaacatagcatcgtcatccaaatatatgcataacgccctcatatatcgccgcgtacgtgctcctaaaaatcaagagctatgcgaagctccatgcgatagaacccatttagatacaccatccaccgattatccgaaccgaaactgaactctcgatttgatcaattcacacagaccacgccatgcaagcccacctgttcgtgccagcagatcagctccgacagcagctacgcctcctcttccagctcaggatccgtgtacggaaagtgagtatagaaggaaaatcctaaccgcgtgcgatattatagaatctaatcacaaccgatcttctccagaatcgactatgccgcagagaagatagtggacaacagtccagctgcggatcccatcagcgtgagtctggccgcccaggctggaaaggccatcaatgtgccggaggccaagttggcctacggatttgcccagaagcccgtcgatggtgagaaaaaggtggtgttctccaacgtgcccgaggagaatctcttcaagctgaagagcgacgtgatcacgctgaagaagcgcacctatgcgaccaagcaggaggatgaggaggagtacgccgaggaggagcaggagcaggaacagtcctccgatgatgaggaggcaccgcaactcaccta

SEQ ID NO: 38225 - DNA, 363 bp, DROSOPHILA
atggcggcctgcgtgtgctccgaaaagggaacggactactgccaaagctgtcagggatccacggtcatccggccgaagccccgatactacgagcccagtgacgttaacctgccgccgatcggagacaactgctggtgcagcaagcagctgatcgaacccgcccaactgcccaagacctgcggaaaagtacgtgagctgttccaatacatgaacgccttcaacaacctcttgggccgtcggatgctcgagggcgccatcgaagccaagacgctggcggcacagcgtctggccgaacggctgcagcgtctggagcggatcgactgcttcaagaggggcgcctccggccatcgctatcagctataa

SEQ ID NO: 38226 - protein, 120 aa, DROSOPHILA
MAACVCSEKGTDYCQSCQGSTVIRPKPRYYEPSDVNLPPIGDNCWCSKQLIEPAQLPKTCGKVRELFQYMNAFNNLLGRRMLEGAIEAKTLAAQRLAERLQRLERIDCFKRGASGHRYQL

SEQ ID NO: 38227 - DNA, 2851 bp, DROSOPHILA
agagtgcttcctagaaagatttttaacactgtttactgggtggttaaaggataaagggatacaagaagtttccgtgaattaagaatagttaatataaaaggattgaacagatgaaaggatgctgctggtcaatgaacactgtgtgaaattgcaattggagatagggatgataccccatgtgttacttggatctaacaaatatattaaagaactgaaccgacaaagaacaaggattattaataactaaccttaactacccctacagttgatggcggcctgcgtgtgctccgaaaagggaacggactactgccaaagctgtcagggatccacggtcatccggccgaagccccgatactacgagcccagtgacgttaacctgccgccgatcggagacaactgctggtgcagcaagcagctgatcgaacccgcccaactgcccaagacctgcggaaaagtacgtgagctgttccaatacatgaacgccttcaacaacctcttgggccgtcggatgctcgagggcgccatcgaagccaagacgctggcggcacagcgtctggccgaacggctgcagcgtctggagcggatcgactgcttcaagaggggcgcctccggccatcgctatcagctataatcatccatgactaatccacatgcacatccataaccataaccagtgaccagtgaccctatccaccagactaaacatatgcaatacacgaaagagttggaaaatatcatgtacaattttcaattgtacaatatatttcagatgtagttactatattttatatgctactccacgtttatagctaaacaatatgtgttacctatcataagcattagcattagtttcgacacctataatcagcaaccagtggcagtggcattcatccaacgtcatccccccccagctgcagttacgatttccgcatcgtgcatcattatcaccgtaccaattttgcgtcaccatgatcagaacatagcatcgtcatccaaatatatgcataacgccctcatatatcgccgcgtacgtgctcctaaaaatcaagagctatgcgaagctccatgcgatagaacccatttagatacaccatccaccgattatccgaaccgaaactgaactctcgatttgatcaattcacacagaccacgccatgcaagcccacctgttcgtgccagcagatcagctccgacagcagctacgcctcctcttccagctcaggatccgtgtacggaaagtgagtatagaaggaaaatcctaaccgcgtgcgatattatagaatctaatcacaaccgatcttctccagaatcgactatgccgcagagaagatagtggacaacagtccagctgcggatcccatcagcgtgagtctggccgcccaggctggaaaggccatcaatgtgccggaggccaagttggcctacggatttgcccagaagcccgtcgatggtgagaaaaaggtggtgttctccaacgtgcccgaggagaatctcttcaagctgaagagcgacgtgatcacgctgaagaagcgcacctatgcgaccaagcaggaggatgaggaggagtacgccgaggaggagcaggagcaggaacagtcctccgatgatgaggaggcaccgcaactcacctacaaacagctgggctacatcaccgagcaatacaagaaccccaagttcaggaagatcagcagttccagctccagttatgcgtacaaggactacaaggattccagcgagagcggctacggtaaagtggccggcaaggtgtccgtggactgtggcttcaagcccggccggatcacctcgtaccggaagtcaaaacgagaggagtccgacgacggttactactgaatcaaacccatccccccatccaatccaattccaatccttacgtttgtaaatatgtatatacgccaaggagagaatggatgtttgtctaagttagtcttaaaaaatatacatacgtttttaaaaaaaatgcacagcaattggctttcttctaaaaatactttattacttttaacttggttaactatttcatggcactgtttaatagttttaaatgtggcttagaaaattatatgaggccaatgaaaatagaatgcaagaattttactttgcatttaaatctataaataaaccattaagtgtactttaaatgtattaaatgtatcattaagtgttttaaatattcccacgacatattatttgacttatttgtttatgaattgcattattacagttgagcatatctaatagagattttacactgtttaatagtttgtaatacagtgtgtttatttttgaatgaatgccatgtaatgcgatatgttgcacaagaaaataattgattatatataaacaaacatttgtataagctggcataattcaaaatgtttttcacaatacgtttaaaactaaaatgtttactttccgttcgcattggctaggttccactgtggacaattctgcgtttggcgtttggatctcaagccatcgagacactcgacactgaagaaagcggcgaacgtcgggaacatgacttttgacggaaaacatgacccgcgaactatttgaaaaggtcagcgaaaacaaaaacaaacagagtggccaagccggcgtctctggggaagaagaccttgcccaaagtcaagaccattggggtccgcgtgctggccgagatgatataaagaatgtgacaatacattctgcggctagtagccagcaaggcagacaaccgagaagatctaaccgagatgcgatactccatggcaatgatcccgattctgggcctgctgctcgtagcactgatccacgccgctcccgttgaggtcgtctacacgggcgaaag

SEQ ID NO: 38228 - DNA, 663 bp, DROSOPHILA
atgcataacgccctcatatatcgccgcaccacgccatgcaagcccacctgttcgtgccagcagatcagctccgacagcagctacgcctcctcttccagctcaggatccgtgtacggaaaaatcgactatgccgcagagaagatagtggacaacagtccagctgcggatcccatcagcgtgagtctggccgcccaggctggaaaggccatcaatgtgccggaggccaagttggcctacggatttgcccagaagcccgtcgatggtgagaaaaaggtggtgttctccaacgtgcccgaggagaatctcttcaagctgaagagcgacgtgatcacgctgaagaagcgcacctatgcgaccaagcaggaggatgaggaggagtacgccgaggaggagcaggagcaggaacagtcctccgatgatgaggaggcaccgcaactcacctacaaacagctgggctacatcaccgagcaatacaagaaccccaagttcaggaagatcagcagttccagctccagttatgcgtacaaggactacaaggattccagcgagagcggctacggtaaagtggccggcaaggtgtccgtggactgtggcttcaagcccggccggatcacctcgtaccggaagtcaaaacgagaggagtccgacgacggttactactga

SEQ ID NO: 38229 - protein, 220 aa, DROSOPHILA
MHNALIYRRTTPCKPTCSCQQISSDSSYASSSSSGSVYGKIDYAAEKIVDNSPAADPISVSLAAQAGKAINVPEAKLAYGFAQKPVDGEKKVVFSNVPEENLFKLKSDVITLKKRTYATKQEDEEEYAEEEQEQEQSSDDEEAPQLTYKQLGYITEQYKNPKFRKISSSSSSYAYKDYKDSSESGYGKVAGKVSVDCGFKPGRITSYRKSKREESDDGYY

SEQ ID NO: 38230 - DNA, 3646 bp, DROSOPHILA
ccggcaaggtgtccgtggactgtggcttcaagcccggccggatcacctcgtaccggaagtcaaaacgagaggagtccgacgacggttactactgaatcaaacccatccccccatccaatccaattccaatccttacgtttgtaaatatgtatatacgccaaggagagaatggatgtttgtctaagttagtcttaaaaaatatacatacgtttttaaaaaaaatgcacagcaattggctttcttctaaaaatactttattacttttaacttggttaactatttcatggcactgtttaatagttttaaatgtggcttagaaaattatatgaggccaatgaaaatagaatgcaagaattttactttgcatttaaatctataaataaaccattaagtgtactttaaatgtattaaatgtatcattaagtgttttaaatattcccacgacatattatttgacttatttgtttatgaattgcattattacagttgagcatatctaatagagattttacactgtttaatagtttgtaatacagtgtgtttatttttgaatgaatgccatgtaatgcgatatgttgcacaagaaaataattgattatatataaacaaacatttgtataagctggcataattcaaaatgtttttcacaatacgtttaaaactaaaatgtttactttccgttcgcattggctaggttccactgtggacaattctgcgtttggcgtttggatctcaagccatcgagacactcgacactgaagaaagcggcgaacgtcgggaacatgacttttgacggaaaacatgacccgcgaactatttgaaaaggtcagcgaaaacaaaaacaaacagagtggccaagccggcgtctctggggaagaagaccttgcccaaagtcaagaccattggggtccgcgtgctggccgagatgatataaagaatgtgacaatacattctgcggctagtagccagcaaggcagacaaccgagaagatctaaccgagatgcgatactccatggcaatgatcccgattctgggcctgctgctcgtagcactgatccacgccgctcccgttgaggtcgtctacacgggcgaaagttgcgcctgtcccacccaactgggttaccagctaaatgtgcccaataccccaaagccaaagaagtatgtcggtggcgagtacggctatcgggtggagaagcccgtccagacgaaagccaagattacctacagctttgacttcactgtggagcagccgaggacaccggcgccgcccaagaacaatcccgccaagctgtatgccaaggtggaccggatcacagtcaacaaagcgggtaagtgcaaacaaaacaaccaatgatttcatgaaaaacttctcttaagcggacagttctctctcttgggcggacatttctctatatacatgtttctccatgttttcctctaacaactttatctatgatttatattatacagattgccaggccaagaacaagtcaacatgcggctgctcgagttgctccggccaaaaacccaggtaccgtagcttcaccggtcaggtcgccgaatgccattcgtcgtcgccgggatgttcgccagccaggttcactgctccgccgtcggctaatgcgccaacaaaagatccaggagcgtccgccacgctttgtgaagctctatcacaaggatttgactcctgcgcaggagaagcatcagcttaaactttttggcctctttcccgtggaatcaccagagtcagtggctgccgcacccaaaaccaagagaaagacgaagaaaacccagccgagctggatgggattgggaaggcgtttgaaaaagcgagatattaagggagagtttgatctgctcgaacaagaacgatcccagatagatctgactgcgccggaaataatccagtttatgcccgagactctgaatccggactttaggcccggtcagtgtcacgtgggctgtggagcgatgacagcatcggcaccaccaccagaagagccaatgcccaaggaggagcaagtgcctcaaacgacgcagcctgtgcaaacggaaccgccagagcagctcaactcgattcccgccaagagggccgcctatggttactatcccctgcagattccctcgccattgggccgtcgggaggactacaagttcgtggatgattcgcagcttaggagcctgttgtccaccacttctgtgccggatccgcaggagtatagctccacgccgttacagtttgccggtgatttggaatcggttacaagaagatcctatggtgtaccactaacgagtctcggcggtggctatcccgtggagcatgtctccgactcccaactggacagcattatctccgggatagtgtacaatcatcctgcctacgatcattactccaccgagggcagtctggtcgatccggagccaattcaaaagcaacagacgacggattttctcaagaaactcatcgatggccggctgggcggctggggtttcgatcagggatcggaaaccgagcacagtttacacaatgattactccacacaacccgcgaagacctatggctataatagccaaacccaaaatggctacagtatagacacctataatgcgccacccattacggattacctgagggcctggttctagtgcccaatctaaccaacataaaatacatagtgtttagaacttagtttaaacgaaaaaaaaaaaaaaacagagaaaatcatagacgaaaagtaaacaaaaagaaaaacaaaagacaaaaaaaaaacagaatataataaattgaaaatacattgtggtgtttctttctttattcacccaacgtcttcgtctttcttctctttgcagctacggcgaagacgcgggctacggctactgaagagagatcttacatataaaccaacaatatcaaaaccgaaacccaaaccaaaactccaaaccgaatgcaacccaacccaacccaacccatcgatctgctgagctcggcttaaaatccagccgaaagtaggccagtggagcactccgctttcgggtctccattcgcttgtatatatgtacatatatatatatatatatgtatctacgtgtactatagaagttatgaatccaacctccgatttctgtttacgttttccgcttttgtcggcacttcaagaagttgccccaattaactggttaataaagtgtttgcctgattaaaatgtgctcgattcgatgatttggggttccattgggtgcacctttggcatagaaagagctagctatatgatacccctaaaagtatgcccaccgaaatgaacagctcttaatcctaagcatttcaaatattataatagcctaatggcatattactttgataaataattaagggttttagcatttatttacctaacacaattcttctgttttttagtcttagtcgttagtcttagtaagctcacttatcattaaagagccagtatatataatatatatgatttatttgcatacgatcacgatctgttaatggccaaatatttattgttctacataaacaaatggtggtggtggttcatcattcagcgacaaaattcttgcgattgcatactattgaaaagccaaaagatactcgcaaccgaaagccacaaaaaactcactgaacttc

SEQ ID NO: 38231 - DNA, 1476 bp, DROSOPHILA
atgcgatactccatggcaatgatcccgattctgggcctgctgctcgtagcactgatccacgccgctcccgttgaggtcgtctacacgggcgaaagttgcgcctgtcccacccaactgggttaccagctaaatgtgcccaataccccaaagccaaagaagtatgtcggtggcgagtacggctatcgggtggagaagcccgtccagacgaaagccaagattacctacagctttgacttcactgtggagcagccgaggacaccggcgccgcccaagaacaatcccgccaagctgtatgccaagattgccaggccaagaacaagtcaacatgcggctgctcgagttgctccggccaaaaacccaggtaccgtagcttcaccggtcaggtcgccgaatgccattcgtcgtcgccgggatgttcgccagccaggttcactgctccgccgtcggctaatgcgccaacaaaagatccaggagcgtccgccacgctttgtgaagctctatcacaaggatttgactcctgcgcaggagaagcatcagcttaaactttttggcctctttcccgtggaatcaccagagtcagtggctgccgcacccaaaaccaagagaaagacgaagaaaacccagccgagctggatgggattgggaaggcgtttgaaaaagcgagatattaagggagagtttgatctgctcgaacaagaacgatcccagatagatctgactgcgccggaaataatccagtttatgcccgagactctgaatccggactttaggcccggtcagtgtcacgtgggctgtggagcgatgacagcatcggcaccaccaccagaagagccaatgcccaaggaggagcaagtgcctcaaacgacgcagcctgtgcaaacggaaccgccagagcagctcaactcgattcccgccaagagggccgcctatggttactatcccctgcagattccctcgccattgggccgtcgggaggactacaagttcgtggatgattcgcagcttaggagcctgttgtccaccacttctgtgccggatccgcaggagtatagctccacgccgttacagtttgccggtgatttggaatcggttacaagaagatcctatggtgtaccactaacgagtctcggcggtggctatcccgtggagcatgtctccgactcccaactggacagcattatctccgggatagtgtacaatcatcctgcctacgatcattactccaccgagggcagtctggtcgatccggagccaattcaaaagcaacagacgacggattttctcaagaaactcatcgatggccggctgggcggctggggtttcgatcagggatcggaaaccgagcacagtttacacaatgattactccacacaacccgcgaagacctatggctataatagccaaacccaaaatggctacagtatagacacctataatgcgccacccattacggattacctgagggcctggttctag

SEQ ID NO: 38232 - protein, 491 aa, DROSOPHILA
MRYSMAMIPILGLLLVALIHAAPVEVVYTGESCACPTQLGYQLNVPNTPKPKKYVGGEYGYRVEKPVQTKAKITYSFDFTVEQPRTPAPPKNNPAKLYAKIARPRTSQHAAARVAPAKNPGTVASPVRSPNAIRRRRDVRQPGSLLRRRLMRQQKIQERPPRFVKLYHKDLTPAQEKHQLKLFGLFPVESPESVAAAPKTKRKTKKTQPSWMGLGRRLKKRDIKGEFDLLEQERSQIDLTAPEIIQFMPETLNPDFRPGQCHVGCGAMTASAPPPEEPMPKEEQVPQTTQPVQTEPPEQLNSIPAKRAAYGYYPLQIPSPLGRREDYKFVDDSQLRSLLSTTSVPDPQEYSSTPLQFAGDLESVTRRSYGVPLTSLGGGYPVEHVSDSQLDSIISGIVYNHPAYDHYSTEGSLVDPEPIQKQQTTDFLKKLIDGRLGGWGFDQGSETEHSLHNDYSTQPAKTYGYNSQTQNGYSIDTYNAPPITDYLRAWF

SEQ ID NO: 38233 - DNA, 1958 bp, DROSOPHILA
atatacactccgtttatacaataaataaataatgcttgtatattcttcattattcgttcagaatctaagtgaatccacgcccggccccgatgaggaatacaatgtgagcacaactccgggtgcgccgctggaagagaccaccaatcgcttggctgctcgcgttgagccatacgataagggtgatcgggagcagtacgatgtgatcgatgtggccacagctaccggtacggtgatgggcaagcccagaagtggacagaccacgagaatctacaccaccggcgaagtggacgaaagcttttggctaaagcatctgggcgatgacttcaaacatgccatccatctgcaggtgggcggcaccaacgaagagtacaatcgcctgattaaccggacccagaacggtgtccacgaggaggtgcatcacgagtatttaccgggggccgaacgacctggcagcgcagtccagcctccatctcctctacctgcgccacaccaatcgcgtccagcttatcgtcagggtttcgacaatcgagccatggccatgaaacagcagtatctcatccatcagcagacccagcaatcgcatcctgcccagcaacgctataactatgcccaacagcatgcacaacactatgcaccacaaccacaactgcaaccgcaaccacaaccacaaccacaatacccacagcacacaccgcacagaaacacgtatgcaatgcctcagaattatgggcagcagaactacaagccgcagagttatattatcaactctagcgaagatcagctgcacgccgagcaatcgaatccctcgccaatgaaatcagctggagaggatcgacaacatcacgaggaggagtttgactcctttggcggtcagctcaacttcaaatcacccttcaatgactacggcagtcgaccagcacgagatctcacctaccttctttataagcggggtctctagaagctaaatccatgtccacgtcaaaccaaagacttgcggtctccagaccattgagttctataaatgggactgagccacaccatacaccacacaccacacatacacacacgccaacacattacacacaacacgaactacacaaacactgagattaaggaaattattaaaaaaaataataaaattaatacaaaaaaaatatatatatatacaaaaatttgttgtgtttgaattgaattaagagcttatcaagaaaaaaatttcagtgactcataatacactactctacaagtttaaattgaatcaacaatttaactttcattgctcaggtttttagtaacaatgtttatataagtttaggtataacaaatgatttaaatataagatactgtatttcacattgagacgaaacaatccaccgaaaatcataaaatataagaatgttgcattttatttttaaaaataaagatgccttttaagaggaataacttaaatgtctttaatacctttgaatttaattatatggctaataaacacaaacttaaagcttaaaactgcatcgaattgaatgcggttataaatgtacttatatatctaatataatctgctaatatggtttacatggtatatctttctcggaaatttttacaaaaattatctattcatatatctcgagcgtaagatatttatcagtttatagataacatctttaaatttgggtgattaaaaaaaaacattgctgcagggcatgtttatgtacacatttcagtataagtcccaagttaaaatgcaatgtaaaaacatataaaggatattaacttcaaacccaaaggattgcagagagattgcagcacagctgtaatcatcgcaacaaggcaaccaaaacgagactctcgtagcgttggcatcatattcgatctttggaagagctatgattcaagccaagggaaacaactgccaaaaaatagaagattgcgacgagcggaaagcagagtggtgcacc

SEQ ID NO: 38234 - DNA, 927 bp, DROSOPHILA
atgcttgtatattcttcattattcgttcagaatctaagtgaatccacgcccggccccgatgaggaatacaatgtgagcacaactccgggtgcgccgctggaagagaccaccaatcgcttggctgctcgcgttgagccatacgataagggtgatcgggagcagtacgatgtgatcgatgtggccacagctaccggtacggtgatgggcaagcccagaagtggacagaccacgagaatctacaccaccggcgaagtggacgaaagcttttggctaaagcatctgggcgatgacttcaaacatgccatccatctgcaggtgggcggcaccaacgaagagtacaatcgcctgattaaccggacccagaacggtgtccacgaggaggtgcatcacgagtatttaccgggggccgaacgacctggcagcgcagtccagcctccatctcctctacctgcgccacaccaatcgcgtccagcttatcgtcagggtttcgacaatcgagccatggccatgaaacagcagtatctcatccatcagcagacccagcaatcgcatcctgcccagcaacgctataactatgcccaacagcatgcacaacactatgcaccacaaccacaactgcaaccgcaaccacaaccacaaccacaatacccacagcacacaccgcacagaaacacgtatgcaatgcctcagaattatgggcagcagaactacaagccgcagagttatattatcaactctagcgaagatcagctgcacgccgagcaatcgaatccctcgccaatgaaatcagctggagaggatcgacaacatcacgaggaggagtttgactcctttggcggtcagctcaacttcaaatcacccttcaatgactacggcagtcgaccagcacgagatctcacctaccttctttataagcggggtctctag

SEQ ID NO: 38235 - protein, 308 aa, DROSOPHILA
MLVYSSLFVQNLSESTPGPDEEYNVSTTPGAPLEETTNRLAARVEPYDKGDREQYDVIDVATATGTVMGKPRSGQTTRIYTTGEVDESFWLKHLGDDFKHAIHLQVGGTNEEYNRLINRTQNGVHEEVHHEYLPGAERPGSAVQPPSPLPAPHQSRPAYRQGFDNRAMAMKQQYLIHQQTQQSHPAQQRYNYAQQHAQHYAPQPQLQPQPQPQPQYPQHTPHRNTYAMPQNYGQQNYKPQSYIINSSEDQLHAEQSNPSPMKSAGEDRQHHEEEFDSFGGQLNFKSPFNDYGSRPARDLTYLLYKRGL

SEQ ID NO: 38236 - DNA, 3407 bp, DROSOPHILA
gggaacaccagttctactagttgcggtggctcccaatttcacattaattaatattttgttaagtaatcatcacctggggccaaagttaatagttcttcttccgagggtaagattcagataagcggcacgcacaagtaatcgtgtgattcccttggttcgtgcaacggacatgaggaaacatatataaatctttatgtttttaagatttcatgaaaagaaacatgtttactttgcggtttttcgaacgatgtgaaaatgatgttatctcttgaaaaccaaatggtaaaaaagctgagaactgatatctttaatatttcatcacatccgatcgcattacccacaaagaagaaccgcaagatattatgattattttgtgggtgacccactggagtactggttggtgacaccaagcgcatgcttcactgtatctttgcccgctgggcgcaaaatgcttttgtttacatatcatataatgtcggcgtccgattggaattgcatgcattaactgatattctgattggactttgtatgctggcgactttttttttatgcttcgcgcggcagcagcgacaaaagcaacagcaacaacagcgacagcaagaacaaatggagctggggaaaacaagttccgcttgatgattcaacttccttcacttccgctttacagcacaatagcaccaacgcattttgtttgtgttgattgctgatgcgatgtttttgtttacaggagtccaattggcaggtgtgagtggaagacgtagggcacagggcgcaggggaagaggggctggctggttaacttactgcactcccgttagttgtcctccaagggggcgcggggacgaagggggcgtgggcaaccttcagttgcttttgctgttcgccttggactgcaattgtcgcttttccttcgcttttcttcttcacactacgttaatttccacacaccaacactcaccgcacgcacacacacacacacgcacacacagttggactacttgagagttttcctttacatcattttcacagttttccaattggactgcttaactgggccactttgactaagacgcgccaagtgcgttgaaatccacgaatttagctactttaaaagctacgcaaatacgtgtggagtgcagtggacagaaaagtaaggaataatgttcatttaactggcctgccagccgtgtgcgcggctcggtgtgactggcggaatgtgccaatcgcctgtatgcgctgcttggcgaactatataattaacatgcaatacgaaacacgcgactattattatcggatttactattattaataactatttggcctttgcttcaggccattttcagcgttgccagataagactagcttttggtctatcgataagcctaaatgctgattactttgaaagtatatcatcgccaatcgcaaactttttccgcctggttgaattataattttcaaagactaatttcaaacaatttgaacggagtaattacagaggccacttacatggatgcgtaataatttattctttattctttaattttgacagctgtttttttatttctatttgatatatttaacgcttatcaaatcgataacgatgcctttggatgcctactactctcgatagactcaccgtggcataagttgccatctctaaatttctggccatctcaattgcaagcttgaaacgtgtgaaatatggaacaaaatgcgaagcctaaacgctcctttaagcgtccgtttacctttccaaagaactgtgtttaccgccctctacgtcagataagcaacatggagcgtagccagaagctgtccgccgaacaacccacctgtgagtaagcaatgaatgtggattcgcaacggcatccatatgtgtacttcacattgcagacttcacgctcaatgcaccgccctcgttggttccggccaagaagtactcggatatcagcggtctgcccgctccttatgccgatccgcacacgaaactaaggttcgccagcgccgacgagtacgcgtccatgcagcacatgccctcggacatcgtcaatggctacctcatggtgcgcggctataccagcgccgtgggatagtttgttcgatccatatactgcatacatcccaagtactcgctgtgttccgcacctggaggccttgcgttgcaactaccactcataataggcaattagagcgctgctgaccttactcttactggcattgcgtgcgaggctgttgctttcaagtgattcgatgactgtttcctgcctggaacaccgcgttcaaggggagttacatccacaattaccatatatatatatatatgcatacactgcctaaaaggagatgatctctgtaaattagttatagagatttgtcactagtttgaccgcaaaaatagattaggtaattccaaggtgagatgaataccttggcggtttgaaagtgtctaaattaacgaaacggctgccacatagatcctaatgcgaaaagcaaatatttaaacagccgactcgtgcaagtttggagttcgcaatgaacggcccacagattaatatagtgttaagttaaccagctatacaaaattcagcaagaaggcaaagtaaacaaaactgaataatatgattaatgagtttaagatattatattcattttcttatcgggcattttggcgaaaggacgatttataaatgtttcatcaactatattctatactcgcatagtcattattattgtgtattatttgaggacgatttataaatgtttcatgaactatattctacattcgcatggtcataattattgtgtattatttagcagctatcagaagtaccaaaagcaagtttctaaaacttttgtaattactggggcttctccctcgttcgctcaggtcctccattcgtcatctctcccgaaagtgttattcgagctccaatacaaagaaccggactagtggctccgtgattcaacaccatttttccacctcattccattttgtggcagtcgactccggcttattccttacggctttggacgctagccagcttggttgatgggccggctaatactgttcggctgtgtcagcatctgcaggtccgagcggaagctccttggcagccccgagatgtccagctggtgcttgagcaccaccatggtggccagggtttttagagtgggctcaaagtcgagcacatgcagatcgctgtagtcgataagcgccacaccgggcggaacaactccgccagccgctgcggctccgcccgtctcttgagtgggtgaaacagctgccggcgagctggaggagccgctccttggactggtgccgccaaacaggaacatcctagtgcccatcacaatggcgcactgtctccgacgcgccgtcggtgccttgccgttggcccgtatcaggtt

SEQ ID NO: 38237 - DNA, 949 bp, DROSOPHILA
agagttttcctttacatcattttcacagttttccaattggactgcttaactgggccactttgactaagacgcgccaagtgcgttgaaatccacgaatttagctactttaaaagctacgcaaatacgtgtggagtgcagtggacagaaaactgtttttttatttctatttgatatatttaacgcttatcaaatcgataacgatgcctttggatgcctactactctcgatagactcaccgtggcataagttgccatctctaaatttctggccatctcaattgcaagcttgaaacgtgtgaaatatggaacaaaatgcgaagcctaaacgctcctttaagcgtccgtttacctttccaaagaactgtgtttaccgccctctacgtcagataagcaacatggagcgtagccagaagctgtccgccgaacaacccacctacttcacgctcaatgcaccgccctcgttggttccggccaagaagtactcggatatcagcggtctgcccgctccttatgccgatccgcacacgaaactaaggttcgccagcgccgacgagtacgcgtccatgcagcacatgccctcggacatcgtcaatggctacctcatggtgcgcggctataccagcgccgtgggatagtttgttcgatccatatactgcatacatcccaagtactcgctgtgttccgcacctggaggccttgcgttgcaactaccactcataataggcaattagagcgctgctgaccttactcttactggcattgcgtgcgaggctgttgctttcaagtgattcgatgactgtttcctgcctggaacaccgcgttcaaggggagttacatccacaattaccatatatatatatatatgcatacactgcctaaaaggagatgatctctgtaaattagttatagagatttgtcactagtttgaccgcaaaaatagattaggtaat

SEQ ID NO: 38238 - protein, 79 aa, DROSOPHILA
MERSQKLSAEQPTYFTLNAPPSLVPAKKYSDISGLPAPYADPHTKLRFASADEYASMQHMPSDIVNGYLMVRGYTSAVG

SEQ ID NO: 38239 - DNA, 2611 bp, DROSOPHILA
gttcattttattttgttattacatataaatattaggtattacgtttatttaagttagaataaaattaacgcccatcaacaaattatggtcattaaagtctttatgaagtaaacttaatgtacaatcattttcacttaaagtgcatattaaaaagcatatttttacattttttagtattgtatttaatataaagtcaaaagttacttttaatgaaacaaaactatcgcccatcgccagctccgcagtctggccactgttctcactgttcccagtgctgccagacagcggcaatcgaagatccgagtgcccaccagctgtttgatctcaattggaccaattggaagagcgcggtgtcgcgggcagcgcagtcgagcggcggcagagcgatcggcaaagaaatcaacaacaaaaagcaaaatctcgtctcaacattatttacgtgctttttgttttagtgaaaagtgaaggcgcagccgcagcagcccgtgtttcgcgcgttcccattaatttgttgttattttcaattgtgcaagtggcgttcgtgtctctctttttttttttttgttttttcctgtgtgtttgtgtgcgtcctaattgaaagaaaatgaagtgaaaagaagcaaacaaattgggaaatagcaacgtaaacaaatcaaataatgaatgaagtagaagagcagcgaagttaaatgaaacccaggcagtaaattgaaaagcaaaaaagccctgcgaaaataagatgataaaggctgtgaaacggggaaacccgttaaagtagcaccgaaaaggcaatagtcaaataagaaaacacaaaatccaaccaacgcgacgcacgcgtgtccaatttgtcgcctctgcttcgtctctctgcttcctcttcactgttctgcgcacaccgttgcacgatcattcatgtgtgggtgttgtatctgtgtttcttgtgcattctatttgatttgtgttgttgctcatctcttatcgctgaaatctcgaaatctcaatgttctcggcgaccaatggcaaaatcaaggtaaaaaaaaaaacgtccacttaatagttttcttaacttaccaaatggtgtcttggctacagagaaacttatgctttgagttgaaactgaaatatgtacaatattactgtttccgttagttttattttaaaattgataagccattctatatttctcctgactgcgcattgtttaaatattatactaattatcgtatcgtatcaatatcttatctgatgtttgcacgagatttgttgcggtgtatttgatttaatataaaactatatcagtaaatgtttgatatacgttaaaatacaacaaatattgtacattttttacagttacctccggaagatgctgtgctggtgacgtcaccgttgcgctgcctcttcaacggcccctttcgcgatctccacttcaacgtcaccgatcaccgcattattcccgtccacgatgtcgttttcctcgacgatttcgaacgcaacgtgaagcctttgatttaccgccccgtgacgtcagaggtcgctgcctctgccaacgtcgatgaggaggcaacgccggcagaggaggagcagcgcagcttcattccaatcagcaggtgagtcacatccaacaagtgcgacagagatggcaatcaatcgatcgtggccttgaacttgattccatttcgttagtccccaattccaattggaagtgagagagagagtggaagcagaaaaggcaggagagcaaaccaattagaatttccaaatggagatatcaagtttttgtaaatggagaaatcgactttatttcaattttgtgcattcaaactgtgatttttattttaattttaatcatttagttacaattaatcacaattaggttacaattatcgcatctaagcatctgtaataatttgtcttgtttaacgctcgtttttgaaaagtgtttgctttacggcgccgataagtaaagaacattctcaactgataagaacgtgggcgcccctgatgtgtttgaaacatcatcgtttttatcgtcaaaagtgtgcaaaagctgtgtatctattataaacgactttgtaggcgtattgttatttgttttaaggtgcgtcgctaatttcccactacccggatgagaaatataaattttttaacaaccagatagtttcatatttataatgacagttaaacagcactcatgttttaaacaatcattcttaaatctgtatatctgtacaattccattggtttaattgcttttaatatggaatgtcatacctcgttgagctcgtaattaaatttccaattaaactgtgttcaaaaattggaattttaattttttcaatttttttccaaattttgatgatgttaccccttacaaaaaatgcgaaaatttcttaaaaaattaattttttcaaatacgtcaaaaagtgatagggctgtttggcattggtaattagctgcccaaaacagttattctttcagctttatgatcatttttagccaagttatgattaaaatgccaatcaaaaatatttcaatttttgacaaaacccgtttttactattttttgtcataaaatatctatttttttggccacaacttgaaaaatatttgt

SEQ ID NO: 38240 - DNA, 291 bp, DROSOPHILA
atgttctcggcgaccaatggcaaaatcaagttacctccggaagatgctgtgctggtgacgtcaccgttgcgctgcctcttcaacggcccctttcgcgatctccacttcaacgtcaccgatcaccgcattattcccgtccacgatgtcgttttcctcgacgatttcgaacgcaacgtgaagcctttgatttaccgccccgtgacgtcagaggtcgctgcctctgccaacgtcgatgaggaggcaacgccggcagaggaggagcagcgcagcttcattccaatcagcaggtga

SEQ ID NO: 38241 - protein, 96 aa, DROSOPHILA
MFSATNGKIKLPPEDAVLVTSPLRCLFNGPFRDLHFNVTDHRIIPVHDVVFLDDFERNVKPLIYRPVTSEVAASANVDEEATPAEEEQRSFIPISR

SEQ ID NO: 38242 - DNA, 2342 bp, DROSOPHILA
ttttaatcacaatttaggtaatacgagcacttgattacctcaattgagtaaggcgtttcccgtcgacgtggcaaattcaacactgaccaccaatgccccaaccccccctccttaccattcgatttaccaaaaggtgagcagcacgtgcgaatggcttccttcctatcgtcacaatgtcgcccccgaaaatcgctgacccatttcagcattatttgctgctctgcgaaggcacaaatgtggatagaacaaatgttcttggagtgaccgtcgcagtggtaccgtgttagtttccacttgaaagagctagccggttttacgttcagtttttaacaaggtgaaaattaattaaggtgaaattaatataagcaataatatttaaataccaatgaatgttactcctattccttttgtggcatacttgtaggcatattaaatacaatgaattacttttctgctgcatacttttacgcacttatttaaaagatatgcaattactagagtgctctacttcacttcttttgttatcgtgtttggtagttcttaagaatatttcttcaccctgtgatgttaagatacaatcactttcatattaaaaatatatatatatatattagagggcattgggattgatgcgccactttgcgtcgcttcgattccgcacaaaccctaattgaattagccatttggagacgtggccagcaccactggctaaggtctcgcgatgtgaagccccatcgagtctttcgacttctgtgccaattgccaatcgctgagaaagcagcgcgctttcatcgccaattgcagtttcgagtgcgttcggtgcaagtctaactcttggttggccaaacaaatctacaataaaattatatttcgtgtgtgtgacaaaaaatcgaattaacccgtacagagcagcaggtatctctttgttttttgcaagtgatttgtattgaaattgaaagccgacaaaaaaaaaaaatagaagaaaaaacaaatcgttgaaatgccggagcgcagcatcagtcagcgggatctcgacgagattgagatcgagagcgacgaggaggaggaggaactggagcagggcgtgggtctgtccacccggagtcgccgtaatcgacgcggtgcctccgattccccggccgcatcgcgtgctcgcaatgccaccaatggcattcaaaatcgcggaagagagcgggagcgggagcgggaaagggaaaggagtagggagcgttttggtggcaccaatgccgccgacgaagctcgcttctatgacgatgaggagcagcgaatggaggacgatggcgaggaggacagcgacgaggatatcgaaatgctggattagtgagtactgcgcattggtggggtttgcactcataattcgattagttgttgcctttagtttttttggttttttggggggcttctttcctggaattatgtgctactcgtatgggcaaatggcaaatgggaaatgggaaatggaaaatgcatgaatctacaacgtaattggatttgcggcatagtgaaatcacgcattgtgtttgctgctccaccaactaatggtgtttacaaaatgcaaggagatggagtaacatggtaacatgttaggtcatcattagcaaaggcaaaatagttgggaaattaaaaagaaaaaatacaaaacatggcacattataattggcagaaatttatatacaatatttgcacattcttgtaatgcaaacatccatgtgaagttgttcagcctaattaaagtatcaattgtacttattagcactttttgcttgcattcaattcactatatatatatatattaaatattcaatatatatttgtcaaactttggcaacagtccttaaatgcacattaggtattttattgcttaatatcataacctgttggccctgcactctgacctttaacccacttttcccacagcagacaagacacttcggtttaataggccaaaaaaagaaaaaaagaaaaaagaaaggccttttattatttcatagcctacaaaacggggctggcaaattgaaatgtttcaagttttgcggttcgctttgctttggccaaaatgtcgaaataatgaatgttggctgactcgctcagtctgggtgtttagaaatttatcaggcttttttggccatgtcggaagctgaaaattcaaatggaggtgaaaagctggcgcactaaaatctatatcatattctccgcaaaactctcaaggtcaacgagcagcaaaaactatctagtagcaaaaaaaaaaaaaatgaagaaaataaaaaaacgaaagaaagttgcgttaaattttgcaacatctgaaagtcaagatacaaata

SEQ ID NO: 38243 - DNA, 342 bp, DROSOPHILA
atgccggagcgcagcatcagtcagcgggatctcgacgagattgagatcgagagcgacgaggaggaggaggaactggagcagggcgtgggtctgtccacccggagtcgccgtaatcgacgcggtgcctccgattccccggccgcatcgcgtgctcgcaatgccaccaatggcattcaaaatcgcggaagagagcgggagcgggagcgggaaagggaaaggagtagggagcgttttggtggcaccaatgccgccgacgaagctcgcttctatgacgatgaggagcagcgaatggaggacgatggcgaggaggacagcgacgaggatatcgaaatgctggattag

SEQ ID NO: 38244 - protein, 113 aa, DROSOPHILA
MPERSISQRDLDEIEIESDEEEEELEQGVGLSTRSRRNRRGASDSPAASRARNATNGIQNRGRERERERERERSRERFGGTNAADEARFYDDEEQRMEDDGEEDSDEDIEMLD

SEQ ID NO: 38245 - DNA, 2396 bp, DROSOPHILA
gcttcgaaccaatttgaagacctccttgtttctccttgccgtttccttcctctgctgcaattgtgcgccggtttttggcgcccaaactttggtgtgcctcgcctgaaagtatgccacattgcccgtgacgaggagattattgctattgtcgtatcaattggagtacaccccaacagcctagcaaggaagctaggaactgcagctgtggtcaatgctgaccctcggactagagtcaaaagaagactcaagcgacaccaccctcatgacctccctaacctggttttgacctagaaagtcttagttttaaaattcattagaataatcaaataaataataattactatgttatatcaactattataattctccctatcatttttaggattaaaaatctgttagtcttaagtaaccaagacacattgtaaaataaaataatttaagcagatcaaattaagttgccgcatgggtaacagtgcgttgatcaaataataaaaacatcatcgtaatggaaaaaaaaaaaaaaaaaaaaaaaattcaattggtagcatttacatgcggcgcgtttttctctatgttgctgaataaatcacagaccatacgaaacatgttcgtatgaataatttgtggactgtattgcttttgggccattatccttcgatggaatgaggtctcgtaattgctttataaaaagcatgtttttgggtcaccaaaaattgcagcataatcgattaaattagtaaataaatcaataaacatttcctcggccgattggcgactggtgttagattactaattgccgtttggcattaattaagtcgctatttagcaattaagaggtgtttgatggcatttaaggaaatcggtggttcacagtccatgatattttttaaatgaatttttgaataataaatataatataaaataatataaattaagacatttttgtttaaatccaacgaatataattttaattaaatcaaaccataagtgttctgttttgctaaacacctttctccagggtatctcgcatagccctaaacatttcgggcaacaatcccacatggctatccacgcagttgctggtgcaacgttccaagctataatcggatccattgaggcggcactgctggatgcacttctctaggcgattctcaaaatcggatataccctgctgtacgaagcagcgtgatcgggtcaaacggatttggcagcgatcgatgcaccgctccaccgcctccgcattcgcgtccgcatccgcacaacaggcggtcgcacatctgtgcatctcgatctgcaatttgcgcagataatcccgatccagatcctccatggcggttaggattgcattgtcaacgcgttctcgcttctcctccaaactcgaattgtcacaatccatctcgagtagtataaaatttatggaaaatataaaagtcggttggtaattttcgtttgactgcccttatttgagttacgcaaaacgcaatgctactttggttttgtaataatttcttcaatttaaataatatatgagcaggaaatgggcgactcgcagtgttaagtaagttaggtcatgttcttgactcttcttgggcaaatttttaaactaaagtcacggcattgacataactcagtgtgaagctatctctaattgagtttgagttaatttgttttttgctgataagtgcactactgaaagtgtatataagtagaagttggacaacgtggccgtgcatagtttttaaaaatgcattacttgcatatctttgggctcttggtctttttggccgcttttggattaagccttgaacgtcgtgataaggaattctacgggatatctaaggagcagctaacgactactaaacataaagagaattctgtggaatttgtacaacacaagatatccttgaagctgccgcagagatacaaccgattcaaacgtcagtcctttacgccatttgaaaggcgtgtgatacgtttactacgtaaattgggcttattaaaaagcgatgctgaacaactgttggatactctcgaaaaggacaaggatctattacgaagattgaagaagttactcgacgaggtcgacaccgaacatgagaccaatgatttccttgaagatttcttcgatttaatatttttcaaaaaaatataagcagctttcttcctgttgttaggaatgatattgatcgataacaatattgccgattataccgataattaatgccataaaatcgtttatttaaattgttttagatattgcaaacaatctgattgctaatagctaacaatatcattacgataatcgtttggattattctaatcccttacttcctccatcgccctcacacgccatcactctctctctctctctctctctctcgataattatcgatagt

SEQ ID NO: 38246 - DNA, 396 bp, DROSOPHILA
atggattgtgacaattcgagtttggaggagaagcgagaacgcgttgacaatgcaatcctaaccgccatggaggatctggatcgggattatctgcgcaaattgcagatcgagatgcacagatgtgcgaccgcctgttgtgcggatgcggacgcgaatgcggaggcggtggagcggtgcatcgatcgctgccaaatccgtttgacccgatcacgctgcttcgtacagcagggtatatccgattttgagaatcgcctagagaagtgcatccagcagtgccgcctcaatggatccgattatagcttggaacgttgcaccagcaactgcgtggatagccatgtgggattgttgcccgaaatgtttagggctatgcgagataccctggagaaaggtgtttag

SEQ ID NO: 38247 - protein, 131 aa, DROSOPHILA
MDCDNSSLEEKRERVDNAILTAMEDLDRDYLRKLQIEMHRCATACCADADANAEAVERCIDRCQIRLTRSRCFVQQGISDFENRLEKCIQQCRLNGSDYSLERCTSNCVDSHVGLLPEMFRAMRDTLEKGV

SEQ ID NO: 38248 - DNA, 2516 bp, DROSOPHILA
tcaaaattcttgaaaaatttgtttgagcagcgaagaaaagccaatgtcatgcaaatatttgccgtggaaataactgaaaatgtaaatatgagaagtgaatcgaggcgggacaaaaggaagtgacacagtctgatgttctcgagaattggtggtggaaatctgtggtggaaagtgaggaaagtggatttcaatgcattgttcggtccattgatgtcgtcgtcgtgcagcagcgaggacaagcaaacaaataagccggaaacggatcgggggaatatgtatacacaaaccagactctttttatatgctggaaaagtgtaacggaaagtcggccccagatggtggaaatatcagaagctaaagctgcataaaggacgagccattgacgcaaaatgcaatttaccatatatacttcataactttcatcataaatgaaggcatgttcatcaagtctccatagagcacagcctaaacaaaaactggcccaaaaatgttgacaattcttttatacatttatggttgctaataatatgttttatttatttgactaggcaccacttttttttttggcggtcaagccaaaaagtttagactcgcataattcccacaattcggttcaaacaattatttggcaattaacctgtaatttcaatcgcattgatacaattgaggtgtgacaaatcacgggaattatcattagctgcaatgactaaatcactttgctaagttcgcattagttcgttatttattcgttcagttgcgttttatacgtttgccgtgctctcctctctttttgcaaatatgggatattataggaatttattgggattcataactcttttcggtttcctgcaattgacaaagcaggtgtgcagaataaatctaaatcaaataaatctaaaattaaacagtttgtatattcgacaaatttttcttttttcttttaattttgtgttgcatacatttaatattatataattgatttctatcatagcattgttacatgatgaaattggtgggcgcaaagtcctgggacacgcccagttatgggctcaaactcaacatgttcgagaagaacaactcgatgtcctcggtgaccactgtacggcaggacgtggccattccattgtggcatctcgtcctcttgcaacatccgcgcaagcggagctccgcatctgcaccgcgagcggaacttccgcgtacactgtacaatggcacgacgaaaacgtgcgatttctggaaatacattcgccacgtatccgcctggaataatgtggccaagttaatactctcgaagggtgccagcaatatgagtctcgcctgtccactgaaaacgggcgtatacgtaatgaatcgcatccaagtgccgccggaaacggcgctcctgaagttcatgtaccatccaaacacactgtacaccctggagggcactgtttactctctgaatcccaaagacaaggtcaccagaaaggctttatgctattacgaggtgaatgccaccatctacaaatcttgttgacaaactttagtgtcttaaaaatcacgcgaaaagctgcagtgaacttttgaagaatttttttttttttaatattagtttgttatttattttcaaattggttgttgctatataataataataataatgggaccctgaaaactctagtttgcctatgaaaagtagtttactataagtgtcttcgttaaacttaaccgatttgaacaaatctttggtgttataagtaatcttttttaactaattacagttggattagatttctagcttaattagtaattaaagtggaaggcaaatgtttctgcatgattttccctcttcagttgtaaaagttgggctcttcaattgtcagagggtctggtcgcgattgaggttgaactggggttaaggcggttgaaaaacccgtgcgtgtcgcacgtcagcgaaggatttttaattaagtgcgaaataaaaaatggaagggaaaatttataccagccaacgagcgagcgtaagtatatatttatatacgagtatatgtggcaagccaagtggcagaaaccacaaatcagcagaaggaaagatatttattcgcgttgcagtcgtgcaacagtggtattaagttgcatggaacacttttttttttttgattttattttaaagagctcgattacgtttattcattaactgattgcactaaaaagttgcagttatacgatacttaggtgcacactttgaatgccaaattcaaattgtttgcacatttaaagcaaatgtaaataataatgtaaattaacgcacattttcgttgatattcaatatgctcaacagcgtttcgcattttaattttgaatttaatgtgccgcgcttctaatatttattcaaccgtccaccatttgaccagtttgatagcggtcacaaaattgcggcaatcttattgcatatttgcatttgcattttgcatgaccgcacgcactggcccgttgcaattgaaaatttcggaaaagtgcaactatgtgcacatgtg

SEQ ID NO: 38249 - DNA, 516 bp, DROSOPHILA
atgatgaaattggtgggcgcaaagtcctgggacacgcccagttatgggctcaaactcaacatgttcgagaagaacaactcgatgtcctcggtgaccactgtacggcaggacgtggccattccattgtggcatctcgtcctcttgcaacatccgcgcaagcggagctccgcatctgcaccgcgagcggaacttccgcgtacactgtacaatggcacgacgaaaacgtgcgatttctggaaatacattcgccacgtatccgcctggaataatgtggccaagttaatactctcgaagggtgccagcaatatgagtctcgcctgtccactgaaaacgggcgtatacgtaatgaatcgcatccaagtgccgccggaaacggcgctcctgaagttcatgtaccatccaaacacactgtacaccctggagggcactgtttactctctgaatcccaaagacaaggtcaccagaaaggctttatgctattacgaggtgaatgccaccatctacaaatcttgttga

SEQ ID NO: 38250 - protein, 171 aa, DROSOPHILA
MMKLVGAKSWDTPSYGLKLNMFEKNNSMSSVTTVRQDVAIPLWHLVLLQHPRKRSSASAPRAELPRTLYNGTTKTCDFWKYIRHVSAWNNVAKLILSKGASNMSLACPLKTGVYVMNRIQVPPETALLKFMYHPNTLYTLEGTVYSLNPKDKVTRKALCYYEVNATIYKSC

SEQ ID NO: 38251 - DNA, 3845 bp, DROSOPHILA
gcctggctctcaagggcactgtcaaaaattaattaaacctctttgccggcttctttaagttaaatataaatgtattcttaacaaaaatgatgaatagtatttataaattagaaatatttaaaactaaagagtaaacgcaagtatattttaaagagcaacattttctcccagtgtaccgtgtgcattcatgcatgcagctggcgctgttgcggtgaggggcgtggctccggcgttgagtgggcgtttcggacatatcgcttcgtttttacccgggcaacagtaccgcatttgcatttatatgcacatcctttgtgcccaaaggatattacatttttccacttcaagcatttttgtgaatttaatgaaatttttaatttttatgcgcgccagatgggcgtgaagtgtagacagagggggggcgtggcagtgcctcctttcgcttggactaacaagccgcagagatatgtatgctgcatttgctttgcattctcggtgggtccagtgcggtaactactttccacaaagataaataaaaactggtcctagccaggggaataccccttatccttatcctttgctcatccccaaaccccgcacttgtggtcaaaaggagaaaaacagttgaattggcttttggtttgcacttgcattgcgttttacactgttctcgggattgcggccactcttgcgatgattgctgctgcttgattaccaagcactcaatgcgtaaaaaacggaagtaactctgaaatattacattttaaaggattaaaaaaagttagttatcatcagtaatcagtctcgcttatacaaatgttattaaacccttaacattaagctaattggatggggcgataggataagattggatcgaggccaaagtggctagcttagcattaatgaaacatggagcagtggcgattaagttgaacagaaaagctcaccattagggaaattagacagcgcatttacttgtgaactcgcaacagtttcgtttcaaatgtttcaccatctgtggctcctgatgggacttcgatccctggcaatgggtgcactgcatccgccgcaaccggaagcgatgacacccctggtcgcagctgccttggaaatcctggccgagcaggttagtccctcgcagagcactttggccgtgatggatctaacgcaagatgctgagcaccgggatgaacggcaggagcagttaatgaccataatcctcagatcggtgggttcagaaatggcactgaggacgttccagaaaccacctgccgaagttccagccagcttcgtggtctttctggttaattccgcacaggcatttaacacactgggtttccactttaccgatatccactccacgcgggaatttaacttcctcatcctgttgacacatcgcatgtcctcaagagccgagagacttcaggtgctgagagatatatcgaggacctgtgtcagatttcacacttcaaatgtgattttgttaaccgagaagagagacggtgtggtcctggtctacgcctatcgtttgttaaatatggactgcgatcttagtgtcaatctggagttaatagatatctataaaaatggattatttcggcatggtcacgaggccaggtcattcaaccgggtcctcagtctgtccggatgtccactgcaggtcagttggtatccattgccaccattcgtgtccttcatcggcaactcgagtgatcccgaggaaagggcacagatctggcgactaactggcatcgacggagagctcattaagttgctggcgagcatctttgactttcgcattcttctcgaggagccgtgcaataaatgcctgtcgcccgacatcaaggatgattgcagtgggtgcttcgaccaggtgatcattagcaactcatccatactgatcggtgccatgagtggttcgcatcagcatcgatcgcacttctctttcacgagctcctaccatcagagctcactggtcttcattatgcacatgagttcccagtttggagcagtggcccagttggcggtgccgtttactgtcattgtttggctagcattagtggtttccagtttgctgctggttctagtgctctggatgcgaaatcgactcgtgtgcggacgatccgatttggccagtcatgccctacaagtgctcaccacccttatgggaaatcccctggaggccagaagcctgcccagaagtagtcgactgcgcatcttgtatgctggctggttgcttttggtcctggtcctgcgagtcgtttaccagggcaagctattcgattcctttcgattgccgtatcataaaccgctgcccacggaaatatcagagttaatccgatctaattatacactgattaaccaggagtatctcgactactatccgcgcgagttgactgtcctaaccagaaatggttccaaggatcgtttcgattatatccaaggattaggtaaggagggtaaatttacgactacctccctgatcgccaccatggagtactacaatatgatgcactggagcaccagtcgattgacccacatcaaggagcacatctttctctaccaaatggtcatctacttgcgccgccattcgctgctaaagttcgccttcgatcggaaaattaaacagctcctgtctgccggcattattggatattttgtgcgcgaattcgatgcctgtcagtacaggaaaccctttgaggaggactatgaggtgacacccatacccttggattccttctgcggtctttactatatttctttgatttggctgtccgcagctgttgttgcttttatcttggagcttctcagccaacggattgtctggctgaggagaatttttgagtagttgatgttatatacttaaaaatagtatatttataaaccttttttttattaattcaaaaaaaaaaaaatacaaatatttaagcgctaattaaagctacacatgtgtctacttacctgctctatctagtctagaatttccgttctcaaatctaagtcctcaaatcgccatatgggtagccagttgttgaactgccgctggcattttggttgtggcaacagaagacaatggaaagtcctcgttagccggcatataaagagcaacaaggcaacaaaatcaagaggaggtttttgggaggaaaaaaaaaaataataggacaaaaacaagacacgtccgacatagaacgaactcattagcctacatggccgcattttctgcctacacacatgtggcagcatgaaaggggtaaaacatatgtacgtacaccagcggtccagttaatagcactaaaagtttaattcaaatatttaagatataaattgaaaatggtaaattgataaagaaatttgtaaaaattatcttgtttcatattctaggtaatttctataatctattgttgaaaatgaaaaatataacatcaaataaagctcacattaaattttaaaaagaatttccaaattttttaatgttaaaaaaggtggattaagagagcggtatactaggaatactagcgttttttgggggctgaagggcatacaggttcctaaatggaacacaaatgcgatctggctggttgcagtcgtgtgctttccttgttgctacatattttgtttgcttaaatgccggaagtgttgcaggccacatcaggagtgggcgtcccaccctaacccttttcgtccctaaaagtgcctgcaagcaacaaatgttgtcagcatgtagaattcaattacaaggtcataagtcactgtcagcatactctaacctatttaaagtcctttaaaaccattttattataaaagacgcagtgatttttgaagaacttgttacagtctttggcgttctt

SEQ ID NO: 38252 - DNA, 1845 bp, DROSOPHILA
atgtttcaccatctgtggctcctgatgggacttcgatccctggcaatgggtgcactgcatccgccgcaaccggaagcgatgacacccctggtcgcagctgccttggaaatcctggccgagcaggttagtccctcgcagagcactttggccgtgatggatctaacgcaagatgctgagcaccgggatgaacggcaggagcagttaatgaccataatcctcagatcggtgggttcagaaatggcactgaggacgttccagaaaccacctgccgaagttccagccagcttcgtggtctttctggttaattccgcacaggcatttaacacactgggtttccactttaccgatatccactccacgcgggaatttaacttcctcatcctgttgacacatcgcatgtcctcaagagccgagagacttcaggtgctgagagatatatcgaggacctgtgtcagatttcacacttcaaatgtgattttgttaaccgagaagagagacggtgtggtcctggtctacgcctatcgtttgttaaatatggactgcgatcttagtgtcaatctggagttaatagatatctataaaaatggattatttcggcatggtcacgaggccaggtcattcaaccgggtcctcagtctgtccggatgtccactgcaggtcagttggtatccattgccaccattcgtgtccttcatcggcaactcgagtgatcccgaggaaagggcacagatctggcgactaactggcatcgacggagagctcattaagttgctggcgagcatctttgactttcgcattcttctcgaggagccgtgcaataaatgcctgtcgcccgacatcaaggatgattgcagtgggtgcttcgaccaggtgatcattagcaactcatccatactgatcggtgccatgagtggttcgcatcagcatcgatcgcacttctctttcacgagctcctaccatcagagctcactggtcttcattatgcacatgagttcccagtttggagcagtggcccagttggcggtgccgtttactgtcattgtttggctagcattagtggtttccagtttgctgctggttctagtgctctggatgcgaaatcgactcgtgtgcggacgatccgatttggccagtcatgccctacaagtgctcaccacccttatgggaaatcccctggaggccagaagcctgcccagaagtagtcgactgcgcatcttgtatgctggctggttgcttttggtcctggtcctgcgagtcgtttaccagggcaagctattcgattcctttcgattgccgtatcataaaccgctgcccacggaaatatcagagttaatccgatctaattatacactgattaaccaggagtatctcgactactatccgcgcgagttgactgtcctaaccagaaatggttccaaggatcgtttcgattatatccaaggattaggtaaggagggtaaatttacgactacctccctgatcgccaccatggagtactacaatatgatgcactggagcaccagtcgattgacccacatcaaggagcacatctttctctaccaaatggtcatctacttgcgccgccattcgctgctaaagttcgccttcgatcggaaaattaaacagctcctgtctgccggcattattggatattttgtgcgcgaattcgatgcctgtcagtacaggaaaccctttgaggaggactatgaggtgacacccatacccttggattccttctgcggtctttactatatttctttgatttggctgtccgcagctgttgttgcttttatcttggagcttctcagccaacggattgtctggctgaggagaatttttgagtag

SEQ ID NO: 38253 - protein, 614 aa, DROSOPHILA
MFHHLWLLMGLRSLAMGALHPPQPEAMTPLVAAALEILAEQVSPSQSTLAVMDLTQDAEHRDERQEQLMTIILRSVGSEMALRTFQKPPAEVPASFVVFLVNSAQAFNTLGFHFTDIHSTREFNFLILLTHRMSSRAERLQVLRDISRTCVRFHTSNVILLTEKRDGVVLVYAYRLLNMDCDLSVNLELIDIYKNGLFRHGHEARSFNRVLSLSGCPLQVSWYPLPPFVSFIGNSSDPEERAQIWRLTGIDGELIKLLASIFDFRILLEEPCNKCLSPDIKDDCSGCFDQVIISNSSILIGAMSGSHQHRSHFSFTSSYHQSSLVFIMHMSSQFGAVAQLAVPFTVIVWLALVVSSLLLVLVLWMRNRLVCGRSDLASHALQVLTTLMGNPLEARSLPRSSRLRILYAGWLLLVLVLRVVYQGKLFDSFRLPYHKPLPTEISELIRSNYTLINQEYLDYYPRELTVLTRNGSKDRFDYIQGLGKEGKFTTTSLIATMEYYNMMHWSTSRLTHIKEHIFLYQMVIYLRRHSLLKFAFDRKIKQLLSAGIIGYFVREFDACQYRKPFEEDYEVTPIPLDSFCGLYYISLIWLSAAVVAFILELLSQRIVWLRRIFE

SEQ ID NO: 38254 - DNA, 2243 bp, DROSOPHILA
gctcattgcatattaattgggaatttcgggtctcgagcttggtctaccattgaggtgattaatgatttgtagacaacgtcgggtgtaccgaatgagattgcgaattatattgtgtttgatgcgatttctatcatgatgaaaattgtttccgaacttaatatagctaattagtaacaaattgcgcagaatgtttttatttagaaaatagaaccatattattgttcagtataacactctagtatgctgtataaaatccctttatgaattcaaatcaatttctttcttattcttttgcactactttaatatggctttttgaatactagtaatagtcttaatgccttacattacgttatctttatttctatactcacttacttatcaactctataagctattttcctgttcctcttcaacaaatcctcttatctcatcgacttctattccggctgcaagtgtaatgcattagaattgccaaatcatgtattcttaaactcccaaatcgatcgaattgacaataaagccaaatgtttgccgccggccaaaacgaaaccaaaagccgatatagaaacagtcagcgaaaggacagtgagttgacaaaaagaaccgacacacatttggggtttttggggaaggggttagtatggaaagtggatgccgcgccggaagaggggcatacttatcgatgatggtgatggtgatgatggtgtcgatgtcgtcaggcaaacagattaagaaacaataacgctgttttgtgctcagtacatttggcaggcattaggcgagctcgttgagagccgtaatgagccataaacttggccggcgggaatgcatgtggaatacgaaagtgcgatgcagtcagcgatgcggggcaaagcggctcagatccgcctcaaaacgccaatgtttgaggtttcggtggtataaaaggctgcaatctggcaaacatcgagtgcagttcgattttgtttgtcaagtcgagaattaaccctttcgtcatcatgctgaagctggtgagtgtttgctttgccggaggacaccagcctttgatcccgtaatcgctgaacgaatgccctttgtttccgctcccacaggtactcctcctcctcgccgctctcctggccgttgccatggccgttcccgctccgggacccagtccaaatcccgccccggtgccacagtttgtctactccgccggctatccggccgtgggatacgcctccccgtacgtctactacggctgaactcaatatccggattcaccgaatcaaaccctttcgacatggacatggacaagcagtttgatttactttatacaaaaactttggtatatatttcatttctgaagaacaataaataaattgaaatcatacaattcaaactctaaatatgtacttttacttcacttgagcaaaagcttttcaagaaaagcattaaatcagtttataaagttttattgcacagaatgccaaagttttacattttataaatgcaattcgaaacttggttttatttatggggaaaaatcttagggtctgcatagaattttgctgttaactgttataaacggcagaggcacaaaagcattcttttatggcaatccttttctataaaagctctgattaccccgcaataaagctcaaattatgctttcaaagccttttaaacatttcgaacttcaaatgcttagaaacatgagcctgtaaacaagttgccaactgaaatgccgacggaaagtgtgccaacatagcgaagttcctattagaagaagttttcccttttcggcccgacttgctggcgatggggcaacaaggatgtggcaggacgagcgatgacttcagtgtactttctgatttcgcaacggttcgaacgtgagcgcgcctgcaggaatcgaaggactcgctttttggggaagtcacaacgtggacttcgtcctcgcactcgcacttcgtcaagtatccgccgtggatgccgaatgtcctgtggtgcactttcagtcgaatctcgacgttcgcctgcaatggatcaggggactcccaagcggcggctccccgagtcagtcaagtagagcgcgaaaattgaacgtaaaatcgctcgcaggatatgtttgccggatatgtcaacctacgcggagcccaacctccgtccggtggcttcctcctccgatccgagtgcttccccaagtgctagtgcttaagaagaagataaaaaaagaggcgagcaggccaggaaccacaaagcgaa

SEQ ID NO: 38255 - DNA, 162 bp, DROSOPHILA
atgctgaagctggtactcctcctcctcgccgctctcctggccgttgccatggccgttcccgctccgggacccagtccaaatcccgccccggtgccacagtttgtctactccgccggctatccggccgtgggatacgcctccccgtacgtctactacggctga

SEQ ID NO: 38256 - protein, 53 aa, DROSOPHILA
MLKLVLLLLAALLAVAMAVPAPGPSPNPAPVPQFVYSAGYPAVGYASPYVYYG

SEQ ID NO: 38257 - DNA, 4077 bp, DROSOPHILA
atttattaaataatcgaagcgttttacatataaaatcaacaatgtattgttttctagcttaatttcattgtcgaaaaattcaccaaaaacttggcaatacatatgaccagcttatattttcaatggtttccccgtttgtgtgtgcacgtggtgctatagattcaattaccaataattaatttagccagccgtcagcagcatgtcgaaaaagaaatcgcacacaaaacgctgtaaaaccagctcttatcccttttgcaaatagttttggatatttgttttcaattttgtctgcacaaaagctctcgaactgtttgactgaaattttagccgtccaaagctaagcattccaaaggacggggcaaagggtttttgtagctgggctcgggaaaatgtaataaaaagtaggtacgcgcactgggaagtgaagaatttgccgctctgggatgcgccataaaaagctgacgaaatcattcgaaaaactgccatatttcattagaaaaggaacaaccaattgtgctaaaaaaaaaataaaataatggcgaaataacattattacggagaacatatgtgtaaaaatttttctcattggaaaaacactcttctgatgaaacatatccttaaagtcaccatatgaatcatataagattgctttctgaatcctttgcaattacaaaatgattgctgaccatattttttctcaactccactcgttcgctttactaggaaatgaaaatacaagataggaatttctattaaaactgcagctgaaatggtgaaggcactgaaatgagatgccttgcatatttcgcaagatatcaaaatatccagagccattcagacactggcagcaaagctaattaaatgccgggcaaaacaaataaaaaattcgcgttcggttcggagaaaaaaggagggaaaactgtccatataaattatgattatttttatgagctgccaagccaagttggtcgaccttaccccttgaaaacggataaatttaatgcaaaaagcgcaccatctcaccatcttgccccttgcagctgcaatccttggccagttggacagcacgagcagcggggggagtggcactggcggcgcgccccccgatagaccgcccactcccccgctcagcctgcagccgtcgacgccatcaataacgcatttcgtaaatgagtccttcatcatcttctgccagacagtacaaaaggatatcgacaccaagtggcgcgatccccgcggacagacccgtgagaacaccaagggtcgcgtccacatcgagaagaagacgacgggtaagtggagcagtggcgaagtggtgacccggccgagtggataaagtcactgtctgctgggcacgagcatccttgtgcaggatgcaaggcagaaagttgagcggaacgacctggttgtgaataatggccgccttattaaatcattgccaaaacaggaagctattaagagtgcccaagcatacgactgggatgagcataaataatgcctttctcggaggaattcaagactcaatttaaactgcatatatgattagaagtagtgaactctcactatttcccatcaaagaagtccttatgcacttgagattgacctgaaacttaccagactttccgctgtgcatgtcctttgtttcaggactcctggcattagttttcgagcacatcgcactggaggacagagggaactggacctgcgaggtgaacgggaacaggaacggcaatcgcaacgtgaatgtggaacgtgaatttttggcctccttcgagctgctcgtaaatcgtaagttgacttcggctttggggacttgaagggcattaaagaaacggggtcgtaaaatctgcagcaggatctgtttacttgtcctcttagttgtgattcggcaggactgccaaacgagaggagtttcattcagttggcaactaaggaattaaacatttatgagcttagccattggctactttaaatttgtatgtggatacatttggataacgaactcacttatatatttcaacttcattatttggctgacaaaaatcttcgtttgcaagttgtccaatttggccacaatgctctcgaccactttttgcacacaattccggaccaatttccgactgacaaatcatttaatgtgtttacaaatcggaatgactgactgcttcgctagccacatttaaagtaaggcaatgaaccggaacacaatctgtcaactttccaatcaaagagagaccaagtaaacagaggcagcaaagaagctgcttagttatatatgtacatataccctgcatagcatagtatccatgcggtgggtgggggtgcggtggctatcatgactgcatatttacacacggaatttgaacaacgcaccccttccggcttcctctcctcctcctcctcattgtccttctgctcccatccacattccatctgacttggtccgcagagaaaatctcatttggcaagacggagcaagtgcagtcggtgcgcgagggacgcgacgcgatggtcaattgcttcgtggagggaatgcccgcgccggaggtctcctggctctacaatggcgaatatataaacagtaagtggcactttgacccttcaacccggctacactataaccagctataacttatttcattcataatgaatgtagccgtatgtttatttctacatttaagttccttaactttgctttgaaaacacaacactctttctttgagttaatttccaaattaaagccagcttacccggatttgttagttcaattttctggctgcacacacttgcaaaacttcttggccatgcatgcatatcccgacctccgttttgaccacatttgtaacgctcccctccgctttgtttcgcctgcagccgtcaactcgacgaagcacaatcgcctgtccaacggtctgtacatcaggaatgtgagccaagcggatgccggggagtacacgtgtcgggcgatgcgcataacgccgactttctcggactccgatcagataacaattttgctaaggatacaacgtaagtgtcgccttactccgcctcactccgatgcactccggctaggctaacggagcaggacacacgcaggacgtgccgcactcgataatatttaatctggaatttattttgcaccccacttgttggcaattgcatttggctgctttcggtcccctcagtgccttagttccttagttttgcggaagtgaaaggagctgtgcaacaaaatctttgccgatggcagcttaaagttgctcgagtcccctccgttttgccccctagggagtgaacatgcttcgttggctttaataagatttccagctccgagcaaagtcccgattgaagttatccttatcccctcagcacagcgatgagaattccttccggatgtcagggtcaagtagctgggaaatgcaaattattgatgcaaatttcataatgaacatattacccgactgagcatttcgagccaaaaggggattcacatcaaggggaatataaacttatcctgcgtactgtcaggggatctgctaagcaggagctacagaagcaaagtgtacttaatttaaagtcacatactagttactcgctaactgcactcacaagtatgatttatgaagtgatttatgattaacattcctcccacacaccccaacgtattgatcttcaagttacggctcaagttagtttatcgcaagtcaataatttctggtatttgcaaacccaaaaaacagtctcctgggactcatttgtatggctgacactgccgagttgttgccatcgatatcgcaacatatggcttcataaacaaaccaacaccaggcgagccaagtatccagaagcttggccaacttgatccaaactcctcgtccagcatcctaatgccccttcggaattgagttgccgtcaaaattttactaatgactgccggtcgaatatttgcacaagtcaagcttggcacactcagaaaaactcaattgtagaaatcggtttattttacatagtattatgaaaatgacagttcacgtttttcttctgagtgcatctgggtccagccaagcggaccaatcc

SEQ ID NO: 38258 - DNA, 768 bp, DROSOPHILA
atgcaaaaagcgcaccatctcaccatcttgccccttgcagctgcaatccttggccagttggacagcacgagcagcggggggagtggcactggcggcgcgccccccgatagaccgcccactcccccgctcagcctgcagccgtcgacgccatcaataacgcatttcgtaaatgagtccttcatcatcttctgccagacagtacaaaaggatatcgacaccaagtggcgcgatccccgcggacagacccgtgagaacaccaagggtcgcgtccacatcgagaagaagacgacgggactcctggcattagttttcgagcacatcgcactggaggacagagggaactggacctgcgaggtgaacgggaacaggaacggcaatcgcaacgtgaatgtggaacgtgaatttttggcctccttcgagctgctcgtaaatcagaaaatctcatttggcaagacggagcaagtgcagtcggtgcgcgagggacgcgacgcgatggtcaattgcttcgtggagggaatgcccgcgccggaggtctcctggctctacaatggcgaatatataaacaccgtcaactcgacgaagcacaatcgcctgtccaacggtctgtacatcaggaatgtgagccaagcggatgccggggagtacacgtgtcgggcgatgcgcataacgccgactttctcggactccgatcagataacaattttgctaaggatacaacgtaagtgtcgccttactccgcctcactccgatgcactccggctaggctaa

SEQ ID NO: 38259 - protein, 255 aa, DROSOPHILA
MQKAHHLTILPLAAAILGQLDSTSSGGSGTGGAPPDRPPTPPLSLQPSTPSITHFVNESFIIFCQTVQKDIDTKWRDPRGQTRENTKGRVHIEKKTTGLLALVFEHIALEDRGNWTCEVNGNRNGNRNVNVEREFLASFELLVNQKISFGKTEQVQSVREGRDAMVNCFVEGMPAPEVSWLYNGEYINTVNSTKHNRLSNGLYIRNVSQADAGEYTCRAMRITPTFSDSDQITILLRIQRKCRLTPPHSDALRLG

SEQ ID NO: 38260 - DNA, 3161 bp, DROSOPHILA
gttcacgtttttcttctgagtgcatctgggtccagccaagcggaccaatccgtcggactgttggcaactggagggcaaacagcaggcgaatggaaaccgaaactaatttgctgcccggcagaagcccccgtgcggggattccgttggattccgaatggaagcagaaacagtggcagcagttgaaatgctgcaaatgcggcaatatataggtttgcattttctcagccataaacttcaatggaccgcatcggcgacgaaggcgacaaggacaccaaggacactggcaccactgcgaaatgctaaaatgtgccattagccgggagcaagggatggaggtcctgcgagtccttggccagcacacaactaacagtgggcagcacatgagctaagagcagttattgaaacttaattgcttcggctgcactgcaatttagctgctagttctaaggcagataatctctacttcgatggacacttgaagtttactaaaagccatcgcgatagtacttttatctggcaaatcttattgaaccaattccaatagactttccactatgcaaagatacttttcaaaagggcagagaaagcgagaaaaatgaaattcacagcagagagtgattcaatttctcgatacaatgctcagtttttccttcctgtccgttccttaactcaagtctaaagccatttcttgatatttttcccgggagttaaaggaaaatgtaagaaaaagtcggatatctgttgttctagtgattcgattatcacgttgtgcaggtggcaagtgagtcaaaattggttttgatactccttaaatatgatattttcaaagagtaatttaacagtctaaagtttgtttaatttagagcactttggagtgtagcattgatttaaagttcaatggatttgggcacaatcaactgtgataagaatatccttccacaaattttgccacgttttcggaattgagaacaagcaaaagggtgccaaagtttctgtgaatatgcgggcgcaaaaacgtacacttagagaaaacttcattgaaaataatcaagaacttatgtcttcaaacaagttttttgcagtaaaaactatttcgagacgagatgcactccgtgttgttttttggagtggattatcccccgcccccctcacttattccccagctactatacacctgtaacccccctttcgtattcatctccaccccttcttagataaaccccactggttcttcaacgagaccctgcccgtgcagtacgcctatgtgggcggggcggtgaacctgagctgcgacgcgatgggcgagccgccaccatcgttcacctggctgcacaacaacaagggcatcgtgggcttcaatcaccgcatcttcgtggcggactacggtgccacgctgcagctgcagatgaagaacgcctcgcagttcggcgactacaagtgcaaggtggccaatccgctgggcatgctggagcgggtgatcaagctgaggccagggcctaagccactgggaccgcggcggttccaactgaagaagctctacaccaacggcttcgagctggacatccaaacgccaaggatgagcaacgtgtccgacgaaatgcagatctacggttaccgggtggcctacatgagtgacactgagttcaagttcagcgctggaaactggagctatgccaagcagagggacttctccttccacgggggtgagtgtcctgtattggttataattcgcaatttattggcatacttatcaatattataacgtgttatctgctctcatcgattgtttatttgccaatgtgcactggctaaaattcgcttcaatggcaacatggccaatttaatttggttgacttcacacaacagtcgaattatgcactgtcagttttcaaaggactaattaaacccatttgaatatacattagtgagcggtcgaagtgcacttaacatactttttcaaatcataacgattccaggcaagcacttcatcattccccacctggagacgaacaccacgtatctgatgcgggcggccagtaggaatctggccggattgagcgactggagtcccgtgaaggtgttcaccacggccgcaggatgcagctggagtccttggctgtatccgtcatatggactcattctcgctttgatctggacatagagcctcgacctataccgatcaccaataccaaatgcaatcccaacccaaactcgttattgttgcgctaagttttctgttttcgtgtatcttctgtgatagaactttgtgtgtgcaatttaacctttaacctaacccgagaacgttgaaggagcgaattattaaacgaaatgcttttagctatatatagacgacatctgtttagcctattgccaatttttgctgccaactttcattcatcgatcgcattttttgtacgttttttatgagaaattattatcgaacgattttgaagagggtggaatccttacgatacatacaatacatatgcattgtcaactctaccttatagttaaatatgaaacgcccaactctacataaatgttgttcaagctaaagataactaaaacgatatacaagtaaacacacacacacacaaaagaaccgaaaactttgatgaattttacaaaacacaaatggaagtccaaattattgattacaaatgataaatggaagcagagcaaatcaataatagaaagcggattgaattagcttaattgaagtgaaaatcgaataccagaaatgagaatcgaaccccgaagtaaaaagtaaagaaatgtttagttggtaagcagtgcgtatgagtaatatgaaaataaattcaactgaatgtgtataaaaatgactttaatttgattttggtttctgggttgtaaggtaggtaagtatgcatattggtacttagactatcttcttttctaattacattagtagagctctaaattaattaagccgccacccatttgttgaataatttcctggcttcctctcccttaaagatgccttccgatggttatctttgtttgtcacctgccgccataaaaatgtttatcatactcattatcgcaaatctcgcattgctttcagtccataaacatcctgggacaaggacaaagcctcggacaaaatgaaggctcattggcaatgccaagcacgttcccaa

SEQ ID NO: 38261 - DNA, 690 bp, DROSOPHILA
atgcgggcgcaaaaacataaaccccactggttcttcaacgagaccctgcccgtgcagtacgcctatgtgggcggggcggtgaacctgagctgcgacgcgatgggcgagccgccaccatcgttcacctggctgcacaacaacaagggcatcgtgggcttcaatcaccgcatcttcgtggcggactacggtgccacgctgcagctgcagatgaagaacgcctcgcagttcggcgactacaagtgcaaggtggccaatccgctgggcatgctggagcgggtgatcaagctgaggccagggcctaagccactgggaccgcggcggttccaactgaagaagctctacaccaacggcttcgagctggacatccaaacgccaaggatgagcaacgtgtccgacgaaatgcagatctacggttaccgggtggcctacatgagtgacactgagttcaagttcagcgctggaaactggagctatgccaagcagagggacttctccttccacgggggcaagcacttcatcattccccacctggagacgaacaccacgtatctgatgcgggcggccagtaggaatctggccggattgagcgactggagtcccgtgaaggtgttcaccacggccgcaggatgcagctggagtccttggctgtatccgtcatatggactcattctcgctttgatctggacatag

SEQ ID NO: 38262 - protein, 229 aa, DROSOPHILA
MRAQKHKPHWFFNETLPVQYAYVGGAVNLSCDAMGEPPPSFTWLHNNKGIVGFNHRIFVADYGATLQLQMKNASQFGDYKCKVANPLGMLERVIKLRPGPKPLGPRRFQLKKLYTNGFELDIQTPRMSNVSDEMQIYGYRVAYMSDTEFKFSAGNWSYAKQRDFSFHGGKHFIIPHLETNTTYLMRAASRNLAGLSDWSPVKVFTTAAGCSWSPWLYPSYGLILALIWT

SEQ ID NO: 38263 - DNA, 6071 bp, DROSOPHILA
gtttgcttgctatgcgtaccgtggcttacccaatccaacgtgcgatttgttcagcgctttcaggctgtcgaagtgctccttgggaatcgccagatagtggagtctggctgccggatacttgtccttgaagatcacgtactcgtccgtctccacctccaggatgggcggcggtccttggcggcggtgggcgaagtcgcagaagaagcacttttcgctttccgcctggcgaacctcgccactggcacatttgtagatcgataccaaaactattaagcccaaaccggccagcccggctatgtacattttagccttgtttttcattcggctgtttgactggatcggcacggtcttagcttttcttttcatgaacgtctgtgactaagatcgtttcacactttcgaattggtaaaatattttggataagcgaagtaaacattgtagcgggtatttatcgattaaccatcgagcggtcctatgtgcacttccattggaaatattccagtgctaggcgggaattttaaatcgtgtatttacattttataaaatatgaaaatgtatccagaactaatcattgaaaatatatggaaattaaaaatatataaaaactgtaggtgtgcgaaataaatcacctttccatatagcagcgttaatgaaatcactaatgccattgcttggcattacaagtaataagttagcactgtaattatttatatgtttagtttcatttttaattaaatttgttattttctatccgatctatcgctgccttgccacctgcgatagtttgatacctttatttcctcctggccgcagtgtgaccgcagcggcctatcgcccatcgatagttcgatattcttattgctttattttattaggaatagcaaaccatttatccgtattttttgaattagcgacctaatcctgcgttggccaaagctcaagcaaccggaaaagcacgggatcgccgacggccaaggacgtaaatcacgggaaagtcgggatgtggccgcaaacgctggaaatgtcgcgggacgagtgccgaggcatgctgcgtcgactgggtgagagctgagtggtcaacgaaattcagtcccatcctcgggagctcttgaggatcggccgccgagtggagcgctggcgactaaagcactttcttcctgttgtctctgtttttgtgcccaccagaactcgagtcctattcacatgtggtgagcgtttttcgcgcccaaggagccctcagtgaaacgaaggcgaaactgctggaggagctgcgccagcagttccacattaaccaggaacgccacagggcggaagtgcggagggcggccaacgacgagcagctctgcaccatagcggaaaagtgagattcccagtgagatactccagtgcaaactaactactaatgccctgtgtatctgtactgcccttgcagcgtttgtgggcccaacacctggcaggaatggtcacgcgagggacgacgcctctatcctcttcttcccaggattagtccacaaactgcgctgagcatcgttgccaatgacctggcggccaaagcctgcgaggaaaacgccaaattggctgctccggccgaaacggcggtccactttggagaagccctcgtggagcaggcctcgctgatgagcctgaaatatccgcgtggtgccaggatccaggacaccgccatggtgatcatggcggagccggtgagttacataatcccatccgtgtagtttccactcgcttgaggatagcgaatgtgcagactgtacctgccatgaaaacaagtgggtggctgcttttgggcgctgccaaaaagttgcccagcgccaattaccctttgaatatagacgtaaataatgggaatcctcagaagaatttaaaaaaaaaatcataattccaaatgaaaataaaaatctgccactaaaaacaatccagttggattgtggagttccaaccagaatgctaaaaaggcgggaaaattaaatcgtttcaattttcttcgtacttcataccattttacactttcgttgtcacctttttagtttcccaatcgtttttcgcttatttgttaatatatctctggtaatcattagctattcaacttaaaccgccagtaacagaaaactgtgagtatctgttaactgggcttaacattctgttggcttccagctgttatcgatagagggtgaactttacgtgccgttcaaattggattttgaattggattatataacgagcacaaataaatatgtaaatatttatgtttataaggaaagtgacttaaaaccaaaataagtaattctcctcgccctttttatcttgttttctaaagtgtctgttttcaggagtctgtttcacaagttgagtaatgaaaacgccaaaaattaaaatcaattcttccctccttcagttcaaagttcccgatctacccaatgaggtgaagaaaatgacacagaagcgcaaggagaacgatagcggaatcgacggcaagccgaacaagaagcggcatatgcagcaaccacatccgcagcagccgcatctgcaggcttcgcagcagcagcagcagtcacagcagctgaatccgaactcctcgaatcccggcatggaggaggcagatcccgtgccgccagagaaacggatgactgctcggacgctacagcagcgctacttctaccagcagcagatgaagcacaagcagcgactggccagcaaacggaatcttgccaacagactgggctcaccctccgcgcaatcgggcaatcccttgggcggcaggaatatgcccagctccggtggagacacttcgacagctaagcgaagtgccgcacctgccaagagcggcagacgagcgcagaagcaactgcagcagcaacagaagttgcagcaacaccagcaacagaaagtattaatgcagtcgcaggagacggtgcccaatcacatggtggtacagccgcacgtggagtatgtgttggatgaggcgctcaaaacgctggcggcatccaatcctcccacgcccacgtccacagtcgctcctccatacacaatcctaaacgagccgaggccactggtcacgctgaagcctctgaagaccattaagccgatgatctatgggccgcaaagtggtatgccctctgccgaaattggatcccccacaacgccaggctctcgcggatttgccaactctcccatagtgtttaaggagaagctgcaggcgtcacccgtgcaggtggccacacagggtcaaggttcgcccaccaagaagtttgtggctgaggaacgacatgcggatgcgatgccctccgcggccactacgcccactcccatttccaccgcgaatcttccattggcgccgcagataatcagtgttcagaagatcccagctccgtcgatgggcggcaagctgagagcagccgtggcttcgcccaccagttccacaaactccacgctcctgccaccgggcgccaagacaacgcccaagaagttcaacatccttgagggcgatgccaagcccaagaccttgcccagttcggcggttcgcctgctgccgtacacggaacccataggcggtcctttgtcgccgctcaaggattccagggtcactcccttaagcagcgcctccaccgtcaacattatcaagaatataccagctagtagtttaaacaacacattgatcacaccgcttccctcagccggcaccaccatgccggcgaatctcttcagagcgaaggtaacgccgtcaatcaaaggagccagcggtgctgcaggcggcgcaaccgttattggtgccgccggagcaacaggaatcggtggagcaggggctgggcctcagatactagggaatatcaagctaaccagcagttcgggcggagcagccactattaaacaggtgcccagcagtgcgctgcggaacataaagatttgctcacccaacgggaagctattcctacagccgggtaaactgccagccggaagcattattcacaagttcaataacgcaagcagcactgcggtgtctgcggcgggaggagttgtgaccaccaccaccaccactgtatcgcccacaaagcagccggcgagggagcagaggatcagcatacagaagatactccagccggcgacaggaagcgccagtagcggaagcagcagtcccaccaccaccacgacgaccatatccggcttgacttccagtgccaagcagccaggtttgggcaacaagccgaccacgctgaccttcgccactgcgggcggtggtaagaacaatctggtctttctgccagcgagtgcggcgagtggcatgcgggcactcaccctggccacaaagcccaagtccaatgtgctggtcataggggcgagcacctctccagctagtgccgcgtcatctcccaatccctcaggcggcaccaagcccaaagccaaccaactcattacggaggacacgcccatcgatattattaacatgcccatcattgtggcagacaacggcaccgctgcggagctcaatcaggcgtcggtgaagaactcgcccctggtcgtgttcaatgccaccgactgggagatggagctggatcaggcagccaccaagtctgccagcacgacctcgaaacaagctctggacgatgtgatcatcgaggaggacgaagatgccgaggaggaggcaagggagagtagtgagcagccatctaccatggacctgaacaatagcagtgagtctctgtagctaatgtgcatgtaatggagttcaactggctccttgaactgcagtcgacttccgtaatcctaactcttgcactactttccagtaattgagctgcacccggaggatgacagtgccatcgagtacgtcgacatggacctggagcagcccgtcgagattgagagcaccagcaacatatcgccagagacggccaccaccacgctaaaggcagccatcgtctccacatccccccagcagcagcagcagcagccgcagaagaagcatcccccactggagcatccactgagcgcaggagcggctgcaggaacaggaagcagcacgggagcagctgtccaatcagcaattaagttaccctaaacgctccccatttcgagatattcgagtgagagaacgcacacacacacagcagacccggtttgaattagatttagttggtagtttagcttgaatgtcgaaggttttcccactaatttccaattatcgcaacccgcagccttggagcaaagtgcaagattatcgtaagcagctctaaatgcctgttggtttaatcgctcgcaatagttaagttgccaaatcacacaaccaccactgttataaacatagtatcgtttagtgaaaagtataccctggaattcgtgttagttttagtttagttaagcgcccatttcatccgcctgcaatcctgggagcccggagtcgatcacctccctcctgtaaatagggcagctgcctctgcggactaccttaatttgtatagcttgtaaatagattccacacttcgcccagaaacccataccccactcccccccccacacaccaccctttgcctagcataatttcatcctaatttagttgcctagactagcgcagaaataagcgaattgtacacaaacaaacgaattcgagcagcacgcagagagcgaggaaattgtttaaatgttcaacttgaaagattcttaattgtatgagattatagaccctagttgacccaatccgaacccgaacatgtaaatatctgatgaatttcgaaatgcaaggcccaactatcgcagccacatataaatatacacttgtatagatacctagttcggctaaggaccacacatgtttaatcttgatcggaaggagacccatgccacacacacacacacacacacacacacacacacacccacacacacagatgattaaccattaacgatttatagatgttaagtattttatgcgtcggttttgtaaatccaaatcttaagaggaatgttgtaactttcgaccaaggtccaaaaaagaaacacacagaaaaggaagaagcatccaaacagagaattcccctctacgaaaagtgaaaagtgtaata

SEQ ID NO: 38264 - DNA, 3072 bp, DROSOPHILA
atgtggccgcaaacgctggaaatgtcgcgggacgagtgccgaggcatgctgcgtcgactggaactcgagtcctattcacatgtggtgagcgtttttcgcgcccaaggagccctcagtgaaacgaaggcgaaactgctggaggagctgcgccagcagttccacattaaccaggaacgccacagggcggaagtgcggagggcggccaacgacgagcagctctgcaccatagcggaaaacgtttgtgggcccaacacctggcaggaatggtcacgcgagggacgacgcctctatcctcttcttcccaggattagtccacaaactgcgctgagcatcgttgccaatgacctggcggccaaagcctgcgaggaaaacgccaaattggctgctccggccgaaacggcggtccactttggagaagccctcgtggagcaggcctcgctgatgagcctgaaatatccgcgtggtgccaggatccaggacaccgccatggtgatcatggcggagccgttcaaagttcccgatctacccaatgaggtgaagaaaatgacacagaagcgcaaggagaacgatagcggaatcgacggcaagccgaacaagaagcggcatatgcagcaaccacatccgcagcagccgcatctgcaggcttcgcagcagcagcagcagtcacagcagctgaatccgaactcctcgaatcccggcatggaggaggcagatcccgtgccgccagagaaacggatgactgctcggacgctacagcagcgctacttctaccagcagcagatgaagcacaagcagcgactggccagcaaacggaatcttgccaacagactgggctcaccctccgcgcaatcgggcaatcccttgggcggcaggaatatgcccagctccggtggagacacttcgacagctaagcgaagtgccgcacctgccaagagcggcagacgagcgcagaagcaactgcagcagcaacagaagttgcagcaacaccagcaacagaaagtattaatgcagtcgcaggagacggtgcccaatcacatggtggtacagccgcacgtggagtatgtgttggatgaggcgctcaaaacgctggcggcatccaatcctcccacgcccacgtccacagtcgctcctccatacacaatcctaaacgagccgaggccactggtcacgctgaagcctctgaagaccattaagccgatgatctatgggccgcaaagtggtatgccctctgccgaaattggatcccccacaacgccaggctctcgcggatttgccaactctcccatagtgtttaaggagaagctgcaggcgtcacccgtgcaggtggccacacagggtcaaggttcgcccaccaagaagtttgtggctgaggaacgacatgcggatgcgatgccctccgcggccactacgcccactcccatttccaccgcgaatcttccattggcgccgcagataatcagtgttcagaagatcccagctccgtcgatgggcggcaagctgagagcagccgtggcttcgcccaccagttccacaaactccacgctcctgccaccgggcgccaagacaacgcccaagaagttcaacatccttgagggcgatgccaagcccaagaccttgcccagttcggcggttcgcctgctgccgtacacggaacccataggcggtcctttgtcgccgctcaaggattccagggtcactcccttaagcagcgcctccaccgtcaacattatcaagaatataccagctagtagtttaaacaacacattgatcacaccgcttccctcagccggcaccaccatgccggcgaatctcttcagagcgaaggtaacgccgtcaatcaaaggagccagcggtgctgcaggcggcgcaaccgttattggtgccgccggagcaacaggaatcggtggagcaggggctgggcctcagatactagggaatatcaagctaaccagcagttcgggcggagcagccactattaaacaggtgcccagcagtgcgctgcggaacataaagatttgctcacccaacgggaagctattcctacagccgggtaaactgccagccggaagcattattcacaagttcaataacgcaagcagcactgcggtgtctgcggcgggaggagttgtgaccaccaccaccaccactgtatcgcccacaaagcagccggcgagggagcagaggatcagcatacagaagatactccagccggcgacaggaagcgccagtagcggaagcagcagtcccaccaccaccacgacgaccatatccggcttgacttccagtgccaagcagccaggtttgggcaacaagccgaccacgctgaccttcgccactgcgggcggtggtaagaacaatctggtctttctgccagcgagtgcggcgagtggcatgcgggcactcaccctggccacaaagcccaagtccaatgtgctggtcataggggcgagcacctctccagctagtgccgcgtcatctcccaatccctcaggcggcaccaagcccaaagccaaccaactcattacggaggacacgcccatcgatattattaacatgcccatcattgtggcagacaacggcaccgctgcggagctcaatcaggcgtcggtgaagaactcgcccctggtcgtgttcaatgccaccgactgggagatggagctggatcaggcagccaccaagtctgccagcacgacctcgaaacaagctctggacgatgtgatcatcgaggaggacgaagatgccgaggaggaggcaagggagagtagtgagcagccatctaccatggacctgaacaatagcataattgagctgcacccggaggatgacagtgccatcgagtacgtcgacatggacctggagcagcccgtcgagattgagagcaccagcaacatatcgccagagacggccaccaccacgctaaaggcagccatcgtctccacatccccccagcagcagcagcagcagccgcagaagaagcatcccccactggagcatccactgagcgcaggagcggctgcaggaacaggaagcagcacgggagcagctgtccaatcagcaattaagttaccctaa

SEQ ID NO: 38265 - protein, 1023 aa, DROSOPHILA
MWPQTLEMSRDECRGMLRRLELESYSHVVSVFRAQGALSETKAKLLEELRQQFHINQERHRAEVRRAANDEQLCTIAENVCGPNTWQEWSREGRRLYPLLPRISPQTALSIVANDLAAKACEENAKLAAPAETAVHFGEALVEQASLMSLKYPRGARIQDTAMVIMAEPFKVPDLPNEVKKMTQKRKENDSGIDGKPNKKRHMQQPHPQQPHLQASQQQQQSQQLNPNSSNPGMEEADPVPPEKRMTARTLQQRYFYQQQMKHKQRLASKRNLANRLGSPSAQSGNPLGGRNMPSSGGDTSTAKRSAAPAKSGRRAQKQLQQQQKLQQHQQQKVLMQSQETVPNHMVVQPHVEYVLDEALKTLAASNPPTPTSTVAPPYTILNEPRPLVTLKPLKTIKPMIYGPQSGMPSAEIGSPTTPGSRGFANSPIVFKEKLQASPVQVATQGQGSPTKKFVAEERHADAMPSAATTPTPISTANLPLAPQIISVQKIPAPSMGGKLRAAVASPTSSTNSTLLPPGAKTTPKKFNILEGDAKPKTLPSSAVRLLPYTEPIGGPLSPLKDSRVTPLSSASTVNIIKNIPASSLNNTLITPLPSAGTTMPANLFRAKVTPSIKGASGAAGGATVIGAAGATGIGGAGAGPQILGNIKLTSSSGGAATIKQVPSSALRNIKICSPNGKLFLQPGKLPAGSIIHKFNNASSTAVSAAGGVVTTTTTTVSPTKQPAREQRISIQKILQPATGSASSGSSSPTTTTTTISGLTSSAKQPGLGNKPTTLTFATAGGGKNNLVFLPASAASGMRALTLATKPKSNVLVIGASTSPASAASSPNPSGGTKPKANQLITEDTPIDIINMPIIVADNGTAAELNQASVKNSPLVVFNATDWEMELDQAATKSASTTSKQALDDVIIEEDEDAEEEARESSEQPSTMDLNNSIIELHPEDDSAIEYVDMDLEQPVEIESTSNISPETATTTLKAAIVSTSPQQQQQQPQKKHPPLEHPLSAGAAAGTGSSTGAAVQSAIKLP

SEQ ID NO: 38266 - DNA, 2285 bp, DROSOPHILA
catcagtcgggtattgatgatagtggccgtgagtactcatgatatagaaactcaatgggttttccattaacacgagtacattacagatcaacttactcgtgaccacgctgataatgactttctgtgtgttccatatgggggcaaggaagttcctactgaagcactggtacatagggttagtcggaatgggtattatattgatattttcctttatgatttgctgctgctccttcctgttccggagctcgccatgcaagtacatattactggtaatatatgtgttggcccattccactgtggtttgcagtgcagcggttcgatatcaaccgaaactggtaggagaatattgatatttggggagtagaaactttatgataccaacgccatttataggtttttatagccgtggccagctgtgctgccattgtggtgatgctgtgtctgttcgccagatttgctccttgtgatttcaccggatgctggatcttcgttttcgtgttatctctagtagttttgatcatgggaatagtggccattttcttcccaaccatacgtatagtgtacgcctcgctgggagtgctcctattctgtgtgtatatagtgattgatgtccaaatgataattggcggcggaacccacaaaaacgagttcgacgaatcggattatgtattggctgccatgtcactatacagcgacattgtattcctcttcctgtatttactagacctaattggtttgatagatgattaaaaataaatgtgtttatatagagcttaaaaacatttttattttaaattcggctaccgagcatttgctgtcacacagaaatatgaaagcatatagtatacaggattataatatttcggagagtgttctgattacattcccaatttcgacgtggatcagtagaaacctaaaatcaattctctaaaacataatgacttgcgaagtgcagaatttcatagatggcatgtcgcagactttttgtaagcacaaagagatgcgcaaatgccaaatgctcgagatcctggacaaagtgcgctcctgcgattgctgccacaaaagaaggctaaacaactgccggatggttaagtctggaggccggaagcccgcatcccagggctggacactctacctcatcgccgcctgcttcgcattactcctgctcatgatcatctatatgatccatgtggccagaagatataaccatgttcgagcctacggcagcagcgcctgcggatccactttgttctacagctacagcgactgcgatgtgttctactagggaatactaaccaagctcacttatattttgactcaattgttcaataaagctatccaatatccatatccattggataaattaataggtttgtaaagtaaggccatcatgctaactccaaattgacgccgaatcaatacacactttttccactgctcacttcatttttgtatttatttttccatggtccgagttacacattctggcattcaggcgatgatgggtcctgcgaaagttgggtggcccagggcaggggcgtgtctggcattattgggaacattcgtgctcaacttttcacccgctttatgattggacgctgccgtaaattatgcataaagcattagcgccagaaagagaccgagcgacgggagtaagaaggagggcgagtgctggctttcggggtgagtccatcatcgaacgtgccattcagttttattgggttatcgagtgggacaggaccttccagccccaccttcccccttccacggaagtgcccgcttgttggcctagctcaatattgacacacgttaattgaagcccgccggctgccaaaagtatcaatggccatcccttagccgtgggtcagcgccgaactgaacaaccattgcctgctcacattgtgttgccagcgaggggggaggggaggaggagaggtgtagaagtgggtttccaggtgggtgaaactctggggtggaccttggtggtaagctcatgtttgaaaccatgtaagggttcaagtttactgtatacccgtgcccagtgccccaaaaaatatgtcgttaatttaacttttagctttaaggaaagttcacccttagctggacttttggggaggtggctgcccaactgattgtgtcccacatgttggccgattacgtcacctgctgcgcggtcatttcttcgtaggctgtaataaacaccgattgccaaggcaattttaaacgatccgtaattgactcacacacccggttttccgaactttacttttgttcagtaaacgttg

SEQ ID NO: 38267 - DNA, 285 bp, DROSOPHILA
atgcgcaaatgccaaatgctcgagatcctggacaaagtgcgctcctgcgattgctgccacaaaagaaggctaaacaactgccggatggttaagtctggaggccggaagcccgcatcccagggctggacactctacctcatcgccgcctgcttcgcattactcctgctcatgatcatctatatgatccatgtggccagaagatataaccatgttcgagcctacggcagcagcgcctgcggatccactttgttctacagctacagcgactgcgatgtgttctactag

SEQ ID NO: 38268 - protein, 94 aa, DROSOPHILA
MRKCQMLEILDKVRSCDCCHKRRLNNCRMVKSGGRKPASQGWTLYLIAACFALLLLMIIYMIHVARRYNHVRAYGSSACGSTLFYSYSDCDVFY

SEQ ID NO: 38269 - DNA, 3642 bp, DROSOPHILA
ggcacacgcacacgtgaaaacaaacacacacacacacacccgcgcgcagagggactttggctttgaacttcttctttcttcttctttcagctttcttttgctttgccctttttgcttttgtgccttttatctaatctcggtttctgcgtgtagataatacccaatagcgagtagccgcgccacttgactttaattattaactatttgtatttctcgcgttcatctgcctctttctcgcaaacgccgcacgctgcgaacgcaaaacataggcaaaaaacacatacacacacacacggaggcacgcgtacgcacacagacacggcgaacggggagcgaaacacgtccgacgctgcgaaattttggaggcgctttgccgcttggagccccaaatgccccaaacaaactagaggtggctgcaaatcgatatcgatagaatcgaattatgtgttcagtgtgaccagaggggtgacagttcaagaacgagttggcatccccagtcgtatttgaaatgctaatgtgaccagagtgccaaaatacggtcaggctaatagtgagatgtcagtaaatgtaaaatgcatgatgtagaattacatgtagatgaaaagtctcttatctctagtacagtgtttggccgtaagaggcgccttacgaaactttcaaaacaacaaatgaaacagtttttaattgatatatttcaattatataatctaatttaatttatattttaattgatatgatgtagttccattggtcagaatataaaatatatttatatatattgtttttatttaattattctacactattatatatactatactatatttattttattcatgcatgtgctgctctagtcagcctgtactacatttcattaatcttccgcttcgaattcacatacctacataatatgtatatattacatatgcatttcgatcagttccgtataaaaaggtataaataagttcggaaatcatgtgccgaatgagtttatcgcaacatgtttgggctgcgaaacagtttattgtgcccggccgtggcattctgcatccttctcggagtgtccaactccatcagcgagtccgtttgcgtcctgagcgatgcgcctaatcaatgtggtgccttctgcatggcagcattgcatccgctgtatgatcagtgcgccaaatcctgggaacaggagagaagcctgttgcagatgatggcggattcgtgggccgagcagaaggagcacttgaatcattatcaggatgcttggaagctgttgaatgtccttgcggcgaatctaaatgccaccgcgagcagacttgaatccatcttggtgagcaaggctgaggaagaccccttcaattcactgctgtctagccctggcctccgctctattaaatgcagctcctattcactggaatcctatgcatccatccaaacttaagatgagttcgatgaatggccatgaatctggccattttccaccttttcgcttggtgtaaatcgaaatatgatggtggcaaaattgtttataaaaagctcaaacccacagattgcaactgagttggtctttttttaattgcgagactcctaatcactcaatttgccagtgggacatgttttaataaaaaaaaaaacaaaaatatattttacatatttgtttatctaatcataaagatgtgccaaatgctgtatgcagagagtaagaacggttttcgtgtcaaaacacactcttattgaattgaattgattagcacagaattaaccaaatgcatgcaatttaaatcaatattcaaattatgtagatcacctcgtactaattttgagggcactacttaagcgtgtcggtaaaagcattcgctgctcattgtttgtggatacagaatatacggaatatgcagaagctcagtatttggctgttacttgctctttttgcctggaatgcgcacgcgccttcagctgcaatgccgtcagtgtgcctgctgcaggatgcgccgcaacaatgtggcgagttctgcttaacagcactgagccccatgctggatcacattgccaggcacgagggcgagtggacttcgagtgttctgcaagcgaacgcaacggaggcgagactggccaggatcgagactctgcagacggcgatgaacatcaggcagaaggtcctgcaagagggcttccctaaggacatcgtggcgaggctggatagactggaaagccagcaggcggcgctcttgcggatactctccaagttcgataggaaaatagttgcgcccaagttcgagctaatcggctcgaggttcttctacatagaggacgaaacgcgtaggaactggacctcggctggcagcgcctgtcgccaaatgggcacccaactggccaccattcgcagtgcggaggagctggctgcgctcagggccaagctgaacaaggagcgacactactggctggacatcaccgatctggagaaggagggcgacttcagaatctccgcgtccggcaagaggcccaacttcctcaagtggagagcgggccagcccaataacttcagtggcaatcagcactgcgttgatcttttagacgggcttatgtacgacaacaaatgcgaaagtctgagctacttcatatgccagtccgacgatgatagtttggactaagagtggccgctaaatacttagttcgttagttacatatactaagtccaatcagttcgtttaacaccgaaagccaagtccaagtacctgctcatttttgcacaaatcattatattgtatttgttacaaacgacgcaatctgggatcttaactcttgctcgattcaatagggtttcgtttcagcttctggttgaggctccctgaactcacagctgataaacgttaacgagtgccggagtctgggacaactttgcttgcgtattttgttttacaacatgtttgtgtttgcccctgatatccaaaatccaacatccatccagatagaagcgtgctaaatataaaagtatctgataatcgctctatctctgacatctcctctccgcccaaccgagcagataaagtcgtacagcagaaagtcgcagaaggacaatggggttacttgagtattcaaccgatcgacaagagcttctgttgcccgaattagatatatttgtagtttgctgcttagtggcgagacagattaaatattttactttgcactcacatgacacacgagatggagtcccactatcttatctgacagccaacaaaacaaagttatgaactccgttcaggaagcgccgctagtcagttgagcccctcatataaaggcttaaatgtttatgtgggaggttgggccgggtcagtggggcgtaaatattccgagacacggcgaaaaatctgctgagaattggccggttgtcagggcactcatatctggtaatttggcgccccgaacacgtgctttgatcccaattaatcattcgatatgaatatgtaatttccctatctctaatgagtttttccctccatgtgcaggcgctatcgaggaatatgctcgattttggtcagttcagtacggtcttcgcttcggtttgcaacgctttgtataaatttatagaaatcttcgctaagggaaatgcatgaaacttttgcgatactggcacaattttcccgttcaaaa

SEQ ID NO: 38270 - DNA, 1092 bp, DROSOPHILA
atgtttgggctgcgaaacagtttattgtgcccggccgtggcattctgcatccttctcggagtgtccaactccatcagcgagtccgtttgcgtcctgagcgatgcgcctaatcaatgtggtgccttctgcatggcagcattgcatccgctgtatgatcagtgcgccaaatcctgggaacaggagagaagcctgttgcagatgatggcggattcgtgggccgagcagaaggagcacttgaatcattatcaggatgcttggaagctgttgaatgtccttgcggcgaatctaaatgccaccgcgagcagacttgaatccatcttgaatatacggaatatgcagaagctcagtatttggctgttacttgctctttttgcctggaatgcgcacgcgccttcagctgcaatgccgtcagtgtgcctgctgcaggatgcgccgcaacaatgtggcgagttctgcttaacagcactgagccccatgctggatcacattgccaggcacgagggcgagtggacttcgagtgttctgcaagcgaacgcaacggaggcgagactggccaggatcgagactctgcagacggcgatgaacatcaggcagaaggtcctgcaagagggcttccctaaggacatcgtggcgaggctggatagactggaaagccagcaggcggcgctcttgcggatactctccaagttcgataggaaaatagttgcgcccaagttcgagctaatcggctcgaggttcttctacatagaggacgaaacgcgtaggaactggacctcggctggcagcgcctgtcgccaaatgggcacccaactggccaccattcgcagtgcggaggagctggctgcgctcagggccaagctgaacaaggagcgacactactggctggacatcaccgatctggagaaggagggcgacttcagaatctccgcgtccggcaagaggcccaacttcctcaagtggagagcgggccagcccaataacttcagtggcaatcagcactgcgttgatcttttagacgggcttatgtacgacaacaaatgcgaaagtctgagctacttcatatgccagtccgacgatgatagtttggactaa

SEQ ID NO: 38271 - protein, 363 aa, DROSOPHILA
MFGLRNSLLCPAVAFCILLGVSNSISESVCVLSDAPNQCGAFCMAALHPLYDQCAKSWEQERSLLQMMADSWAEQKEHLNHYQDAWKLLNVLAANLNATASRLESILNIRNMQKLSIWLLLALFAWNAHAPSAAMPSVCLLQDAPQQCGEFCLTALSPMLDHIARHEGEWTSSVLQANATEARLARIETLQTAMNIRQKVLQEGFPKDIVARLDRLESQQAALLRILSKFDRKIVAPKFELIGSRFFYIEDETRRNWTSAGSACRQMGTQLATIRSAEELAALRAKLNKERHYWLDITDLEKEGDFRISASGKRPNFLKWRAGQPNNFSGNQHCVDLLDGLMYDNKCESLSYFICQSDDDSLD

SEQ ID NO: 38272 - DNA, 5663 bp, DROSOPHILA
cttggcctacccagtgatctttcgccagcctccagatcccggaccacctcgatccccgggctgccagtcactctggcggagatcgcgacattgtcgcacgtcagccgtcgctcaggtttcgttggcttttatctccattcaagaaatccggagacattatctctcggcgatcttgtcgcatcaacaaaacaccaacaagaagagctcgggatcggtcaccaacacagcgagcgacgctccaatttaagttagaatcaccatcaccatcatcattatgatcatcagtgtgctctgagatccgggggatatgggatctggagatctgtagatctgtatatcagtctatctgtagatctgcgtatctgtatatctgtgtatctgtgtatctggggatatagctgagaggttgataagacgttttcattttcctgcagctcagtcacaaagcgaacggcgactggaaaagttcgagcggcaagccaggaaggaaaaatcgtgagcgaatagggaaagtgtggaaagtgagcaattgaaaggaaaatcccaaagaggaaaccttgaaaagtgcggggaaacggaaaagctaattgaaaacaacaaagatcaagtatcagaagttgtgaaaaaccaaaacctaagcaaacagtgctctgtgatttagtgtgtaatatatgatatatgtatatatatgcatatttatacatacagcgacaacaactaactggctcggtctgcctggatgatcacaaatttcaattgaatttaatcaaaatcacaagaaaaagccagcgagagaaatcgtaaaaggcaaataaactacggatttaatttcgagtgcctgccatgtgttagtctgtgtgcgtatctgtgtgtgaccgagaaacttagatcggtggcagtttttcccgccccgctggccgctttttattgaaacgaacttcaacacagtccacgcacagtctatgcaaatagccgagtgttagttgggaatatggggaaaatggtcagcgaggaaatggccacggatccggtggtctcggaaaaggtggagctatcgcgattcggagagttctgccagcggcgcggcatcaatcccaacttgataatgctgaagataacccttttcgtgatgtatggcggtgagtaatgtgcacaatgtatcattaaaaatcaattagaaaacgttcttatcaccgtttttcatccaactggcaaagaatcaaaaaaaaaaaaagtcacgacggacgtgcggagttggtcagttacccatggccatttcctagccttttacagatatcacgcatacgacacgttgacttcgggggttttgttgagctgttaaagaactaagctgactcagaagtaaagtaacttattctagccattggcttgtttttagaaaaatgtgttatacgcagtaatagttactaatgaaaaattgttttcttctgtataagttcttcataaacactcgctttttatagaatagtatagtatatcgattgagtcttctatttaaatatcaccagtttcaagacagaggtttttccctgaaatatttatagatattcccaaaaaaaagaacggcaacagtcagtacagtacagtttcgcttttccatatcgctggaaaataaacacaaacgcagcagctggaaaaacgccgagcaaagtccgggcaaccgacttgtttctctggcagtgaatctgaattcattatcacactccacgaagccccttctccgaaatgtggtgaagcgggggggagcaggtcggaagttatcaattaggctggggaaatatgtaacacatttgtataaattcagttagagtccgatgcacattgagcagattttcccagcgtgtggcaattaggcattcataatgtgtgtgcgcctctgtgtgtgtgtatgtgtgtgtgggtgcgtcttttgtaaataaatctagcttatgagatttaagcttgagaaaggtttactttgattcgccttggacgagtgtgtttgtatctttgaatgttcatatacgagagtgccttcgttttctgaccgtgcgccattttctgaatgctttttctggcggtcaatggcaaaaagattctactgcctacccgccccttcctttgtctttcgcacattaagcacggattgtcactaaaatgagtattaatgcgttttttatttggctaaagtcgggcggcagattctttttttggcatttcttgaactgtcgtcccgctttttgggcagtgcaaagttcacaaaacaatttaattggcttagataaaatgtaatttaatacatttcattggctagacaaaggagttgcccggcatatttattactatttttgtggcttcagcttttatatttcagtgccattttgttcgttttaaaatttaattccgattggagaattataattcaaggcacagcaaatacaaagcttagaaatgactacaatgaatatttgagattaatattggtccgatgaaaaaagttgtatggctttttcagaaaaataagtgtaccttcagcgtgatggtcacagaaaaaagagatttattattgaatatgaatgcatacacattaaactgtaattagttggtgaaatgtgccttttgtttgcacaagaacccattgctgatttaattaacttcatttcattatttgttcaatattgatgtcgattcaatcggtatgaattgcggcctttgttcttttgatcttttcaactcatttccgcacgcacatttcattgcgcacaaactttataagtataatttgttaacaaatgtgtgggctctgaaaataaggtcttacaaatgtaaggcttaattacgcgaattggattgcaagtttttcgtgagcttgctttcgtatcaatcaactttaatttccgaaacgaaattatcaagtgcaacggttgacccaaatgtaaattcacttttcaccggtcgattggatccaaaaataaaagcaagcgcaaaaatgaatcgcaattaataattctggcagcacatctcgcatttgtctcctccagctgctccctcaaaaattcgcaaataaagtgcaatatagttgcaaattgcatagatggctcgaacgtgttgccaaaactttgtgccagcgaaaaacggaataataattattaaagtgcgtcgggtggaggggaagcatttaaatgggcaaagggacattaattacgaatgacagtgtggcaggaacagatcccgaccgaacggaactgagcgaaccaactttgcacggacggatgcacaaacaaaattttttttttgaattaatgaattatagctaaggaaatgttattatattatttagaacttcggctgggtatcatgtataaccgggataacctaaaactgcataatttaatgtacacttagtacagcttttttggctttcctcagttttgcacattcttttctctctctgtgttgaaaaactcgaatgaacatgaatggcggccgccgagcaaacaaccctgacatgcatgcgtttccgtttccggcgagcgaaagggaagaatcggcaggggcaatacgagcaattaattgttattgcatcgggcaaacagaagcagccacacgcacacacacactcggcgtattattgttaattatctgaggcgatgcaggaggagctgtaaagcgaattcaagccgccgttctcgaaggccgcgtgttaagtgcactccttcaacaaacgaatttcatttcatttcattcaggacacgcacttttcccacgcgcacacacacacacacacacacacgcacagatacttacgtgcccggcatccttggcgtgtttgcattcaaattggtcaaggctatggaatgaagtggtggccgggccaaattgggaatttgactgctggcccgtttcgcccaatttgccgccattatttccctcggttgcgcctcctttttgactgcagccacgtgacgcgttaatgttcataaattattgaaatgctggggattatctgcggcccgttttcgatttcagttccgccgtgtctcttctggcccattttgaaggccatgaataatgcgatttatgtgccatagttgacttaagaaattacacattacagaattacaagattttttcatagtttgaaataccatacatatcatataccatacacaccaaattcgttgctttaaataatataccttgctaatttaatgaatctctttgtgtcatttaattactcgttctatgcaataagtaatgagaatgacattgttattaaattgaagggggcaatgagctttttttctacccatcatcgaattatgcattttgtggccattctaatttcccttccccacttgaccacattttgccagtaccttcggttggaaactccatcactgcgtcttagcaatttcccctcttttccatttcctgtcggtgattaagttctgttcgtcagcggcaataattcgcataataatataataatccgcacttttttgtccttacagcgacctcatccctgctgccttacctaacgattcacatgcagtcgattggactcacggtggaggagattgccatcatctacctggccctgcccttcaccaccttccttagcccgcccataacaggtgagtggatcgggatcggcggttaattgtcttaatgcactttcattagcctgctgcgtgggttttaattaaaagtttgctttgtttgattgcccgggcatgaaaacgagagcaagaaccaaggtgaagccaagcgagattagccgaggagtgcagtgcattcgctttatgttcgttattaaagtcagcactttaaaggaaacactaaacctgctaaaccgagcatttgcccaagaaaattgtgaaaatcaatcgattgggcctatgtgatttattttcaaatatccgcgatgcgcaaacatatacatatgcatatatttatattatttattcaaccgcacagcggacatttgattggttttatccaccctcggagcagaattttttccacgcccaacattttttaggccacttttccgtacgagtgcgaataatttaattcacttgcagtttaaatgacaattaaacagagttctgttgctctcctctgaatgtctgtatgtgaagtgcccccatcgtgtggttggttggttggttgcactctgctccttttgtgcagcgcgattcgtgcgttcttattatttgctttcgcattttaaaaaatgcatttgcggtatgaaatgttggcgacagcaaaggttttaaacattttatgtggacactcgctgcagacaaatgttgtggcacagaaagtgggggtgtgtggcaagtgcataaagctgctcgaattgccgcgcataaaaactgcgaaaaaatataaaatgtgcgctaagtgaaaacgctctcgtaaagttgcgacatcaaaatttcgatcatccaacttgcattataatcgcgcttgatagtcgcatttaatggcattggaggccataaaagtgaaacgagttcgagatgaacgagcgaataaaatgggcagcaaggagtttggaaagtttggaaatgaaacataaaatttgaagtacttatagtagtaataatcattgaaagtttttaagctctagcaggagattttaatatatgtgtttc

SEQ ID NO: 38273 - DNA, 288 bp, DROSOPHILA
atggtcagcgaggaaatggccacggatccggtggtctcggaaaaggtggagctatcgcgattcggagagttctgccagcggcgcggcatcaatcccaacttgataatgctgaagataacccttttcgtgatgtatggcgcgacctcatccctgctgccttacctaacgattcacatgcagtcgattggactcacggtggaggagattgccatcatctacctggccctgcccttcaccaccttccttagcccgcccataacaggtgagtggatcgggatcggcggttaa

SEQ ID NO: 38274 - protein, 95 aa, DROSOPHILA
MVSEEMATDPVVSEKVELSRFGEFCQRRGINPNLIMLKITLFVMYGATSSLLPYLTIHMQSIGLTVEEIAIIYLALPFTTFLSPPITGEWIGIGG

SEQ ID NO: 38275 - DNA, 2426 bp, DROSOPHILA
ggtggaactttttccaattctccgaaaaaaactttactgaaaggcgtttttattccgcattattaaaagtgggcggcagcctgtcactagatggggaaaaatagacagggggaaatgaaaatatttccaatggagatggaaaagagagtgctttcgctcgggataatatgcaaggtaaacagtttactttgagcaaggaagagattgtgatgatgactaccttaatggattaaaaatttcatttcatataacaaatacatttaatagtgaaaattgaatgtatttttagcgacagagtagctaataccaagaaattatttactttagtgcaatgataacatggaatattttgattcttcaatcgcatttcgcgaaacaatccatcaaacgtgatgtgatgattagaacaagtgtcatccattagctccaaaaagaccagtgattcccatactcccagaagtgcgaaactagaaccatctcatatttatgagttatacctacaacagaagttggctaaactctcccctgcaccatttcacccaaacaaatgtcaggagagtccgaaactttggcaatgtcctggcacgaaatcacaatgtgggaattcacgaatgggggcactacagcagcagacaaaagtgcataactaactaaacatgatggcattacactcgggccccactcttgacacttggcacaattggaaattggtcatgcatggccggcgcaggatatcacagcccaggaaacaccaggaaacaactggcagtcagagccagaatccttctcttctctcttttctcgggggcgcagtgctgagccggaaaaagtgcaaaagcaattttactgcctgtctgattatgtgaaaaactcagtctaacacagcgggggaaatgtgagaagcaaagtcttacaattataacactgatacaaaaatacaaatggacttggttagctctcgataaagaacaaagaactgacttaaaaatcaataacaattatgaatttaccttaccccacagtgacaaacagcagccagaagaagttgctttggagcagttgggtgcactcggacaacgacgatgccacctacttcatgctgcaaatgcatcccgatctcgccgatcccaccgagcaactgggcatggaaatcgaacaggacgccaacgagaccgtcaccgacatcctgcagagattcggtcatgactacttggtcaggggtaacataaacctcaccgacatggacgatctggatttgagatgcggcggcttggttcgccgcacgaatatgaccaatattgcatctggagccgttgagtgcatgatgcagcgttgcacattcacgttgaatgcgccggaaatctgtccgccggactacaaggagaccgatgagatcatattctgggtgtacttcttgctcaggtgagtttagaaatcggctaggtagattttattctcactgtcatcaattcggtctgattatattccagatttttggccaccacgatgttgtccgctggagtaaccatcatggatccaattgccctgacaatgattgagaagtacggcggagactttggacgcgagcgtctgttctccagcatcggaatggccatattctctccgattacgggcatcatgattgattattcctcgaggggcctgggatacacggactactcggcagccttctatacgtacgatgttctgctggtgatatccacgatgtcggtacttatgatgcctcttggcgagaaactgccagccgacaatgtgttccgagatctgtggaatctcctcaagatgccccacgtgattgcattcatttgcttcctgttcgtgctcggtaacttctggggcttcatcgagagcttcctgttcctgtacctcaaggaactgggtgctccgaactacctgctgggtgagtttaatatcgaagttaatattccgcacattaaagcggcattttaccgcctgtatgacctggtttaactcccatttacgaccgatttcattgtccaggcatcaccatcaccgtgggcaccgtgagcagtattcccttcctgtatggagcggagaaaatcacacggatctttgggcacgttaatttgattatcatcgcgttcttctcgcacgcgggtcgcctggtgggctactccttcatcgagtgagtgcgaatcccattcggcattcggcctaatgcaattccaaattgaatttcccttttccaccttctccattcgataaaggactgcctggtggtgttttccgttcgaggccatggagtcgttatcctgtcatctcatgtgggtggctgcggcgacctactgctcgatcctggccccgaaaagtttgctggccaccctgattggtgtcctcggcatggcacatttcagtttgggtaagtagcatcgccggcttcacga

SEQ ID NO: 38276 - DNA, 426 bp, DROSOPHILA
atgaatttaccttaccccacagtgacaaacagcagccagaagaagttgctttggagcagttgggtgcactcggacaacgacgatgccacctacttcatgctgcaaatgcatcccgatctcgccgatcccaccgagcaactgggcatggaaatcgaacaggacgccaacgagaccgtcaccgacatcctgcagagattcggtcatgactacttggtcaggggtaacataaacctcaccgacatggacgatctggatttgagatgcggcggcttggttcgccgcacgaatatgaccaatattgcatctggagccgttgagtgcatgatgcagcgttgcacattcacgttgaatgcgccggaaatctgtccgccggactacaaggagaccgatgagatcatattctgggtgtacttcttgctcaggtga

SEQ ID NO: 38277 - protein, 141 aa, DROSOPHILA
MNLPYPTVTNSSQKKLLWSSWVHSDNDDATYFMLQMHPDLADPTEQLGMEIEQDANETVTDILQRFGHDYLVRGNINLTDMDDLDLRCGGLVRRTNMTNIASGAVECMMQRCTFTLNAPEICPPDYKETDEIIFWVYFLLR

SEQ ID NO: 38278 - DNA, 2326 bp, DROSOPHILA
tcaatctgattgtacggaattccactttgaccattcacaatggcagccgaatcagctgtttagcaaagacacctaccactaagtagatacaaccacaacaccgataaagcacacacgctttggcttagttaaattaacattattaattgtgtttttataatttttaagtagttttgatgttttataaagttaaattgtgtatatataccaatagtaaaaaaaaattaaattaaaaaattttcactcaggttccaccgagatttgaactcggatcgcaggattcagagtcctgagtgctaaccattacaccatggaaccgtttgatgagcgtacgacaaaacccataaaatttcaacaatacatgaaaatgctgatttagtggtttctattaagtttaattttaacaaatggaagcatttctatttaaatatttctacttaaacaaaaatcgacgtttttttgttcaaacaccaacaaaattgaaatttccccaaatcgttagaatggtagatggaagcgctagccaatcgatattaaaatcaataatgataggttaaaaaataaaaaacagtatgaatttatgtattgaacaaaataaaaataaataacaaaaaagttctttgcttatcaggttccaccgagatttgaactcggatcgcaggattcagagtcctgagtgctaaccattacaccatggaaccgcttgtcaatgagtcgtccgcagcacctgagaattcccgctagcccttgatgctgttggtttttatgaaggtaaaaggttttaatcgcagtttgaaccgatggcttcctcgtaaatgcatggtaatttgctcttcaacgttttatttgcttaatttttgtaactttatttttttttttgcatttttcaagcacttatgactaatttgatttgccagcacgcgcatatccgtaatccgtattcagatgcataatcacgagtcgtttgtcgctttgcattgcaatgcatggtccggggcacttagccgtagtaggagtagggcgaatcgtagtatcctccggagtaggcgtatgggctagctccgtagtagtactggggggcgggctcggggctggcaatcgggattggggcgggattggcacgggcaactggagcgggaacagccagagcagcggcgaagagggcagcgaaaacgacaaccagctgggaaaggaaaaaagatagtacagcaatgagttttactcatatttatatggtaatcaaatcaaattcagtttgctcaacttatcctacgaacaaggatattgctcgtatttcctcaactcaaaactcaccagcttgaacatgttgtttgctttgattttccttgaggacttgaggtgcttgtgtagcgattgcagtgatttgtgatttgatgctgttcgccacctgccagcactcttatatagtcctatagtcagccaaaattcgcactcatgacttatttatgatgtcgcacttatggagtctgatccgaattatggccatttctgttttgctcacatcattctgaatgccataggtttattttctatttttactgcgatagtttttgtcaagccaaaacaaaaatttccttcgcattctaattacttcttattctccgccgatctctggtgatggaatcgcctagatatagactggccttgaacgtgattccagccagagactggagaatatttcttactacgctcattgcatattaattgggaatttcgggtctcgagcttggtctaccattgaggtgattaatgatttgtagacaacgtcgggtgtaccgaatgagattgcgaattatattgtgtttgatgcgatttctatcatgatgaaaattgtttccgaacttaatatagctaattagtaacaaattgcgcagaatgtttttatttagaaaatagaaccatattattgttcagtataacactctagtatgctgtataaaatccctttatgaattcaaatcaatttctttcttattcttttgcactactttaatatggctttttgaatactagtaatagtcttaatgccttacattacgttatctttatttctatactcacttacttatcaactctataagctattttcctgttcctcttcaacaaatcctcttatctcatcgacttctattccggctgcaagtgtaatgcattagaattgccaaatcatgtattcttaaactcccaaatcgatcgaattgacaataaagccaaatgtttgccgccggccaaaacgaaaccaaaagccgatatagaaacagtcagcgaaaggacagtgagttgacaaaaagaaccgacacacatt

SEQ ID NO: 38279 - DNA, 195 bp, DROSOPHILA
atgttcaagctgctggttgtcgttttcgctgccctcttcgccgctgctctggctgttcccgctccagttgcccgtgccaatcccgccccaatcccgattgccagccccgagcccgccccccagtactactacggagctagcccatacgcctactccggaggatactacgattcgccctactcctactacggctaa

SEQ ID NO: 38280 - protein, 64 aa, DROSOPHILA
MFKLLVVVFAALFAAALAVPAPVARANPAPIPIASPEPAPQYYYGASPYAYSGGYYDSPYSYYG

SEQ ID NO: 38281 - DNA, 2618 bp, DROSOPHILA
cttgcatgaagatattcggctgagtgcgatgggcgtagtaggtgtacgaaacaaagtaaccggcaaagcattggaaccgatgcaccattcccgtcagatattcgacgacagtggcttccttttcgccgccagatgcggatcctcccgaaacggagaccaccggctggaaaggaataggcagctgcatggccctgccattcttgatgttcaggaaagcgtcgtgtgcgatctccaggcccaggtagccgttgccgacgtagggcgtgaaatcgcgttcaccaggcattttcgctggtgacacgtgacggatattggcatcgaattcaaagttctggaggatgaagggcgtcagccggtcatccatgcacatactgtggggatctgcaaggggcgggggttagtccagaacattgaaggcgctccactcacccttctgttctggagcactaaggaagatatagcgaaagatcggcggaatcatatagaagaccacacagacgcagaggagcaggaggaacaagcggcggtacgaggagatcgtgccctccgccaggcgtttcattcgacgcatcacgtcgccggcgtcgaacttgcttttcgctgagcggaacaacattttccagcagtgttttggagcccggaaaatgtcggaaaattgagaaacatttcaattttagaccatttttgtgcttcccagtgaatggcaactgcttttagtgatggcacggctagtctcgctaaatcgatatctttgtatatcggttggaaattctataccctcggattacagggtatagtgcattgaaccccaagtttaaaacgcataatgcagttaatagggtaagccctaatttatattaaattgtatatatcagttacatttctttgtacattttgacgggcttgaatctcactgggttgacacagatggttgaaacttaagacagtaatgaaaaaactcttaattttaaattgcacctctcccgcaactaagcccatatcacagttcccggtcctccaattcccgaatcgcatcactggactgaaagaaggcaatgtgaattagtaaagagtgaggtatgcgatgctccttacctttttgaaccagaatgagggcataaagctgatcttgttgccgaaactcatgtcggcaggcgggaaaatgccgtgcaggtggaggtggcgaaccgagatgaacggcggcaagtggaagcccacaatcgcctccttgggatccacgttctgcgatcgcaggaattccatcatgccctgctccattcgccgcactgggtacgtggcaaatggtcattagtacgtttgcttgctatgcgtaccgtggcttacccaatccaacgtgcgatttgttcagcgctttcaggctgtcgaagtgctccttgggaatcgccagatagtggagtctggctgccggatacttgtccttgaagatcacgtactcgtccgtctccacctccaggatgggcggcggtccttggcggcggtgggcgaagtcgcagaagaagcacttttcgctttccgcctggcgaacctcgccactggcacatttgtagatcgataccaaaactattaagcccaaaccggccagcccggctatgtacattttagccttgtttttcattcggctgtttgactggatcggcacggtcttagcttttcttttcatgaacgtctgtgactaagatcgtttcacactttcgaattggtaaaatattttggataagcgaagtaaacattgtagcgggtatttatcgattaaccatcgagcggtcctatgtgcacttccattggaaatattccagtgctaggcgggaattttaaatcgtgtatttacattttataaaatatgaaaatgtatccagaactaatcattgaaaatatatggaaattaaaaatatataaaaactgtaggtgtgcgaaataaatcacctttccatatagcagcgttaatgaaatcactaatgccattgcttggcattacaagtaataagttagcactgtaattatttatatgtttagtttcatttttaattaaatttgttattttctatccgatctatcgctgccttgccacctgcgatagtttgatacctttatttcctcctggccgcagtgtgaccgcagcggcctatcgcccatcgatagttcgatattcttattgctttattttattaggaatagcaaaccatttatccgtattttttgaattagcgacctaatcctgcgttggccaaagctcaagcaaccggaaaagcacgggatcgccgacggccaaggacgtaaatcacgggaaagtcgggatgtggccgcaaacgctggaaatgtcgcgggacgagtgccgaggcatgctgcgtcgactgggtgagagctgagtggtcaacgaaattcagtcccatcctcgggagctcttgaggatcggccgccgagtggagcgctggcgactaaagcactttcttcctgttgtctctgtttttgtgcccaccagaactcgagtcctattcacatgtggtgagcgtttttcgcgcccaaggagccctcagtgaaacgaaggcgaaactgctggaggagctgcgccagcagttccacattaaccaggaacgcca

SEQ ID NO: 38282 - DNA, 507 bp, DROSOPHILA
atgtacatagccgggctggccggtttgggcttaatagttttggtatcgatctacaaatgtgccagtggcgaggttcgccaggcggaaagcgaaaagtgcttcttctgcgacttcgcccaccgccgccaaggaccgccgcccatcctggaggtggagacggacgagtacgtgatcttcaaggacaagtatccggcagccagactccactatctggcgattcccaaggagcacttcgacagcctgaaagcgctgaacaaatcgcacgttggattggtgcggcgaatggagcagggcatgatggaattcctgcgatcgcagaacgtggatcccaaggaggcgattgtgggcttccacttgccgccgttcatctcggttcgccacctccacctgcacggcattttcccgcctgccgacatgagtttcggcaacaagatcagctttatgccctcattctggttcaaaaagtccagtgatgcgattcgggaattggaggaccgggaactgtga

SEQ ID NO: 38283 - protein, 168 aa, DROSOPHILA
MYIAGLAGLGLIVLVSIYKCASGEVRQAESEKCFFCDFAHRRQGPPPILEVETDEYVIFKDKYPAARLHYLAIPKEHFDSLKALNKSHVGLVRRMEQGMMEFLRSQNVDPKEAIVGFHLPPFISVRHLHLHGIFPPADMSFGNKISFMPSFWFKKSSDAIRELEDREL

SEQ ID NO: 38284 - DNA, 2327 bp, DROSOPHILA
attttatccacaacatcagtagtcagatttttcttttcaaagtcgataagtgtaccagccggatagaagaagtcttccagaatcattttccattcctcgaaattggagttagtgtcacgcattaagaatatggcttgtttttttatgaaatccgaaatttcggttcccgttagcttgtcatgctcgccaccaggcccaaaaatatgctcggcactcgagacatcgaagatcacttcgtggagagccaccaagtaaattttatccggatgcgctgagttgtatttggccagctgcttccggttgagacgaagtccagttagtggattcggcagcttgcgatgaccttcgttctcgtagtcctcatcgtcgtaggttccacgctggcgcctggtattcatataggccacatatcccaggacacaggtcagcgcgattatgacgtagggcgagttgaccacttcgcgaaactggatgccccacgacttgaccggcacagaggacattgtgggtttctcagcttacagggttggatgacctacctatagcttggcgaattggtactgagaaaactaaagggtgacagcgagaagtgtgttctgaaagcttactgggttacttttaaacggatagggatagggatagggatagggatagggatagaatgtcgcagtaaataccttagcaatgttttcacatatcctaccgcttgggtgcaaatacaatgagccaagcttactggaagctcaaacaatcgatgtaaagaatccgagcaaatgttcagggatgcatggagcctttgctatcccgcacttgcacaaatcctttacccatttctaatttccaatacattctcttgtctcttttttctccggcattttactccgcaggtctggtggtcgccgtgtccgagtcgtgagtgtccggaggagccggagctggaattggccgtgcatcagtgcgtcgactattgtttgatgcaggagcaagttaatccccagctttacacgaataccccggcgtatgatgtgcgcccggcagccaccacgtccaccacgcagagatcccagctaacagcaaccacagcaaggacgaccacaatggaaccctcctcggaatcgagctcatcgccggccccaaccacatcgaccaccacatcgccggcgtcatcattgccagcattattcgcaacgcaaacgaggagcagataccaagaagtacttaatatgtcatcgaccatgttcccgccgatgtcccagttgaaggacgcgttggaggagggtgtggagcccgggcagtcatcgtcagccgaactgtctgccatgtccatgcagggattgaattgtaagtgacgtgatgaacccgtccacaacggactccccttgcccgaccaccgactgaccacagcgttattatcacggccagttggacgtgcacttcaagaaactctaggcagattgtggtattcaaaaacacattagcggttctttcatttcattcgctccttatattattaagaaatgtcctaatcatttcatggcctgtttttaaacttgagttaaaaagtatctagatattttgtatccaagtgtactttgcaagttgattctatgtagtagctcctttgttcttccagtcagtttacttgttgtcgacttgcaattctctcctatcctccccccacccatttattgaagtccatagcctccgtttgtgtccgtgtccgtatccgtgtcgatgtccgtatccctgtccgtatccttgtccgtgtccatgttcctgcccctgtccgtgtgtgttttacttttattagtttgtttttccgtcttttgtgagctgccaacctgcagggcgggagcagaaaccgagaacaacttgcaccataaaagccaaagaccgagtcgactctctatgaaactacaagaaataagtataattcaacctgtcgagtgcgtgcgagtgcgagtgcggtggctggtggctggtggttgtcattaaagcctgacgttttgtgtggagccaaagtttacggtggaactttttccaattctccgaaaaaaactttactgaaaggcgtttttattccgcattattaaaagtgggcggcagcctgtcactagatggggaaaaatagacagggggaaatgaaaatatttccaatggagatggaaaagagagtgctttcgctcgggataatatgcaaggtaaacagtttactttgagcaaggaagagattgtgatgatgactaccttaatggattaaaaatttcatttcatataacaaatacatttaatagtgaaaattgaatgtatttttagcgacagagtag

SEQ ID NO: 38285 - DNA, 327 bp, DROSOPHILA
atggacatggcagacagttcggctgacgatgactgcccgggctccacaccctcctccaacgcgtccttcaactgggacatcggcgggaacatggtcgatgacatattaagtacttcttggtatctgctcctcgtttgcgttgcgaataatgctggcaatgatgacgccggcgatgtggtggtcgatgtggttggggccggcgatgagctcgattccgaggagggttccattgtggtcgtccttgctgtggttgctgttagctgggatctctgcgtggtggacgtggtggctgccgggcgcacatcatacgccggggtattcgtgtaa

SEQ ID NO: 38286 - protein, 108 aa, DROSOPHILA
MDMADSSADDDCPGSTPSSNASFNWDIGGNMVDDILSTSWYLLLVCVANNAGNDDAGDVVVDVVGAGDELDSEEGSIVVVLAVVAVSWDLCVVDVVAAGRTSYAGVFV

SEQ ID NO: 38287 - DNA, 5800 bp, DROSOPHILA
acttcttgttttcctatttttacaaatttcttttctcgtttgaatcgtttatgttcgctgcgtcctccacattcgtcttaaattacaaattaacctttctcacatgaattcataatttcttgtgcttttgttcgcaatcgattccttattatacattctccgattccgactatgctgaatatttttgtgtaaaatgtatcgacgatgcagttccatcaatcgttcgaaacgctcttccgtattaaatatttaaaatgtaaacgcacacaagtataaaaataatatagattcgtaataacaaataacacactcatgcagttcgcagcaatttcacaatgataatttcatttcgttacaactcctatactcatctccaaatgtgttgaatatgtcattagatatatgtttatatagttacgagtggttggttgtctgttgtgtttcatgcggatttctcgccaggcgagtggtattcgattggagatgtgcaccatcatcccgcctggcctgctcttcagatttatccattttcttttataatacaaactagagtgcttctcagctttcattccgtcttcttgttgcgacgttgtcctcttcgatcgcttcacatgcagacgctcacacacaaattacaattatattacaattaacatatttcgtttacacttttcgttaaggtttgccttgcttatttgtttcaggagcacgccgcgagttggccaggaagcccggagctcaaattcacaacactgctccggcactttagtggttcgcattctggctacggggcttagctgccgggatggggactggtgggtctctggatcggtcgcggtcttgactattgagcagcttaagtcttacaattaagatagagttaatgcttggatattttatacagtgagtggttgggtagctggtgctgttgcttttgctttgctctcgctttcgctggtggttgatcgatgtgttttgctgatttcaaatccgatccgcttcaacacttgaacttgaccatgggaatatgcttggaagacacgcacttgtcgcagcaccactcggcaaacacctccttgttgagcatttggaaggccgcctctgtcaggccaacacaggttctgcaaaaatgatagtggagttagtcgacgacgaacatgaataaacgaaaacacctgactgattttatgtattaattgaagggtaatcccctgttaactttgaactagaagtgataagactaattgctcatgagattccaataaactttcctaaacattttgttccgaaaagataattatcaggatataagcagtttaaaatatgatgatatggactaaatattgttcctagatatttatataatattttctatttgacctttttaatctattgtaaactggtcgacctacctgtgaaagaaaaagttacaaccggattcacagaacacggcttcgtcgttgtcgttcacctccttgtggcacatgccacaaggatatatgggcggcgcattcgggttctgcggattaaagaccattggctgtcccggcgggtacatcttcccgccgcccattgtcatcggcttgggacctacgcccatagggccgcccatcgggccacctcccatgggccccatgttgcccatcggtccaccgggacccatgggacctcctccaccaccgccgaacatatttggacctgggccgcccatcggattgtggtggtgatgcggatgtccgtggtgcggggacatgtgcggatgcgggggtccgttcatgccgccgggtccgggtcctggacctggtactccacccatgtggccgtggcccatgtgcggacccgcgttcccgtgcggaccgcccatcatgtgcggattaggtcctccgcccatatgaggaggcattccagcaggaccgccgtgcattccgggtccacccatcatgtgcggcggtggtccgccaggatgatggtgcggatgatgcgggtggttcatcatattcggatgcgggggaccaagatgggagggttgctgcggtggcagcatttggttcatgcccattccgggcattggtccgggcccgtggccaggtgggccgccgcccatgtgctgctggtgctgcataggaactgcgttcgggatcatctggcccatcatgggtccgttgttgttattgctgttgttgttattggggccattgggtccggctggtgactgcagcgggctgggtcccgagttgggcatgcccggactcgggccggcgctgtttagcgagtgatgcggtgacatggcgggcggcgctggcgaggatgtaggcactgacgtggacatggacgtggccgtcgatgtgggcgtgagcgtgggcgtggcgggcgagggaaccgatgaggaggctaccgatgataccgaaggtccattcgactgcatcgacgtcggcactcccaggcgtccggctgctggcgagaggtgaggattttgattgttgttgctggcgttacttgtattgcttccgttgttgttgctgttgccgccgccgggattcccgccgagcatgttgttcccagaaccacccgggttattgccgtgcgcgggggagatgccaccgggacctactaggccgccaggcccaggacctggtcctgggattggtcctccaggcatgtgactgccatgacccgttggtccgtttccgagcggactgtgcagaggaggaggacccatctgcccgttgttcatcggtggctgcggaggttgttgttgttgctgctgtggtccgccggtattgccgggattcccagggcccggtcccgagggagggcccaacgggctgccaattggattgcccattggcgaacccataggcagtgagttcattggcgagttctgccccggaccgcccatcggtgaaccctgcatggctcgcggattgggtccgttgggaccgcctcccatgggcgacagaccacccatgcccatgtgatggggtgatatgctggggcctcccattccgcccattgggctcatgccgcccatgccagctattccacccatgggactacccattgggacgggtcctccaggaccaccaggtccccctggccttccgtgattcatatgcggcggtagtccgacgcctggtcccggtcccatttgatgggggtgcatggggctcattcctcgcattggaggtggaccacccatgtgcggatgtgggccatgtgggtgacccataggtccgcctggatgatgcgggtgcatatggggatgcatgtgaggcgggggaggaggtccaccgcccatgcccatgcggtcttcccagtgcgggtgcccacccggtccaccgccgccaaagtgaccacctcctggtccgccgcccatctgattcatggccgccatcgccgcggccgctgagctggacatcgccgacacctggggactgtcgtcgaatggattcgaggcaataatggtgtctccgaagcctcccattggcggagggggcagcaaatcctgcggtgtgggtggcgcctgctgctgctgcatggaattcgcagcagctgctgcagccgccgccgcagccaccgctgcagcggagttggcggcacttgaggtttttcgccgcttcttcggattgctcggcgccgagatgatgtccgtgggaggcggcggcttaaaatcgggcggacagagtccgcccgctggacccggcaatcgatatggcgccataccaagattgtgggtcatattcgaggtgttcttcttccgaatggtggcagcttttcttcaacggcgtggggcaagaaattcggttgtagcggcgtcgccaatcccgcgcaggagatctcgacgctggtaaaggagtgggtttggttctgatgtccctagggaggtgggcacaaatccactggatccttcggtgaccaactacaatgggttatgcttggtgggcttgggctttctgccggttatccggcctgcgaccgcctggagtttgagttcctgggagtgtgaagggtgccaaatgagtatctggcatcctgtgggtcagtcctcctcaactactcaccaagacatctcctggccaggacccttatgaaaatcgcgtttttaaagcaactgactcccaaaacgcaggtaaacactttcggcgcaacgaacggcaaccccgcttatttttcgggttggcaactctaccctggaaacccagcgtcgtgttgtctcgtttcaaagcgccaagcacctgccgcttctcagtttcttactgatccttgatcacttcaggtcaggagttcgtttttttagcactctgcactgcggtttgccactaattccccttcataaacccttcaaagggcgctttctggcagcgctcttcttcttgccagcgattttatgtcctccgctgcgcttcccgttccgttttaattgcagtgcagcgcttaactgttgtttatttacgggttctttttgcgtttgtctttaatcggaaaacaaaacaaccggcggttatttcccaaggaaattgtgttagggtttacgcgatttgtgaagcctgcgttttcggttggctttttgttgatttgatggccactgcagcatccacttttaattagcgccgtttataggagcggcacacgcacggattaccgttacgcggattcggcggtccggcggactgaccactgaaccgttatatagcagcagcacattaacctttgtttattttgaccaatttttgcgtgcgaagaagcgaaatataaataattttcattgcaagtccgccagtgtgaccgtttgcgcacgtcaagagaaatgccggaattccgtcggcggctcagtgtggccaaagcaagccagcacgaagtagtttgcaactacgttaacatttaaaaagtaataggtttaaaggagaaattacgatttggacatacgtcatttaagtaataaatataaattgcgtaaacgtattagccccaaggtcaatacgtagtgtgtcttcatgccgccaatcgtctatcgatatgcgggtaatgttatcggcaaactctcaggcgacgcttgtttattggcggtgtttaaataaagagtttaaaattggcaggttttgcacattaggctagagcggattgaacagcaatgtggagcaacttcgaggcgtcctccctggaggacgaaaccatctccaacatattttcgtcgcgaggcatcttccaaataagcagtgaagaggaagtgagtccttattgtgcagaatctgcagttgggtttctacgctcgccttctttcattgtcaggtaaacaaatatccagatgtcatggcctccgtgcagtgcggcaagatggtcattggcatcgacaagagccttttgctcctggaggacgaactggtggccaagtgcagctttctggcattcggggcagccattgaggccattgccatttcttcaagcggcaacctgattgtatgcggcctcagcgatggcgaagttcacggagtgttcatcaagggcctgctcctgttcagcgtggccgtcaatctggaggacgtgagcctaactggcgggaccttccggagcatccatcaactggatcagcggttttacttcacctgtaagaatggaagcatctataggtaagccattcacagagatgggctctggcatatgcgtgataaaactggatcttgacattatttcattaaacgattcaaacgctgtgtagcttaagcgacattgatgagacctgcttggaaacgttaggcaatatgagcctgaatgaaaacgaaactatagcttgcgaaaaggc

SEQ ID NO: 38288 - DNA, 3442 bp, DROSOPHILA
gacgtgcgcaaacggtcacactggcggacttgcaatgaaaattatttatatttcgcttcttcgcacgcaaaaattggtcaaaataaacaaaggttaatgtgctgctgctatataacggttcagtggtcagtccgccggaccgccgaatccgcgtaacggtaatccgtgcgtgtgccgctcctataaacggcgctaattaaaagtggatgctgcagtggccatcaaatcaacaaaaagccaaccgaaaacgcaggcttcacaaatcgcgtaaaccctaacacaatttccttgggaaataaccgccggttgttttgttttccgattaaagacaaacgcaaaaagaacccgtaaataaacaacagttaagcgctgcactgcaattaaaacggaacgggaagcgcagcggaggacataaaatcgctggcaagaagaagagcgctgccagaaagcgccctttgaagggtttatgaaggggaattagtggcaaaccgcagtgcagagtgctaaaaaaacgaactcctgacctgaagtgatcaaggatcagtaagaaactgagaagcggcaggtgcttggcgctttgaaacgagacaacacgacgctgggtttccagggtagagttgccaacccgaaaaataagcggggttgccgttcgttgcgccgaaagtgtttacctgcgttttgggagtcagttgctttaaaaacgcgattttcataagggtcctggccaggagatgtcttggaactcaaactccaggcggtcgcaggccggataaccggcagaaagcccaagcccaccaagcataacccattgtagttggtcaccgaaggatccagtggatttgtgcccacctccctagggacatcagaaccaaacccactcctttaccagcgtcgagatctcctgcgcgggattggcgacgccgctacaaccgaatttcttgccccacgccgttgaagaaaagctgccaccattcggaagaagaacacctcgaatatgacccacaatcttggtatggcgccatatcgattgccgggtccagcgggcggactctgtccgcccgattttaagccgccgcctcccacggacatcatctcggcgccgagcaatccgaagaagcggcgaaaaacctcaagtgccgccaactccgctgcagcggtggctgcggcggcggctgcagcagctgctgcgaattccatgcagcagcagcaggcgccacccacaccgcaggatttgctgccccctccgccaatgggaggcttcggagacaccattattgcctcgaatccattcgacgacagtccccaggtgtcggcgatgtccagctcagcggccgcggcgatggcggccatgaatcagatgggcggcggaccaggaggtggtcactttggcggcggtggaccgggtgggcacccgcactgggaagaccgcatgggcatgggcggtggacctcctcccccgcctcacatgcatccccatatgcacccgcatcatccaggcggacctatgggtcacccacatggcccacatccgcacatgggtggtccacctccaatgcgaggaatgagccccatgcacccccatcaaatgggaccgggaccaggcgtcggactaccgccgcatatgaatcacggaaggccagggggacctggtggtcctggaggacccgtcccaatgggtagtcccatgggtggaatagctggcatgggcggcatgagcccaatgggcggaatgggaggccccagcatatcaccccatcacatgggcatgggtggtctgtcgcccatgggaggcggtcccaacggacccaatccgcgagccatgcagggttcaccgatgggcggtccggggcagaactcgccaatgaactcactgcctatgggttcgccaatgggcaatccaattggcagcccgttgggccctccctcgggaccgggccctgggaatcccggcaataccggcggaccacagcagcaacaacaacaacctccgcagccaccgatgaacaacgggcagatgggtcctcctcctctgcacagtccgctcggaaacggaccaacgggtcatggcagtcacatgcctggaggaccaatcccaggaccaggtcctgggcctggcggcctagtaggtcccggtggcatctcccccgcgcacggcaataacccgggtggttctgggaacaacatgctcggcgggaatcccggcggcggcaacagcaacaacaacggaagcaatacaagtaacgccagcaacaacaatcaaaatcctcacctctcgccagcagccggacgcctgggagtgccgacgtcgatgcagtcgaatggaccttcggtatcatcggtagcctcctcatcggttccctcgcccgccacgcccacgctcacgcccacatcgacggccacgtccatgtccacgtcagtgcctacatcctcgccagcgccgcccgccatgtcaccgcatcactcgctaaacagcgccggcccgagtccgggcatgcccaactcgggacccagcccgctgcagtcaccagccggacccaatggccccaataacaacaacagcaataacaacaacggacccatgatgggccagatgatcccgaacgcagttcctatgcagcaccagcagcacatgggcggcggcccacctggccacgggcccggaccaatgcccggaatgggcatgaaccaaatgctgccaccgcagcaaccctcccatcttggtcccccgcatccgaatatgatgaaccacccgcatcatccgcaccatcatcctggcggaccaccgccgcacatgatgggtggacccggaatgcacggcggtcctgctggaatgcctcctcatatgggcggaggacctaatccgcacatgatgggcggtccgcacgggaacgcgggtccgcacatgggccacggccacatgggtggagtaccaggtccaggacccggacccggcggcatgaacggacccccgcatccgcacatgtccccgcaccacggacatccgcatcaccaccacaatccgatgggcggcccaggtccaaatatgttcggcggtggtggaggaggtcccatgggtcccggtggaccgatgggcaacatggggcccatgggaggtggcccgatgggcggccctatgggcgtaggtcccaagccgatgacaatgggcggcgggaagatgtacccgccgggacagccaatggtctttaatccgcagaacccgaatgcgccgcccatatatccttgtggcatgtgccacaaggaggtgaacgacaacgacgaagccgtgttctgtgaatccggttgtaactttttctttcacagaacctgtgttggcctgacagaggcggccttccaaatgctcaacaaggaggtgtttgccgagtggtgctgcgacaagtgcgtgtcttccaagcatattcccatggtcaagttcaagtgttga

SEQ ID NO: 38289 - protein, 815 aa, DROSOPHILA
MTHNLGMAPYRLPGPAGGLCPPDFKPPPPTDIISAPSNPKKRRKTSSAANSAAAVAAAAAAAAAANSMQQQQAPPTPQDLLPPPPMGGFGDTIIASNPFDDSPQVSAMSSSAAAAMAAMNQMGGGPGGGHFGGGGPGGHPHWEDRMGMGGGPPPPPHMHPHMHPHHPGGPMGHPHGPHPHMGGPPPMRGMSPMHPHQMGPGPGVGLPPHMNHGRPGGPGGPGGPVPMGSPMGGIAGMGGMSPMGGMGGPSISPHHMGMGGLSPMGGGPNGPNPRAMQGSPMGGPGQNSPMNSLPMGSPMGNPIGSPLGPPSGPGPGNPGNTGGPQQQQQQPPQPPMNNGQMGPPPLHSPLGNGPTGHGSHMPGGPIPGPGPGPGGLVGPGGISPAHGNNPGGSGNNMLGGNPGGGNSNNNGSNTSNASNNNQNPHLSPAAGRLGVPTSMQSNGPSVSSVASSSVPSPATPTLTPTSTATSMSTSVPTSSPAPPAMSPHHSLNSAGPSPGMPNSGPSPLQSPAGPNGPNNNNSNNNNGPMMGQMIPNAVPMQHQQHMGGGPPGHGPGPMPGMGMNQMLPPQQPSHLGPPHPNMMNHPHHPHHHPGGPPPHMMGGPGMHGGPAGMPPHMGGGPNPHMMGGPHGNAGPHMGHGHMGGVPGPGPGPGGMNGPPHPHMSPHHGHPHHHHNPMGGPGPNMFGGGGGGPMGPGGPMGNMGPMGGGPMGGPMGVGPKPMTMGGGKMYPPGQPMVFNPQNPNAPPIYPCGMCHKEVNDNDEAVFCESGCNFFFHRTCVGLTEAAFQMLNKEVFAEWCCDKCVSSKHIPMVKFKC

SEQ ID NO: 38290 - DNA, 3277 bp, DROSOPHILA
gagaagctcatttgggagcaggcagagaagcggcaaaaagtgcgcaagtcttctgccatggactcagtgttcaactcgccgcccagggagcacgaacaggccctcatgtacgagatcctcaagagaaccaccccagccaatagtatggatctcaacaagcgtgtgctgccgccgaaatgccgctggatggaggactctatgcagtctacgatgattgctccatttccggagaacaggaatgcgcagaacaccatctttgggggctatctcatgcgccaggccgttgaaatcagcttcataatggctagcatctatctgggcgatcggcccaccctcaggtgcatctcggacattagtttcatgcacccggtgcatgtggatcggttcctccagctcaccgcccacgttgtttacgccgcccagaactacgtccagctgatgaccgtggcccagatttgggatgccaagagcggcaaagtgcagaccaccaatgtcttctacttgacctatcgggcggacaaggtgctggacgaagtcctcccgcgatcctaccgagagatgttgtggtacgtccacggtaggcggaaactcctgggcgctctgcacttgcagccggagtaccccgatcctatcgaagtggccaaagagagctcaaatcatatcagcacttagaattagcgctaatgtaaatcgaagttgtagttgatccaaatatgttaatctgatggaattttaactttatagctgttattttataatttataggatatatcaatgaaataaaattgtagaaaggaatttaaattgatgcttgtgtgcaattattggattttagaaaatgaactaatcgtcacagctggggttctttgatgaaaaggccaaaactttccgttttgtaaggtttattttacaaatcctgttagtctaaccagcgggcgcgcttgtacagtgtttttgctttagaaatccttaaactgaagaaccaaatccatcccctcgcttagaatcgcatgcggtgggggtattgggaggagtgcagggcaaacatgttctgcaagtacttggcgaagaacttgccctcgggatgggccttgatgaccttcagcagggcggcgtccacctccttctggtccttcttgcgctgctcgttgggcacgaagcgctccttcttggccgcgaagatgtcggcctcgccggtcttcttgtccttcttagccttcagacggcggaagtaggcgtcgttcaggtgctcgggcaccttgaaggcaccgagatccaccttcgaggaggtgccgatcacgtagcgctgggacacgcgacgcagcgggcacgagttgagggcgaagggtccggtgaccagcaggagtccggaggccaagaccttcaacaggacgacgcgcttgccctggtggcgtccggccagcaggatgagcacggttccgggggtcaggttgcggcgcgtgttgcgtttgtgctcgctgaagtttgccttggaggggcgcttcttcacgaacgtcttggtcgggtaggaggccttgctcttcttcaggaagaccgtgcgctcaccgccgttcttgggtcctccgatcttcttcaccttcttgatgggcaccttggccttctccacgacggggctcttcttgtccttcaggcggtacagagcacgacgcttgtacatctgaaataggttggaaaagtggttagcttgatccttgatccacaagcctttgaactagggggttattttgtttacgtgtatcactaatacgctccacttgttgcacagtcacaagcaagggcattgaggattattgaacttatttgtgagaagagtaaacaatttaggcaaagtatgcatggtttgtactcatagccacttgaacacacgggaattaaaataaatgcatttggattcaggaaccgcactgacgaatactgagttttcaagtaaaactaactcaaagtgggtggatggtgtgtggtccatcccgcggatagatgagcaagtatcggatcccttggaatcggagaaccacaagtaagccacgctgctgcgccttctcatcgggcggaggcgtcactcgggccagaggccatttccccactgtttccggcgatatttacctgggccttggagtaacgcaggataccgcccttcaggtaggagttgacggggtgcttcttgccctttttggccgacttggccacctttttagctttctcgatgggtgccattgtgaaacacgtgtacacagcacaaaaattattggaaaaggaaggttatgtctagagcggtgtgaccagggcggtcgatacaaaaataccacccggttaccgaagaaataccaattcagtttgtaaacataccatctatataccccaaattaaaacataatttccccagcattgattatttctactcaagagctgaaagttacaaatatagtttcagttcctataacagtggattttaattaacattagaactcatgtttatagcattatttgtgtaatcgggtctgctatcgataaaaaaaatgcacacagtcgcaatataaaaagtatcgcaacgttttaaatctattgcaataaaaatcgataagcttaacggtcgatttattgaatgaccaatttaaaaaattaaacagtcagaaagataaataatccgaaatatgtcagcttaaagataaaataaattgaagacacgccttttcatttaccatttaataatacttttttccatttatttgttgtaatgtgtataatgatttaaatcacgagcttcagctgttttcaaacaacttgttccacatttctttacacaatgatccatttgcttataatgattctggtggacgcctaaagtagagtctaattgttagttacaggatgtaatttaaaataaataaaatgagtggttcgtaatgtacagtatgaattcatttcgtgtggtaactaatcctaaagtgtaaacctcaaccgaatataagctcaaaacttgacgatgggcaattgcccaccatcattgttatcatgaataaaagtagtcgtcaaataaaaactaaatatacaataattgagattttcattcatgtttttgatgttgatacttgcaaatatttaactaactccgcgctaaatacaatgtaaaatttgctagttgttaaaattatgaaatctcagcccgtggcagtcgatggtagaaaaacttagtgctagacatattttcaccgctttcacctttctcttaatcgcctaatcgtcaattggctgttat

SEQ ID NO: 38291 - DNA, 774 bp, DROSOPHILA
tccttttccaataatttttgtgctgtgtacacgtgtttcacaatggcacccatcgagaaagctaaaaaggtggccaagtcggccaaaaagggcaagaagcaccccgtcaactcctacctgaagggcggtatcctgcgttactccaaggcccagatgtacaagcgtcgtgctctgtaccgcctgaaggacaagaagagccccgtcgtggagaaggccaaggtgcccatcaagaagagcaaggcctcctacccgaccaagacgttcgtgaagaagcgcccctccaaggcaaacttcagcgagcacaaacgcaacacgcgccgcaacctgacccccggaaccgtgctcatcctgctggccggacgccaccagggcaagcgcgtcgtcctgttgaaggtcttggcctccggactcctgctggtcaccggacccttcgccctcaactcgtgcccgctgcgtcgcgtgtcccagcgctacgtgatcggcacctcctcgaaggtggatctcggtgccttcaaggtgcccgagcacctgaacgacgcctacttccgccgtctgaaggctaagaaggacaagaagaccggcgaggccgacatcttcgcggccaagaaggagcgcttcgtgcccaacgagcagcgcaagaaggaccagaaggaggtggacgccgccctgctgaaggtcatcaaggcccatcccgagggcaagttcttcgccaagtacttgcagaacatgtttgccctgcactcctcccaatacccccaccgcatgcgattctaa

SEQ ID NO: 38292 - protein, 243 aa, DROSOPHILA
MAPIEKAKKVAKSAKKGKKHPVNSYLKGGILRYSKAQMYKRRALYRLKDKKSPVVEKAKVPIKKSKASYPTKTFVKKRPSKANFSEHKRNTRRNLTPGTVLILLAGRHQGKRVVLLKVLASGLLLVTGPFALNSCPLRRVSQRYVIGTSSKVDLGAFKVPEHLNDAYFRRLKAKKDKKTGEADIFAAKKERFVPNEQRKKDQKEVDAALLKVIKAHPEGKFFAKYLQNMFALHSSQYPHRMRF

SEQ ID NO: 38293 - DNA, 12600 bp, DROSOPHILA; identical to SEQ ID NO: 24163

SEQ ID NO: 38294 - DNA, 1753 bp, DROSOPHILA
ctagtttggtcagttctcgaagatttgatttgagaataagtttatattttttggaaataagaagcaagaaaagcagatactgatcaaaacgcagaggcatccgggtactaggccagccctcacaatgtctgtccctgtacgctactcctctgctgccgccgaatacgccgccgaagttgattgtgagttggagagcactctgcaacagcagcaacagttgcacttgcaacagcaatacgagcaataccagcactaccagtaccaacgggagcaggatatcgcctactattgccagttgcaggcggcgcggcagcaggagcagttgatgcagcagaggacatcgatgtcgtcgtcggttatgccaggcctagccttgccccaggatcaccaggaccacccagccgcccttttgaacggaccccacaacaacaacatcggactcgccatggacgcccacagcatcaacgccattctggtcgacgacgagcagccctcgacttcggcccaggctgccgccgctgctgccgcatccgcgggtggatctgctggtgcgggatcgggatcgggattgggtggtgctatcggtgggggcaagctggccaacggcattaaccgcaatgcagagatgccaactgattggatgaggattgcggacgagggccggtatgggacaccgggtgctgctggcttggaatatcagaagtacgaacaacaacaacaactggaggatctggcggagtccgaggcaggagccgtcggtggagccagcaacaacaacggcgaatcgtcgtcgtccttgaaaaagctagaggatcagctgcacgccctcacctcggacgagttgtacgaaaccctcaaggagtacgacgtcctgcaggacaagttccacacggtgctgctgttgcccaaggaatcaaggcgtgaggttactgccggaggacgagatggatccgcctacgtgctgcgctgcctgaagatgtggtacgagctgccctccgacgtcctgttctcggccatgagcctggtggaccgcttcctggatcgcatggccgtcaagccgaagcacatggcctgcatgagcgtggcctcgttccacttggccatcaagcagctggacttgaaacccattcccgccgaggatctggttacaatatctcagtgtggttgtaccgctggtgatctggaacgcatggccggcgtgattgccaacaagctgggcgtccagatgggacatgcaccgatcacttctgtgagctacctgcgcatctactacgccctcttccgcaacttggcgaaggagatcggcggcgactttttcaagttctaccagcagctcatcaagctggaggaactggagaaccgcctggagatcctgatgtgcgacgtgaagaccacggtgatcacgccctcgacgctggcgctggtgctcatctgcctgcacctggacttccacatcaaggagtcgtacacccgcggcagtccggagctgaagcacgtcttcgagtacattctcttcctgcagcagtacatgaggattcctgatcgcgttttcacctgcggcttcagcatcgtttcgggtattctgtcccattacaacgggcagaacaaggcgccctacaagcagcggcttgtctggaagctgtccagtcgcacgctgcgcgtcttgcgcccgatcaaccgcttctcctccgacctgcccaccattgaggaaggcatccccaacgccctcgacgatggcctgcgttctaggtga

SEQ ID NO: 38295 - protein, 542 aa, DROSOPHILA; identical to SEQ ID NO: 24162

SEQ ID NO: 38296 - DNA, 2603 bp, DROSOPHILA
cacctggcgatgctgtgcacaagatttatccggccgcgtgcataaaggttggtgcaatcaagagagtttaatgtgatagcttaacatacattttctcatgcaggtgtttgacctgcgccagtgccaccagcagatgcactcgctggcgaccaatgcgcaggcagcggccgctgctcaggcggcagccgtggccggagtggccaatcagcaaatgggcggcggcggaaggagtaagtagatggaatcagtttgatttagggaaaactaatgtgttgatgcggtattccaggcatgacagcagcggctggaattggcgtggacgatctgcgccggttatgcatcctgcgcctgagcttcgtcaagggctggggacctgactacccacgccagtccatcaaagaaacgccctgctggatcgaggtgcacctgcatcgcgccctgcagctgctggacgaagtgctgcacgccatgccgatcgatggcccgcgtgccgccgcctaatccgtatttattattggcccacatctatgctaaggactcagttttagcggcagctatccgtcagctatttgcggattttgtgtttttcatttgcaattctgattacgattatgtttgcctttgattatttgataataatttttataaaaaattgaaacaacttagaagtcttaagtatgcagctgtaaagcactaagcatctagttttatgtactatacttaaatatacgcccacacaacaccggagatactgaacaagcggccaatgtttgttgtccatttcctgccacgaaaattacaaattaaaaaaaaaaaaaacgagaagcatacacagcattacaatcatccaagccacagggcgaaacaaaaagagacatcgatgcacccataaatacattcatttgatgtaaaatgcagcataaataaggcaagcgaaacaagtagatgtaacataagtgtaataaacagaccgtgaaattacgattctaaaggcttcttttcactgatagcactgcatacgcagatccacctgctggtccagccagttgatccaatctggagtgataggtcgctccagggtgacctcgtggaagatctccactcgacgcgtctccacgaacataaaactcttaaacaaatgcagcgatgcagcgttgtccatgtcgatcttgacctcgaatttatccaatttaagctggggctgcgattgggcgtacttgagcatgaggagcatggcttccctgccgaatcccttgccccgtgcataaggttcggcaatcatgatttccgcctccgccgttggtatctggctatcgggatcttggtgcaggaagagattggtgtcgcccaccatggcggcaatctcatcctgatcacgcgaataagtctctgcatccaggacaatgaaggtcagcttgtcgctgtcctccctccaactcctttgcatctcgtgctcctcttctaaggtcagttcctcggatgcggtcaactccctcagggtctcgttgctcatccactcgtggtacttgggcacgtggcgcgcttcgtagggcacaaggatgaccctgtgacccagtattttggtgttctcgtttagatgcatccttaaatttggaaaaacttaggaatattctacaatctggaaatatttgttattgtaagcttgtttacatcaatcagctgctcaagctatatagtggccacctgaatctacactgtaaggaattctctttgcgtaagcactgcaaataaggtaatatttttgaaatgaactcttaaatcgaatggagaaaagcgagtaatcaaataaagtaatatcaaataatcaatcgaattaaaaattaagatctgttcaggaatcccccttacgatgttgtggcagcggtgccacatcttcttagctataacagtctggcattgccaaaggagcaacaatatgaaaagcagagcaattttctgattaattttttcttaagtgttactaaataaataagtttaaaaatgccgaatcgtaattgccggacttgcggcctgttcattttctgttcgacgcccagtaacctcttcgaggagcccaattccgtaatgctgcaccagatcgaggttcttactggtttgtttgtgagtacctttctatttttgtgttttcaaacttaagtctggattatccgtagttgctcggcggacccgggaacgagctgcccccctttatttgctcaccctgcgaattggacctgcagacggcgattgctttccgggaacgtgtgattcgaacccaaaaaacgctgcaggaaagtcccaacctggggaacgcggaattgatcgaatccttcgcagttggtgtggagaaggagattcagtacgctgaagaggtcaccgagatcgaggttatagaccttctacccgaggaacacctgctggaagagacggaagagccgtacgaaatatgtgagcagaacgagcagccccaagtgaaggttcctgcgcaggagaagaagctccgcagaagtacaaagaccacgcccacagtctttacctccgttaagtttgcggacaatagccaggccacgcgcacccagtggagcagactcaccgaggacgaa

SEQ ID NO: 38297 - DNA, 603 bp, DROSOPHILA
atgcatctaaacgagaacaccaaaatactgggtcacagggtcatccttgtgccctacgaagcgcgccacgtgcccaagtaccacgagtggatgagcaacgagaccctgagggagttgaccgcatccgaggaactgaccttagaagaggagcacgagatgcaaaggagttggagggaggacagcgacaagctgaccttcattgtcctggatgcagagacttattcgcgtgatcaggatgagattgccgccatggtgggcgacaccaatctcttcctgcaccaagatcccgatagccagataccaacggcggaggcggaaatcatgattgccgaaccttatgcacggggcaagggattcggcagggaagccatgctcctcatgctcaagtacgcccaatcgcagccccagcttaaattggataaattcgaggtcaagatcgacatggacaacgctgcatcgctgcatttgtttaagagttttatgttcgtggagacgcgtcgagtggagatcttccacgaggtcaccctggagcgacctatcactccagattggatcaactggctggaccagcaggtggatctgcgtatgcagtgctatcagtga

SEQ ID NO: 38298 - protein, 200 aa, DROSOPHILA
MHLNENTKILGHRVILVPYEARHVPKYHEWMSNETLRELTASEELTLEEEHEMQRSWREDSDKLTFIVLDAETYSRDQDEIAAMVGDTNLFLHQDPDSQIPTAEAEIMIAEPYARGKGFGREAMLLMLKYAQSQPQLKLDKFEVKIDMDNAASLHLFKSFMFVETRRVEIFHEVTLERPITPDWINWLDQQVDLRMQCYQ

SEQ ID NO: 38299 - DNA, 3571 bp, DROSOPHILA
tgtttcagttgcccatcaccgtaaattcgaatgcaccctttatgatggcagagcagcatcagaagcaagtaccaaaagctactggtcgctcaggtaaaaacaatagccgaatgcgccaaacttacagcaacaatatcaacaacagcaacccgcagggtatgcgctgcaacaacaacccgcaggctatccgccagaatcaaatgaatcaacaggtattccagccataaatcatacatacgacaagtaaaattcgcgataatttttcacctggaaagaagactacctgtaattcagataataatttctttgatattccggagaaactcattaagagatcgatttacttggccgatcccacaaacggtcatcgcatatatataaatcgatatatatatatatatatatatttatcatttccccgagcgcagctaatgactatggttttcttatagattaagtttaaatacgaaagtgtaaaataatattaccgttcaataattacttttaagatttcgataaaccttgatctagtattgctggttttactgtaacttaaccgcgtagtaagtaagactcattgtgaagccatcagatggacttggcctaatcatagcaactagtagtctgtaagggcatctcaatttcattttaattttgataacgctgtaaatcgcattctcatcttttttttacatacattgtatgtatatttaaagctaagctgcaaaataaataaaggacaattaattttttgggtattgccatgtagtttataattagactcgaaaatgaacagataagttttccagattccaaagcgaaacagtgtcaactaaaacagcaactaaaggcagctccagcccgaaagcatgctatgcaaaatataaacgtaagtcagccgcgagtaaatagcaaaatttgcgaatccggtccgctttaattatgtcatcaaacaccagtaaaagaaaacaattttctaaaataatgtagagcccttgccctaatcgatatccaacttcttgaagtttccctcaatcccgaataagtcggatgcattcttggccttgccgggtcgcaatttctcgttcacctggtggcgagtctcaaactcgatcatttcctttcgattgtccagcaacttcttatagtaaatctctgcgaacaattgcttaagtaattttctcatatttagatggacaccgacctttcgccacgtttgcctcctccagttgaccaccatattccttgggaagcatttcctggggcacaaacttgtagaattcctttaggtcactgtgcatatggagcacagtggtcagttcctttttcataaacggagtcatcagcgcaagaatcttgtccatgaacggtacaatgttgatgaagtgaaagcctatcaaccggatggcagccgcttcctgaaaattgaatggttggtcaaacgtagcgaaacgtagcttggcctactacctacctgcaggtagtaaaggaacttcttcatttgcaagagtccaatgcgggctacatgccccaaggaagtgtttttcagatcgattacaataacgtgtcccggctgaatgccatcttcatacatccaaaagtcaaacaccatgcaatagctggaagtgaagagcaaaggtgttcaaaatcgagaccaagcattccaaggcaggagtgtatccactgatgcaacccctgaactacacccttgtctctcaaggctgcttaattgttaactcttaattgactgccattatgcagcagattttaatgattggtgggtgatttgtaagtaagctgtgtacggaggcgacacttagcaacccagtatgtatttccgtgcttttcggtgcactaagtttgagggttcagatcggacctttaatctcttcatgctccgcacgcttgtcataatcacgccacaaatgacgtgcaaatcacacaacaataactgacagctattaagatgtagttgaattaaacaaatgtttgcgaactgtctatagctattttacttgggagggtctatcaggattttcttagtttggtgacgatattaagagaatcttcttccttgatccactaaaattacatgttcgtactcacagcttcatgacatctgcaaaattataatttgaggtattcaggtcatcaagcttggcgagaatcacccggtatccttcgggagtggctcctggcaggggaacaatagagctgtccacatataaggaaatcatattgggtaaacgcacaattgacggaatttaaagaaaggcttggcctgaataatacccacactgttcgcatggcgcgcctgatctcgggccgctcgcaatcgaggttcacgaagaactcctccaggtgggtgcgggccgtgagattggtgtccaggacctgcttggccacctccatgctgtagcggcaggcgtgaaagaagtgcagtgcctcgccctcggaaaacctatccgagatgtgcggctgcgcgtggatccagtccagaaatttcagcacctccggtcgcctgatctccggaaaactggcatactgatcctccaagttggcctccttcatcgtagtcgactgcgccgaggatttacttctgatcgttgcgctaattggcccgaaacgcgattgagcgcggtcaactctcgaatgaaatggaaatggaagctggttgctttcgcaagtgaaactggttggccgtctgacttcgcttcgggaattcggcatgcaattccgtgtgttcgggatgagatggggaattggggctttttgggaggggagttgggactagcatgtgttcagtaaaaactggcagtggcaatcgctggtcacacgaaaaaaaactctagatttttgttaatttagtttttcctccagtacatcaactatttgaatttgaaactttattattctttccagtgtatttatcttcggttcatttcacttcgcctccatcaggctgcgtgaaaatgcatttttactcgcctgctctgccgtacggttatcattatatttttccctctcttcgggattgcataacatgtgatcaagtgattgggcggccgatccatgacgaggggtctgttattatttcgcatggcgtgtgctcggaagatcgggagatttcagctccttcatcaaatccaatgtgcgacgcttgactgatgaaagaaaatgatttttgtgcatatacatacatacaggcgcatagcgctaaatgaagattaaaatctttaagagtaatatgtggtcatatagttgtgtacatggcgtatacataatattcgtgtactgaatcggttgtcaaataatgtaactttaaaggccaagtagagctcatttattgaactatcaaacacagtttttaattaatttatttaaaagtccaatccaatgtggtttgtttatattggttgctcaataaattgcacatttgaagaatccttcgccaaataagatgtcaactttagcgagttcctcgagttgcactgcaagtacgtgtggcaacttctacttggactttatccgcggagtctagctgccacaacggcctcatttccgcggcaga

SEQ ID NO: 38300 - DNA, 897 bp, DROSOPHILA
atgaaggaggccaacttggaggatcagtatgccagttttccggagatcaggcgaccggaggtgctgaaatttctggactggatccacgcgcagccgcacatctcggataggttttccgagggcgaggcactgcacttctttcacgcctgccgctacagcatggaggtggccaagcaggtcctggacaccaatctcacggcccgcacccacctggaggagttcttcgtgaacctcgattgcgagcggcccgagatcaggcgcgccatgcgaacagtctctattgttcccctgccaggagccactcccgaaggataccgggtgattctcgccaagcttgatgacctgaatacctcaaattataattttgcagatgtcatgaagctctattgcatggtgtttgacttttggatgtatgaagatggcattcagccgggacacgttattgtaatcgatctgaaaaacacttccttggggcatgtagcccgcattggactcttgcaaatgaagaagttcctttactacctgcaggaagcggctgccatccggttgataggctttcacttcatcaacattgtaccgttcatggacaagattcttgcgctgatgactccgtttatgaaaaaggaactgaccactgtgctccatatgcacagtgacctaaaggaattctacaagtttgtgccccaggaaatgcttcccaaggaatatggtggtcaactggaggaggcaaacgtggcgaaagagatttactataagaagttgctggacaatcgaaaggaaatgatcgagtttgagactcgccaccaggtgaacgagaaattgcgacccggcaaggccaagaatgcatccgacttattcgggattgagggaaacttcaagaagttggatatcgattag

SEQ ID NO: 38301 - protein, 298 aa, DROSOPHILA
MKEANLEDQYASFPEIRRPEVLKFLDWIHAQPHISDRFSEGEALHFFHACRYSMEVAKQVLDTNLTARTHLEEFFVNLDCERPEIRRAMRTVSIVPLPGATPEGYRVILAKLDDLNTSNYNFADVMKLYCMVFDFWMYEDGIQPGHVIVIDLKNTSLGHVARIGLLQMKKFLYYLQEAAAIRLIGFHFINIVPFMDKILALMTPFMKKELTTVLHMHSDLKEFYKFVPQEMLPKEYGGQLEEANVAKEIYYKKLLDNRKEMIEFETRHQVNEKLRPGKAKNASDLFGIEGNFKKLDID

SEQ ID NO: 38302 - DNA, 2758 bp, DROSOPHILA
tcacgaagcattgggtggtggccacatcgtagacccgcaagacgttatgttccgttccgatggctacgtagtcaccagtaggatgaaaagacaggcacagcaccggctcgcagtcggtgaacaccttgtgggccttctttaccgaaggcttggcaatgtcaaacaacttaacagtgccatcgcgcgaggcggaggccaggatgtgctccttgggatggaactccaggtaagacacttcatcagtgtgatcatagagcgtgcgaatcactggatggccttgttgttccctgcccggctcgatatcttcgggcgcagacttcgccagcatccgctccacgtccagaatcttgatgctggcatccacgctcccggtggccaccagggaaccatcgcaactgaaggcgccggcgcgacaggcctgcttgtgcgaggtcacatacgcggtttcgtaggaatgtggttccggggccaaggccgaagcctccggctcgaattccaagtctatgccgggcagcacatcatccgagttggttttgtccttgtcgctcagcgtctgcatccctgcaatcattacgtgcagcaggcgttcactgggagcgcactggtccgccttcaccagcatggacagctccatggcgaacttctccaggccgtcgtacatcagctggctgatcatcagtcggtagagtatctcccggttcttcactaggttactggggtccaaaatctcatcacgcatggtggcttaatttatattttgtttcctacggatataaacaaaatcttgtagataacgccgtgccgttatcgttatcgaaaacatttatcttgccggtatgtcatctctagctatgcggtattgaaatactgaaatcagggtttcggtattttacggtccacggtcactcctaacagctgcaacacgtgcggttttaaaattgttttggtcccctcaattgattttaaacattgtttgattcattaattaaacctctcaacaatgaagatccgcaagaatcatgctcgcaagcgttatcgctacaatgtaaaccgcaagacgatgaataaaacccggagttccaccggaaaaattaaggagtaagttggatcttggtgcacttacagccaatagagtcaacaagtttacgaaaaccttctgttatgatcttaccagtcccaggatgaaaaagatgtggatggaggaccagcgtgtgggcaccaacttcagtgaaatggggttggccaaggacgtcaacaaggccattgcgattcccagctacaagaaggaccgcctcctagcggcccgagttgtgaatgggtttctggaggaggagctggacgaggatgagcggcgtgtattgggcctcaagaaaccagtcgtagaggagggtccaaaacgtggacacgtagtccaggaactagaacaactggctagcgagcgagccgacccagagttcaggtaaaatattgattctgcaatggaaaactgtcaaaatacaggttttgtatttgcacagattacccaagggcgtggtcaaggaactgtcctactttcttaacaaacataagtttaactacaaggcgatggttgccgatcggaaaaactttggccagtggacgtggcggcagttccgcttgaagattcgcagatttatgtcgattccggagcagtttaacgtttacctggagcagaagaagttgcccgtgggcgtgaaaccggactgggaggaatacgagtcggacagtgaatggaaataatggctcttgaccaatgtacattatagtcgttttcgggttctaatgctattaattgtaatgtttagacttactttaattcttttaatacaataaaataggcaagtaaagacgaacgcaaaaggtctacgtattaaagcattactgttaattacattacattactattaacagtattttttcaaattcctttctaacatttttgttctgtcaaattttctattgttctgtcgtacgacaggacgagagagagagaaaggaaggagcttgcgtcttatttcaacgcataagcgaatagtgtgcacaatgtcttttgcaattagtggtgaatgtgcatacttttagtgacagtccgtgaaagtactatattattttatctgcaaaagactcagtttaagagaatataaaatattccatgaatggtagtaaaattgtattactatttttattttggtacgttttatacttaagggatggaaactttatttaagtcaagaaatccgcataatgcaataggaaacccaaggcccttgtcatacatggaatcctgtgccatctctaggtcggaatcagttcagctccgttcacctcagcatcgttgctttttcggtctttccgttttgtgatttcgaggtaagtgcacgcagagctcccgttaaattgtgaaaatattaataggcattgattagttgtggaaatgtaaaaagggaaagtcccagaattccctaccctgcattattaggcgaatttcggttcgattttccaacctaaagaaagttctaaagtaaagaaagttccgaaaagtgagagagtgtaagtgatttgcgctgccggccggtcttctcattccttttgcataatagctgtgtaaatcgattcgaattggaaattggttttccagcgaccttaaattgcaagtaaattaataaagttgcatagactttcgaattccaacatggcgaccggctgcatgtgtgtgcgcgttcgattttgcctggattgt

SEQ ID NO: 38303 - DNA, 618 bp, DROSOPHILA
atgaagatccgcaagaatcatgctcgcaagcgttatcgctacaatgtaaaccgcaagacgatgaataaaacccggagttccaccggaaaaattaaggagatgaaaaagatgtggatggaggaccagcgtgtgggcaccaacttcagtgaaatggggttggccaaggacgtcaacaaggccattgcgattcccagctacaagaaggaccgcctcctagcggcccgagttgtgaatgggtttctggaggaggagctggacgaggatgagcggcgtgtattgggcctcaagaaaccagtcgtagaggagggtccaaaacgtggacacgtagtccaggaactagaacaactggctagcgagcgagccgacccagagttcagattacccaagggcgtggtcaaggaactgtcctactttcttaacaaacataagtttaactacaaggcgatggttgccgatcggaaaaactttggccagtggacgtggcggcagttccgcttgaagattcgcagatttatgtcgattccggagcagtttaacgtttacctggagcagaagaagttgcccgtgggcgtgaaaccggactgggaggaatacgagtcggacagtgaatggaaataa

SEQ ID NO: 38304 - protein, 205 aa, DROSOPHILA
MKIRKNHARKRYRYNVNRKTMNKTRSSTGKIKEMKKMWMEDQRVGTNFSEMGLAKDVNKAIAIPSYKKDRLLAARVVNGFLEEELDEDERRVLGLKKPVVEEGPKRGHVVQELEQLASERADPEFRLPKGVVKELSYFLNKHKFNYKAMVADRKNFGQWTWRQFRLKIRRFMSIPEQFNVYLEQKKLPVGVKPDWEEYESDSEWK

SEQ ID NO: 38305 - DNA, 3788 bp, DROSOPHILA
aattctttcttaatcgagaaaaaagtgttggatgctgcattgttattattactttttatgaaatctaagctatgtgtgtttcactggacattaaaagtaagagtgaatagtgttttctcctataaacacatttacgcttagcaagatatttaaaaccggaatcattgctttcatatgggtacaacctacatggatgacgatgtggatgctgttgactcagtattacaattatccggaattagtccattcaaggctttgtgattttggttggacgtatgctggctgttgttgttgctctccagttggtgaaaaagaaaagaactggaggtgctgggagcctgagaaaactgggcctccatagaggtcaacgaagttgtggaggaattgtctccatcatcgtctgttcggacgctttccctttcattggaattgttgttgttattgtcgcctgacgaggtctcctcttcatcggagtcgtagctagccccggtgtcgcttgaggcgctgccctcgtccatctcggtggtgcgtggtcgaccagtcgctcttctgtgttttgtggtttgaatgagctgtcttaattttcgctttcgtgttctttgagtgattctggattttggcgtttcaactaaaatagggaaatataatcttatagtatttcaaatgtttgattggcaaatgtcgcttaaatattaagaaaatagtttcacccgaataatttacatatcaataaaacccgaaaagaatttcatttggcacgcataaatgaacaagtcatggagctaagtcaggttgtgtcaacaagccccggatacttgccaataattgtgtttagcagtccgccctcatgtgtcagtggctctgacactaaacaaacacttgtccaacaggatgtcagtcgacctgcaccctagtatcccgagcccatgctattgtacgctccacaatctcagtcgacggttcagtaactcctgacatggcgacgactttgcagctaattatgctggctctagtgggaggaacccttggtcaagccaataacacggaccacaagcaagtcctgacctccattgtaaaacagcttgagggcggccttgaactgcatctaaggacgtccgaagacggaggcaatgaccttgttcagtttttgatgcaagaaaagagctccatcataatcagtgcaaaacaggaggaagtaccgtcaagagcaaaaataatgagacatcattttttcatttttgatggcgtacatcaaatgcaggaaatccggactagtttgtttaacacagatggcttctacatattggctttagaaaataacacaattgaggacgatgtactattaatggagttcgcggccgatgtttggcttcagcatggacatagccggatttactacgtccaattaagcaagaaaagtgtactcctctttaatccctttttacagaggttagtggtggttcaagattccaaaacgtattcaagaatctacaaggatctggagggttaccatttgagaatatacattttcgattcagtttattcaagtgtaattggagacggcgaaaacaaagtcctaagtgtaacaggagcggatgctaaattggccaaaaccgttgcgaggcaactgaacttcacagctgattttgtttggccggatgatgaattttttggcggtcggctggcaaatggagaatatagtggcggcgtcggtcgcgctcaccgcggagaggtggacatcatctttgccggattctttattaaggactatcttactactcacatccagttcagtgcggccgtttacatggatgagctctgcttgtacgtgaaaaaagcgcagagaattccgcaatccattttgcctcttttcgctgttcacatggacgtgtggttatgctttctgctagtgggtctgctaggagccctagtctggcttattctgagagccgtaaatctaattcttggtatagaaggggtaccggatggttcacgggctacgcggattagttacttcggagcagcgcgacgcattttcgtcgacacatgggtcatttgggtgcgggtgaatgtgggtcgtttccccccctttcactcggaacgcatctttgtggcttctctgtgtctggtgagcgtgatttttggagccttgcttgagtccagtctggcaacagtttacataagacctctttactaccgagatgtaaataccttgagggaattggatgagtctggccagccaatttatataaaacatcctgcctttaaggatgatctcttctatggtcacaactcagaggtctatcgtcgattggatgccaagatgatgctggtggccgagggcgaggagcgacttattgagatggtgtcgaagagaggaggattcgccggcgtcacccgatccgccagtttgcagttgagtgacattcgatacgtgatgactaagaaagtgcacaaaatccccgagtgtcccaagaactatcacattgcctatgtgctgccgcgtccctcgccttatttagaggaggtgaatcggatcgtactgcgcctcgtggcggggggaatcgtcggcttgtggacaggggaggcgaaggagcgcgccaaatggagcatccaacggttccccgaatacttggccgaactagacgtaggacggtggaaggtgctcactttgtccgacgtccagctcgccttttacgccctcactattggatgtctactttcagctattgtttgcatggcggagattttgttgggccgtcaacgaagactgcatagtcccaagtaattaacccattaaattacgataattctattaaagtctacgtatagtgtaccgccaccggccttacctattttaaattcttgtgtcctccgatttcgacagagcagaacgccgtctcgtcgtcgctgctcacgggctgcagcctccgctgatgtggtgggtagctcgtcgtcgccaaagagacgctgcgtctcctcaagccagtcgctgatgcgcgcctgcgtggcagcctgtttttgttcgccaatgagcctctggagcaactggtccacgttgcgcggatgtcgagaagtgcccctaaccgctaactgaagtaaggagcggcgctttttagcgattaggtagaagatacggttcggataagtctgccagctcagttcgctgacgttaggcgtatcgatatcctggtcttgcacattttcttcgttttggttccggtcagtctgagggtcctgatcctcctcgtcgctgggctcttcagttggcgaactggcctcgctacacgtagatgtgtgtgtgctgcttttggagctgttctgattgtccacagtgctccaggactcaagctcgtgctgcaccaaagtgtcaaagaaggccagcattacctggtcctcgtcggtgctgcgggcactgaagtcctgcgacacatgatccgatgactcgcgatatagtgcgcgtgtgcagtagggcagggcttcggcttgggtaagggatccctcccagccctgctgggcaaagggactccacagctgtgttattgattttataattattaagagcaatttaggcctacccaaccaaccttaatgatcttctccacgccagaggaggcgagtaagcagcgttcgcgattgtatcgcacctggtttacgatggaacggtgaccagcgagaattacgggcgtagtctccatccactggttcttttcatccactgataagataacaacaataatttgaggaatctgcaagctgaatcccttagctaactcacagtccactcc

SEQ ID NO: 38306 - DNA, 1788 bp, DROSOPHILA
atgctggctctagtgggaggaacccttggtcaagccaataacacggaccacaagcaagtcctgacctccattgtaaaacagcttgagggcggccttgaactgcatctaaggacgtccgaagacggaggcaatgaccttgttcagtttttgatgcaagaaaagagctccatcataatcagtgcaaaacaggaggaagtaccgtcaagagcaaaaataatgagacatcattttttcatttttgatggcgtacatcaaatgcaggaaatccggactagtttgtttaacacagatggcttctacatattggctttagaaaataacacaattgaggacgatgtactattaatggagttcgcggccgatgtttggcttcagcatggacatagccggatttactacgtccaattaagcaagaaaagtgtactcctctttaatccctttttacagaggttagtggtggttcaagattccaaaacgtattcaagaatctacaaggatctggagggttaccatttgagaatatacattttcgattcagtttattcaagtgtaattggagacggcgaaaacaaagtcctaagtgtaacaggagcggatgctaaattggccaaaaccgttgcgaggcaactgaacttcacagctgattttgtttggccggatgatgaattttttggcggtcggctggcaaatggagaatatagtggcggcgtcggtcgcgctcaccgcggagaggtggacatcatctttgccggattctttattaaggactatcttactactcacatccagttcagtgcggccgtttacatggatgagctctgcttgtacgtgaaaaaagcgcagagaattccgcaatccattttgcctcttttcgctgttcacatggacgtgtggttatgctttctgctagtgggtctgctaggagccctagtctggcttattctgagagccgtaaatctaattcttggtatagaaggggtaccggatggttcacgggctacgcggattagttacttcggagcagcgcgacgcattttcgtcgacacatgggtcatttgggtgcgggtgaatgtgggtcgtttccccccctttcactcggaacgcatctttgtggcttctctgtgtctggtgagcgtgatttttggagccttgcttgagtccagtctggcaacagtttacataagacctctttactaccgagatgtaaataccttgagggaattggatgagtctggccagccaatttatataaaacatcctgcctttaaggatgatctcttctatggtcacaactcagaggtctatcgtcgattggatgccaagatgatgctggtggccgagggcgaggagcgacttattgagatggtgtcgaagagaggaggattcgccggcgtcacccgatccgccagtttgcagttgagtgacattcgatacgtgatgactaagaaagtgcacaaaatccccgagtgtcccaagaactatcacattgcctatgtgctgccgcgtccctcgccttatttagaggaggtgaatcggatcgtactgcgcctcgtggcggggggaatcgtcggcttgtggacaggggaggcgaaggagcgcgccaaatggagcatccaacggttccccgaatacttggccgaactagacgtaggacggtggaaggtgctcactttgtccgacgtccagctcgccttttacgccctcactattggatgtctactttcagctattgtttgcatggcggagattttgttgggccgtcaacgaagactgcatagtcccaagtaa

SEQ ID NO: 38307 - protein, 595 aa, DROSOPHILA
MLALVGGTLGQANNTDHKQVLTSIVKQLEGGLELHLRTSEDGGNDLVQFLMQEKSSIIISAKQEEVPSRAKIMRHHFFIFDGVHQMQEIRTSLFNTDGFYILALENNTIEDDVLLMEFAADVWLQHGHSRIYYVQLSKKSVLLFNPFLQRLVVVQDSKTYSRIYKDLEGYHLRIYIFDSVYSSVIGDGENKVLSVTGADAKLAKTVARQLNFTADFVWPDDEFFGGRLANGEYSGGVGRAHRGEVDIIFAGFFIKDYLTTHIQFSAAVYMDELCLYVKKAQRIPQSILPLFAVHMDVWLCFLLVGLLGALVWLILRAVNLILGIEGVPDGSRATRISYFGAARRIFVDTWVIWVRVNVGRFPPFHSERIFVASLCLVSVIFGALLESSLATVYIRPLYYRDVNTLRELDESGQPIYIKHPAFKDDLFYGHNSEVYRRLDAKMMLVAEGEERLIEMVSKRGGFAGVTRSASLQLSDIRYVMTKKVHKIPECPKNYHIAYVLPRPSPYLEEVNRIVLRLVAGGIVGLWTGEAKERAKWSIQRFPEYLAELDVGRWKVLTLSDVQLAFYALTIGCLLSAIVCMAEILLGRQRRLHSPK

SEQ ID NO: 38308 - DNA, 2333 bp, DROSOPHILA
ccgcttggccgtttctgcgaccagtgctgacatcggaggttcccgactaccatcagatcatcaaaacgcccatggatctagctaaaatcaaatccaagctaaacatgggcgcctaccagctaaacgaggagctgctcagcgacattcagttggtgtttagaaactgcgatttgtacaacgtagaaggcaacgaaatatacgagtgagtagattgggataatccgtaagtggtcttgttgtttatcctttatcttgaatccgttgcagcgctggttgtcaactagaacgattcgtgatcgatcgatgtagggacatgcagctaccgtttaggcctagcgatatgaacggggaagtcaaagcttgctgagccggacgctgatctccaccagctatcgtgtaaattagttagtctactctaagccgtagttgaaaaccatatatatttaagcacaaatattaagtgtatttaaagatctttattttcgtgcatgtcagttctaagttcagcacacgcatatgcaaaaaatccttatctgttggtttatgagactttatgtatttataaattattgtagacactacgaaaattccacaatcaataaatgaagtgaccggaaacaaacgattcaaaataaataagtaaaaaaaattgttttgttggaggtgtaaaaagctaaaattaaatgaatacaaattttaaaagagcttagctctgtataaacgcaggaaaaatgggtagatggagtttgccagtttttaaaacagacgatttgatcgcaaaaaaaaaaatattgcttaaagaacctaatttgccaaattctttcttaatcgagaaaaaagtgttggatgctgcattgttattattactttttatgaaatctaagctatgtgtgtttcactggacattaaaagtaagagtgaatagtgttttctcctataaacacatttacgcttagcaagatatttaaaaccggaatcattgctttcatatgggtacaacctacatggatgacgatgtggatgctgttgactcagtattacaattatccggaattagtccattcaaggctttgtgattttggttggacgtatgctggctgttgttgttgctctccagttggtgaaaaagaaaagaactggaggtgctgggagcctgagaaaactgggcctccatagaggtcaacgaagttgtggaggaattgtctccatcatcgtctgttcggacgctttccctttcattggaattgttgttgttattgtcgcctgacgaggtctcctcttcatcggagtcgtagctagccccggtgtcgcttgaggcgctgccctcgtccatctcggtggtgcgtggtcgaccagtcgctcttctgtgttttgtggtttgaatgagctgtcttaattttcgctttcgtgttctttgagtgattctggattttggcgtttcaactaaaatagggaaatataatcttatagtatttcaaatgtttgattggcaaatgtcgcttaaatattaagaaaatagtttcacccgaataatttacatatcaataaaacccgaaaagaatttcatttggcacgcataaatgaacaagtcatggagctaagtcaggttgtgtcaacaagccccggatacttgccaataattgtgtttagcagtccgccctcatgtgtcagtggctctgacactaaacaaacacttgtccaacaggatgtcagtcgacctgcaccctagtatcccgagcccatgctattgtacgctccacaatctcagtcgacggttcagtaactcctgacatggcgacgactttgcagctaattatgctggctctagtgggaggaacccttggtcaagccaataacacggaccacaagcaagtcctgacctccattgtaaaacagcttgagggcggccttgaactgcatctaaggacgtccgaagacggaggcaatgaccttgttcagtttttgatgcaagaaaagagctccatcataatcagtgcaaaacaggaggaagtaccgtcaagagcaaaaataatgagacatcattttttcatttttgatggcgtacatcaaatgcaggaaatccggactagtttgtttaacacagatggcttctacatattggctttagaaaataacacaattgaggacgatgtactattaatggagttcgcggccgatgtttggcttcagcatggacatagccggatttactacgtccaattaagcaagaaaagtgtactcctctttaatccctttttacagaggttagtggtggttcaagattccaaaacgtattcaagaatctacaaggatctggagggttaccatttgag

SEQ ID NO: 38309 - DNA, 333 bp, DROSOPHILA
atggacgagggcagcgcctcaagcgacaccggggctagctacgactccgatgaagaggagacctcgtcaggcgacaataacaacaacaattccaatgaaagggaaagcgtccgaacagacgatgatggagacaattcctccacaacttcgttgacctctatggaggcccagttttctcaggctcccagcacctccagttcttttctttttcaccaactggagagcaacaacaacagccagcatacgtccaaccaaaatcacaaagccttgaatggactaattccggataattgtaatactgagtcaacagcatccacatcgtcatccatgtag

SEQ ID NO: 38310 - protein, 110 aa, DROSOPHILA
MDEGSASSDTGASYDSDEEETSSGDNNNNNSNERESVRTDDDGDNSSTTSLTSMEAQFSQAPSTSSSFLFHQLESNNNSQHTSNQNHKALNGLIPDNCNTESTASTSSSM

SEQ ID NO: 38311 - DNA, 5007 bp, DROSOPHILA
gcgggagagccaggagaacttcaaacgtgcccgagactcactggagaaggttctcggctttctagagaagattggcagcgaatcttcacggccgtctccacaaggaagtcagctctttgggtgtcccagtgccagccgcagcctgcgcgagaagatcgaagcattcaacaaggtcttagaggcggcccccgagaaacttggggatacctgccgtcattttaaggagtgcttttgtagctgctgcaccttggacgagtccttcctgtctaaagggcacaatccccttcccgttgcctcgaaaacaaattcgggctacgagggggacatagacagcgaggtagagcagccggagcggtccaataacgaatcgggggcggatataagggccgatcggtaaaaaattgatattggtaaagagcaagctttaaacacaattaatacaaattagttgcatttaggagtatcttttcaatgcctagtaagaatttaaaggacgattatagaaaaaataaattttagttggtataagaaagatgtaaatccgtcaaaactacatattaaactttaaataatatacaggcaaaggcactataataatacctcttcaaattaatatttaaatacagaaaattgattttcatatcagagatatataactcaaagcaccttttgctggatttaaatcaaaacaagggaagacattaggttcgaactttatctttttacttagaagccaacgtttataatttttaaaacttcggattcttgttcttgtcctatgtacattatgttgatatccacttttatacttaaaactacgaagggttgcaagtcaactgcaaattgttgtataaaaaagcgcgagttcaggtaggtattgtcttcattgtgacttgaggtgaaaatacacattaaaatatcacactaaactacagtaatagcaattttaaaatcacgatgcatccctggaaatcctggccgcgtcgagtttctggcgaggttagcagttcgactctgcggcctggaaaaggtctgagtagttgatcgcaaagaagatggccactgctccgatagcggatcctagctgcgtgatggcgcccacccagaccagcgattgtccgccctgcgcccgcataaccgtggtgattcccagtttcgtgtagctcacaatccctaccagcaaagtccaggctgtgaccacgagtacggcaccaacggtctggtcgtgaagtggcggaagaggactcagagccgccgtggtgaaaacatagctggtcagcagacccgcaaggatagagagcaccgtgataatccgcagggaggtaaaatgcaggaacatggccatgaagcaggcaaccgggttggctatcacactgagggtggctgctaagtggtacgcttgtgatccgtacggggcactggagtaggactgtatgctgccgaacattccgttactaaacagcgaaatcgcaccgattagcaggaggaggtatgtgtactggcctttactcagcttttccgcttttggctggttatccgcctctccgtaaacgtacttgttgccctcactgacggtaacctgggcgtactcccttctggccaaggggagggaattcagaagtgcataccccacataggctagaaccatgagcgcgaaaaggataaggaagaaaacacgggtatcgaatctcggaggtgtcttccgcagcgcgtagacctcctctccgctttcggttacgttgaccagtacacagtcgccactctcgccgatgccctggatcaaagccgtcacgctgggcaggagaccactcagcccctcgccaataaagtaggtgaccatgtactgctccttgaagcgtcccatgtagggcataaaaagcaccgagctagtgcaggcatttaacgccgtgaagcaggtcagcaaaaagagggctaagctgtgatccgtgccagcgaccgaagcggtttggttgtagaagaacgccgtcagcaagcacgatatagctcccaccaggagcactccgtgaatggtccaaccatcatttagtttcttgggcgagtacttctggatggcagtgtagagcagtgggcccaagttgccaatctggaccataacgctaaggtaagagggcagactccagccctctggtgcctcgtccaccagcaggggaagctgaatgaaggtgccattgacgcccagccaggtgcctatgccaaagaagatggccagcacgtcgacgagccagctgcggtttcttagcttcgagcttatctccatatttttttgtgggcctccccagttaaggaacaagctcagctcacttttcttggcctcgagagaggagcatctgtaaaatgaataagagattagatataatctataacctatataaacagctagcaataattcaaaaattagctacctttcacattgtgaatatctagatgtaattaaacacccaatgttttcaagaatatttattaacgaaaactaattttagcatgcaactttgcacactattagtggcctaggcttatggcacccaagtcacaattacgggcttatttctctcaatggttcagataagccttaaaaagtcattatcaagcatatggcatttacagttcattatgtttgtctttcggacagataaccgagcgaatacgattaaaatggttctgtggctttacgttacattcgtgtggaatggatgtgtgtgtatataataattataaacctcacacgaatcttgtaaaaaatgtatagaatcaaccgaaagcgacagcttttcaaattaacaaaatgctgcttttgtactcccattggaggcacccattaatacatttaaaaaaaaaaagaaaacaaaaaaaaatgcacctttgatttcttttggatataccaaagtggatatatctctgtgctaatcttattttcatgtgatattaagtgtgtgccatcggtcacatacgatcttcatctaatctgctaactcaattaatttgtggccattcgatgtctgcacgtatctggctgaagacgataagaatcacaatcgggaacttggtaggcattcatttaatctctaaagagattccttaggtgagaagcaggactaaagtttctaatataactaaagggtttccactatgatgtgttgattctttttactggatatgaatacatataacttgttttacaaattcatacgatttgcaaactccaagttacagtttaactacagcaacagtgtttccaagtaaagtacaagactatggcaagaaaagctgataacaaaaatgaaaataaatacggaaaatttccaaattatctttacaccaatggttgttttatagttgctgtgtaacgatgtggtcgtaaaatataagtctgccaaatatggaaaaagggatggaaagaaagcccgcccgcagcatttaagcccgatcccaaactggttttcgctctcagcaagcgcaaataaaacgtgaaagcagtaattgctcgcttacctggcgaaatccgcgggactcggagtggcgtcgtccaacgtcgagatcacgccgtagactggccccgctggattcgtggggctaccagctcctcggcctctgtggtacctgctcatattcggagtcggagtgtgctcttcgaattgttttatgatccccgcggcgattagatttcccgatccaggccactgtggccaaacgcgcctcggttcgttattaaaaatcaacggctcaattggcgtaatgtggaatatcgaaggcaattggcaggttaattccagcgcgagccgtcaattaatgcaaagtcgaagttccaatttgaaggcctgggaagtctcaattatgcaatattccgggaagttccattgacggcgcgacacgatgagaaatgcaagagtgtccagaagaagtcgactgcaggggagaacaaccagctttcgcaaattttgtcagccatttgaacactcaaaagtggaatttgatttaataaacatcggatcggaaggcaagaataaaactgacagtcgaacagctgttcgtccggcgaaaaaataccgaatccatcgcacgtgcgacagagcgagagcgtgactaagataagagaacattttaaagtactgctggctctctttatagagcgcaactgttttgttatgggtttggaacttataaattgtgttcctagaagagtatattagttagcaagctcgcttggcattcgccatttaaaagctacattttagcattccatttttatagtttcgctgtaacatagaaaaggcatagatgttttctcaacaaagctaccacttcaaaaccaactgtgcattttttatactgttcaacagagactttaattaaagcggaaagaaataaacaccagtatgtgaaaaccaatcccccagaaacccaaatgaatgcataaatgttctcctccagctgcagcacttgaaacgcttgtcacgcagtgctacccacccccgcaagttgacttggttgcttagttcgagcagagctggcggtaccagcttttgctctccctgcactttggattggagcacatgggacaacgcatgaggaacttggggttgactgcctgctgggacttcaggtggtctgccacaacgtttgtcagggcgtcgatgaacagcgggtggtcgttgggggttgcagctcgacggatttcctctacgcctacctccttggccagttcgtcgcagtactcgatgtcgagctcatgcagcgtctcgatgtgctcgttcacgaaggcaatgggcacaaggatgaagttcttcaggccttgcttaacatagccctgtaaagatgggattggttttagtggatgggaatggaaatccggcattaaagttacaccttaatggcatcatcagttgcgggcgccagccagggtagcgggcccaccttggattgccatgccaggctgtagggattcgtctgaccaagttcctgcatcaccatgtgtacgctagcaccaat

SEQ ID NO: 38312 - DNA, 1845 bp, DROSOPHILA
ccgatgtttattaaatcaaattccacttttgagtgttcaaatggctgacaaaatttgcgaaagctggttgttctcccctgcagtcgacttcttctggacactcttgcatttctcatcgtgtcgcgccgtcaatggaacttcccggaatattgcataattgagacttcccaggccttcaaattggaacttcgactttgcattaattgacggctcgcgctggaattaacctgccaattgccttcgatattccacattacgccaattgagccgttgatttttaataacgaaccgaggcgcgtttggccacagtggcctggatcgggaaatctaatcgccgcggggatcataaaacaattcgaagagcacactccgactccgaatatgagcaggtaccacagaggccgaggagctggtagccccacgaatccagcggggccagtctacggcgtgatctcgacgttggacgacgccactccgagtcccgcggatttcgccagatgctcctctctcgaggccaagaaaagtgagctgagcttgttccttaactggggaggcccacaaaaaaatatggagataagctcgaagctaagaaaccgcagctggctcgtcgacgtgctggccatcttctttggcataggcacctggctgggcgtcaatggcaccttcattcagcttcccctgctggtggacgaggcaccagagggctggagtctgccctcttaccttagcgttatggtccagattggcaacttgggcccactgctctacactgccatccagaagtactcgcccaagaaactaaatgatggttggaccattcacggagtgctcctggtgggagctatatcgtgcttgctgacggcgttcttctacaaccaaaccgcttcggtcgctggcacggatcacagcttagccctctttttgctgacctgcttcacggcgttaaatgcctgcactagctcggtgctttttatgccctacatgggacgcttcaaggagcagtacatggtcacctactttattggcgaggggctgagtggtctcctgcccagcgtgacggctttgatccagggcatcggcgagagtggcgactgtgtactggtcaacgtaaccgaaagcggagaggaggtctacgcgctgcggaagacacctccgagattcgatacccgtgttttcttccttatccttttcgcgctcatggttctagcctatgtggggtatgcacttctgaattccctccccttggccagaagggagtacgcccaggttaccgtcagtgagggcaacaagtacgtttacggagaggcggataaccagccaaaagcggaaaagctgagtaaaggccagtacacatacctcctcctgctaatcggtgcgatttcgctgtttagtaacggaatgttcggcagcatacagtcctactccagtgccccgtacggatcacaagcgtaccacttagcagccaccctcagtgtgatagccaacccggttgcctgcttcatggccatgttcctgcattttacctccctgcggattatcacggtgctctctatccttgcgggtctgctgaccagctatgttttcaccacggcggctctgagtcctcttccgccacttcacgaccagaccgttggtgccgtactcgtggtcacagcctggactttgctggtagggattgtgagctacacgaaactgggaatcaccacggttatgcgggcgcagggcggacaatcgctggtctgggtgggcgccatcacgcagctaggatccgctatcggagcagtggccatcttctttgcgatcaactactcagaccttttccaggccgcagagtcgaactgctaa

SEQ ID NO: 38313 - protein, 425 aa, DROSOPHILA
MEISSKLRNRSWLVDVLAIFFGIGTWLGVNGTFIQLPLLVDEAPEGWSLPSYLSVMVQIGNLGPLLYTAIQKYSPKKLNDGWTIHGVLLVGAISCLLTAFFYNQTASVAGTDHSLALFLLTCFTALNACTSSVLFMPYMGRFKEQYMVTYFIGEGLSGLLPSVTALIQGIGESGDCVLVNVTESGEEVYALRKTPPRFDTRVFFLILFALMVLAYVGYALLNSLPLARREYAQVTVSEGNKYVYGEADNQPKAEKLSKGQYTYLLLLIGAISLFSNGMFGSIQSYSSAPYGSQAYHLAATLSVIANPVACFMAMFLHFTSLRIITVLSILAGLLTSYVFTTAALSPLPPLHDQTVGAVLVVTAWTLLVGIVSYTKLGITTVMRAQGGQSLVWVGAITQLGSAIGAVAIFFAINYSDLFQAAESNC

SEQ ID NO: 38314 - DNA, 4282 bp, DROSOPHILA
gaaaaaacgaatcagaaatattgacttttttcataaaatcgatccatgtctttttttgttaaaaaattatccaattttttatcagaacattccaaataatgctccaaatattgaatgtcatacctcgttgagtttgtaattaaatttcaaatttaactgagttaaaaaatggaaattctatttttcatccattttttgcaaattttcatgatgttaccccttaccaaaaatgcaaaatattgccaaaaaattattttttcaaaatccttctaaaagtgatacggaacgttagcactgttaataagctgttattcgttcatatatatgatcatttttaaccaagttatgccgaaaatacatctaataattttaatatgcctgtgttttgttttataccaataaagtcaaagataagccatttcccagaaagctacttgataaagaggcagaaaacccagagcgataaatagatttagtttagcccgtttccaattcctttgtaatacaaagtccgtgtgtgttttgaaaataattataaaaaattatacgatcgtactgatcgatttaattggcctctggtcgttctccttgtgccactcaatggttcggcgacagttcgatgaacttgagacggagtcactggattgcgattataaaaatgccatcgattgtcggcccaaatagacaaatagactagactttccattagccattagtttgggattgggttgggatcccaatcgcattcagctcggacacttcctgatgcaaccttgctatgccactgcatttcattgatgtgcattgtgaatgggctgcgaagcgtgtaactaaatgcgaattcagctaattacgcaggcatccttagcgagggcggatcgttgagttcagtgaaataacatctttcgagaaaattcgtcgtcctgtgccatttgtcatgtgcataaatttcatttagaaaaattatgaaatttcctctagcactcacattccagcttatatgtacatggtaattgtatttgccaagtcataaaaacccaacccaacccagttcaagttcaacccacccaaaaagaagtgaacgtcacttacttattaatagctctcgattgtataccagtttaaagagacatatgtatgtatatatcttgctgaatatcttgctaaaatgtagaactttccttcagttttcgcaacacaagaccttggccagttctcaattccagttctcattaagatcgcttgtgcaagactcatccaacttgttggttggtaggaacttgtgtggcaacctagcctgaatatcgccgaacttggttccgcattgggccagtttttttttagttttgggcctttgttaaaggttttttagccgatttgcagcttaacgtttttgcagggggtgtttgttccctgcatttaattgccaactgacaattgtttaccaaagctcagctacacttgactggttagacttgttctacgcgaatgtcatgtcaactttctttcggcaatcgtcgagaatcgggtttttgtttcatattctgtttttcagtttatcagtttttccactaacatgtggcccacttcgtgctcaagcactcatctacatttatgtgaacggcaacggggcgtatgcgcaatgccggtgtagcaattgtcggtgatttgtttgtgagattgaacacttgcaacgcaatgccagccgcaactgcgcagcaattcaacagagaaaaaaaaactaaaatatagcttacagaactatttcatagagataattataccatctatgaatttagcctagtatgattttaaagtatattctctttttaataatgagccacattatcatttgactcatatcatactagttagtatgtcctcatggcttttccaatgtttacgaaagtatatcttatcaataggtgggtaacttcgcttttttccgcagtgcaacatttatttgctgtcattaactgctacttagttcaatggttttatctacagacattgacttcggtcatgagtgtataggctatatatagaccttcctgctggctgatgcattaacgcgccttgaatcatcctcaagttggcacttgtttttcagtcttggccaaaacgtcgaacgtttttccaacctttttctttttagccggaagttggcgaagccatagttttgttgttttttttttttttttttaacctggccaattcgtgatcgtatatgggcatgccatcacgtagttaatagaaagtggacaggcccaaaagcgtacctatcccactccccacagcccctcctcatcatctacattcactatatcacctggtacttggaccattgaaatgtatatgtatttgtaattgcggcttacagttgcggtcaaattaatggcactacaaatcgcagaggaaagctcactgatgagcaaagtaattgatatgtagaatgcaaatagcatttgttgaaggtaaaagctttttttcacttagtcattgattcatcgctagtttagtttctaattgtttttgagatataagtagaaatgtgtcataaatcagtggcataacaaatgtgaatactgttctaaagagaaaacgatgagaagtggaaacttgaagaagatatgaacaaaacaataaactttattgttaacaattcagcaatagttttgtttgtgccaataattttgaccaaaaactgtgtgtaatccgctgccccacattgtaattatccattgttattttaagcgattatttagcgagtaaacctaacaatactattttccgctctgcaaaatccccgcccccttcaaccgacctcccgcctttctccctctctctctctctctttctctgttggtctatattctccaaatctctgtctctcgctctggagaaaagctcgccaatgcgcgatcatacggcgttttgaagagtttgagaagctcggcacgttatgccaaggccaaatccaagtcggccattaatctcaatgcccatctgaagaagcagcagaagctggaggaaggacatcccgaaaagaagaggcaggataagaaaatactcagacagagtgtcagtgaggatcagccgatctatgcgaatgtggacgaggttataccgatccatttagaaccggaaaccggaaccgaagtcgatgctctaatgggtaatgcacaggtaagcggacccaaaaaccccggaactcagctccagaccaccagttccatctgcatccggctccattgcatcccatccaacaaaataccgaactaaacagatatccagatatcagatctacggatccatttgtttagcaaaacaatcgagagctgaaattaaatttattacgtgcccgcccttcactttaccacccccattaaaaatcccacttttcggtgtgaattggttgcgattgttaaacccgtttgtccaatggcatttagcagccaagtgcaagttgttcaacaatgcaaatcatatagccgagcagtaagctaacgagtaccaggcaaataaacccactgaatcgaatatagaaccaaaacttgagtgtactcttgagatatgattgattttgctgctgaaaaagtataaaattaagttgacaaagcactaagccaagataaaaagcgtaaaatttaggcaattttgtttatagccacaaatattcttcgaatatcgtaaaaatactttattatactataaataaatctgtagagatttcacatatctacccactgtatttcaaataatgtactgcatacttatcggcgactaaaaatattgattaattgcccaagtgtgtctatctttaaaactacttttttcaattactcgccgagtttaagactaattagtaagttaatttaaacacaaatcttcttataaacacagtagatatgcctagataaggtgtgaaaactgactgaggtttgcagctaagctaaacaatggtgctggaactggctaagcaaatggaaaagctacaaatattttcaaacgatactttcaaaacttcccaccttccgcttcgtggtgttagtttgaattaaaggctagaaattaattaattatgaatcggtgctggttactccattaaacttcagtcgctcattaaccccagcccaacttaacttaacctccgactaatttatgtacaaactatgttctatatttttctcacctgcaggtaagcaccgctgcaacggtaatccgtctaaagtttatttttctccgcaactcgcaaattctcagaccaacaacaatgacaagt

SEQ ID NO: 38315 - DNA, 351 bp, DROSOPHILA
atgtacatgagtttgagaagctcggcacgttatgccaaggccaaatccaagtcggccattaatctcaatgcccatctgaagaagcagcagaagctggaggaaggacatcccgaaaagaagaggcaggataagaaaatactcagacagagtgtcagtgaggatcagccgatctatgcgaatgtggacgaggttataccgatccatttagaaccggaaaccggaaccgaagtcgatgctctaatgggtaatgcacaggtaagcggacccaaaaaccccggaactcagctccagaccaccagttccatctgcatccggctccattgcatcccatccaacaaaataccgaactaa

SEQ ID NO: 38316 - protein, 116 aa, DROSOPHILA
MYMSLRSSARYAKAKSKSAINLNAHLKKQQKLEEGHPEKKRQDKKILRQSVSEDQPIYANVDEVIPIHLEPETGTEVDALMGNAQVSGPKNPGTQLQTTSSICIRLHCIPSNKIPN

SEQ ID NO: 38317 - DNA, 5020 bp, DROSOPHILA
tttcaaggagagaatatatcttgattttttttaacatttgatcgactaaccattttcatatttttcgccataaaaaaaccgtttttaatttgttagctttagccctatattattttatttgatttatgccctgattggcttcaagggtttattttaatcgtttagttttatatcaaacaaatcgatccactttagttttacgaacttagctaacctgctcttgactaaatgctaatcccaaggacaggcctttgcattaagcattaagctatgtaatctacgagtaaagattgtattaattttatatatatatattttttttttattatgttaactaccaattacagtttatgtttagcctccagttgagtcatttaccatttatcgatcctgcacattaattgtagcgctggtcctcataaataaagcaacatattgttatttcattattatcattttttttttattgcatatgcataatggaacgacatacatatgtataaatatatattattatattcaacatgcgaaatcacaaaaagtttttttttctcgtttataattacatttaataaattaaaagtctacatacatatatatatatatatttgtaaaatattaaaaacaaaaaattcattacgcatatcttgtataaatattcatcagagtttctgtgtacatcaactctagtaatatcgaaaatcgtgtattatttatcgccgagggaaggaaaatgtttcaactcactggttttgagtgccatcaacttttatttttaataaaagttaccattaagaataatagcagacaatctaaagaatcgatttttatagcaaaagtacatttacattttgcctatataaatagtattcagatatgtttatatattttaaaaacattatatattgatcagttgtaaggaagaaagtcttccacttgcttcctaagtttgttaacccagcgatgatagcaccattgcgcctgcacttttcagctccgctcagttaccactggtggcctccacttggccaactgctgctccagcgctatccaggcagcgcagcttctggtacatttgaatatagtgggcctgcaactgcttctggtagcccagcactttgtccttctcggcgctccactgacgcttctccagctcgagattcagacgaaagtcgtccagtttctggcgcagcttggctatatcctccgcatacgtggtggactcctcgatgagcgtgtccagcgtttgctgcgtaccctgtccctggtccaattgcaatcgctgcaccagcacatccaacttgggcagctcctgggcacagcttggtgttgctacgtgtgctgccggcgatggtgctggtggtgccacttgtgctgctggcgatgctactgctgttggtgatgcggatgttgttgtgtactttcgtgtcttctggcaaatctcgtttagattgtccagctgctgcttgagacgagtgtatcggccgcagggctcctcgccgtactcgtgggcaatggccagatcggagagctccttgcgcaacttggccagctcgctggtcagagctccaatcacctgatccttcagcgtgatgatcttctgcagttgctgctggtcgggctgatgttgttgcttgagttgctgttgctgctgttgctgctgttgttgctgttgctgttgctgttgctgttgctgttgctgttgctgttgctgttgctgttgctgttgctgctgctgttgctgttgctgcaactctggatgctgttgctgctgctgctcctctttcgcctgctgctttggttgactttggcttgtgtttgtgtcacaggacttgttgctgttgctgttgctgctgctgctgctcctgttgctgctgtgcttcaggctgacaatcgcatgatccttcatgttgatttccagctaaaacaacataaataatatatcaattttcccctattaatgcctgcttaacatacatgcgcctccttgagctgcgtcttgagtaaagctatctccccgttgcgctcgcagacgcgccactcgctgtcctccagctggtgacgcagtgcgtccacctgctgttgcagcccctggctggagtctctggccaaatcgagctgctgctgcagccgattgacctgctccgattggcgcagcttgtgctgcttcagctggaactgctgcagtccgagtagctgctccatcttgcgcagcttcagttgacactcccgctgctgaccctcgtagaagagccgcaaacgctgcgtctcgtgctcccagtacacctccttgtcctaaacgaaagtacacatatgccaatataggagagggtattaaaaaacatgatttcaatgggcgggcggtacggcctgcttaaccttttgaacttggaaaattactttctcattgtgctccatggcctgtcgcaggtacgagagctccgaatcgcgatccttcagcgccgcctccagttccgagatcccagaatccgacggcgagggcgtcaagtcgctgctgcccaccacagtgccgctgctcttgctgttcaatcgattgttaatcagatattagtaacgaatcttaaagttactgcatatatagccaacctgctggcaccatcgggtctgtcgtggctgcccgtgctcaagaggtcaagggtcagggcgtcctcgttactgcaacgctgcagcaggcgatgatttcgtcgtcgagcggccaagtgtcgtaggtcagtggtacctttaagataatgcatttcaaaaacaaaaatatatatatcttatttgaagtttttttttttatattttctttgtatttttctctttaattctagcccaatcttgtccatttaaactttaaaatttaaacacgtagataatttataatttatggcttgcaaatggccccaatgtcaggtgagcatttaatctagatagagcggaatgttaactgctactcactgccaaatttctgggccgatgcggtgggcagtggggcaagtgacggcgtcgatccgtagccgtaccgctcggccgccacgccccccgcctgcccgccctccgtcggcagctgcagcgactgatgttgttgttgatgttgatgttgatgttgctgttgatgctgctgctgctgttggtgttgcagctgcaactgttgctgctgctgctgctgctgctgctgttgctgctgttgttgcaactgcagttgctgctgatgctgctgctgctgctggcaggcgatgcggtagtccggctcaaatggaatgggcttgaaggcaatgggtcgcagaaagttgccgctggtctgggggaaaggcaaatcgattagttggaaacccaaactcaaatggggtcaaagttgaagtataattaattagtactttttttcccccgtgtagctgagagcctcacctgttccgcctcgcccatttgttgctgttgctggtggcgacttccgccggcaatgggcgtggtgcgcctctgctgctgctgctgatgttgctgcggcaatgttgctggcagagattgcattgcctcctcctcggccgcgccccctctgccatcgccgcccccgccgcccacacaactgcgactcagctcgaacatttgtcgtatattctggaacttgctgcgcatctgcaggcccatgcccatgcccatgcccacgccaatgcccacaccctcatcatccaagttgctgtgactcccgaacttttggctcagacgacgctgctcctggcgcgacttcaatgtgcccgtgtgaaagccctgcgagtgtccttgcccaggcgcagcctggccaaattgcagcagcggcgagcccagcgaggattgacccatgctaggtgtgctgcgcagtgccagtggtgcattattctccagcgaaacgctgcgcttgtggccacgcttgcccgacggcaggctaagattggagcacccactgccccccagcaccggcggtgtgccgggcggcgggacgacggcgtgagccggcattgccatgtgcgtggcagccgacatcctgatcccgaagagatccctgaaaacatataaatggagcaaaggttagtggggattgtttttgaaacttgaataatatgaatatatgtctgaagagaatttcagttcttaacaaaagttgcataattggatagtaactctaaaacaatggatctcatttcctcttttacttcaggctccaagcggggtttccacttgtcgaggtcaccttttgaccactcgctcctatttatcttcgagatcttaagagttctcacatcgccacatcgtttccttaaccgatcggtgaccttgacagtcattgacagtttcgatcgagcattcaagcaaattaataagacaaaagcgaaatgggcgaatgaataaattaatggtgttcaatttatttagctaatgatgctgaccaaataggaaagaatcataaaatcatatcattttcgaatttggtcttcttattccggaaatcttctccaaatcctttgattagattttatgagctttcgtaaaaataaagaagattttccaccatttccaatgcattttgtaactcttcgttgaagattctactgttttcttctgagagtctttcattgctttccctgtcgtcttctcgattcttctactgtaaggctatttttaaaactccttccctaatgacaacctcctaaatgtggacattattttaaattagttttgaagagtgctgtaaacacgtttcgcccgcttccttctgctagaattgctcgtactctttcttctcaatctttcgctagctctttctctcgttctcgattcttctgaaagcagcgggcatattccctggggctatattttctgggttcgttccattttcgcacgctactcgctagcggttcgagtgcttttttggtggtccacgatggccaaggagacggagatggcgatggcaatggcgatggcaatggcgatggagtgatggtgatggagacccccctggaaaaaaaccagctgccattagtgg

SEQ ID NO: 38318 - DNA, 2466 bp, DROSOPHILA
atgtcggctgccacgcacatggcaatgccggctcacgccgtcgtcccgccgcccggcacaccgccggtgctggggggcagtgggtgctccaatcttagcctgccgtcgggcaagcgtggccacaagcgcagcgtttcgctggagaataatgcaccactggcactgcgcagcacacctagcatgggtcaatcctcgctgggctcgccgctgctgcaatttggccaggctgcgcctgggcaaggacactcgcagggctttcacacgggcacattgaagtcgcgccaggagcagcgtcgtctgagccaaaagttcgggagtcacagcaacttggatgatgagggtgtgggcattggcgtgggcatgggcatgggcatgggcctgcagatgcgcagcaagttccagaatatacgacaaatgttcgagctgagtcgcagttgtgtgggcggcgggggcggcgatggcagagggggcgcggccgaggaggaggcaatgcaatctctgccagcaacattgccgcagcaacatcagcagcagcagcagaggcgcaccacgcccattgccggcggaagtcgccaccagcaacagcaacaaatgggcgaggcggaacagaccagcggcaactttctgcgacccattgccttcaagcccattccatttgagccggactaccgcatcgcctgccagcagcagcagcagcatcagcagcaactgcagttgcaacaacagcagcaacagcagcagcagcagcagcagcagcaacagttgcagctgcaacaccaacagcagcagcagcatcaacagcaacatcaacatcaacatcaacaacaacatcagtcgctgcagctgccgacggagggcgggcaggcggggggcgtggcggccgagcggtacggctacggatcgacgccgtcacttgccccactgcccaccgcatcggcccagaaatttggcagtaccactgacctacgacacttggccgctcgacgacgaaatcatcgcctgctgcagcgttgcagtaacgaggacgccctgacccttgacctcttgagcacgggcagccacgacagacccgatggtgccagcagcaagagcagcggcactgtggtgggcagcagcgacttgacgccctcgccgtcggattctgggatctcggaactggaggcggcgctgaaggatcgcgattcggagctctcgtacctgcgacaggccatggagcacaatgagaaagacaaggaggtgtactgggagcacgagacgcagcgtttgcggctcttctacgagggtcagcagcgggagtgtcaactgaagctgcgcaagatggagcagctactcggactgcagcagttccagctgaagcagcacaagctgcgccaatcggagcaggtcaatcggctgcagcagcagctcgatttggccagagactccagccaggggctgcaacagcaggtggacgcactgcgtcaccagctggaggacagcgagtggcgcgtctgcgagcgcaacggggagatagctttactcaagacgcagctcaaggaggcgcatctggaaatcaacatgaaggatcatgcgattgtcagcctgaagcacagcagcaacaggagcagcagcagcagcaacagcaacagcaacaagtcctgtgacacaaacacaagccaaagtcaaccaaagcagcaggcgaaagaggagcagcagcagcaacagcatccagagttgcagcaacagcaacagcagcagcaacagcaacagcaacagcaacagcaacagcaacagcaacagcaacagcaacagcaacagcaacaacagcagcaacagcagcaacagcaactcaagcaacaacatcagcccgaccagcagcaactgcagaagatcatcacgctgaaggatcaggtgattggagctctgaccagcgagctggccaagttgcgcaaggagctctccgatctggccattgcccacgagtacggcgaggagccctgcggccgatacactcgtctcaagcagcagctggacaatctaaacgagatttgccagaagacacgaaagtacacaacaacatccgcatcaccaacagcagtagcatcgccagcagcacaagtggcaccaccagcaccatcgccggcagcacacgtagcaacaccaagctgtgcccaggagctgcccaagttggatgtgctggtgcagcgattgcaattggaccagggacagggtacgcagcaaacgctggacacgctcatcgaggagtccaccacgtatgcggaggatatagccaagctgcgccagaaactggacgactttcgtctgaatctcgagctggagaagcgtcagtggagcgccgagaaggacaaagtgctgggctaccagaagcagttgcaggcccactatattcaaatgtaccagaagctgcgctgcctggatagcgctggagcagcagttggccaagtggaggccaccagtggtaactga

SEQ ID NO: 38319 - protein, 821 aa, DROSOPHILA
MSAATHMAMPAHAVVPPPGTPPVLGGSGCSNLSLPSGKRGHKRSVSLENNAPLALRSTPSMGQSSLGSPLLQFGQAAPGQGHSQGFHTGTLKSRQEQRRLSQKFGSHSNLDDEGVGIGVGMGMGMGLQMRSKFQNIRQMFELSRSCVGGGGGDGRGGAAEEEAMQSLPATLPQQHQQQQQRRTTPIAGGSRHQQQQQMGEAEQTSGNFLRPIAFKPIPFEPDYRIACQQQQQHQQQLQLQQQQQQQQQQQQQQQLQLQHQQQQQHQQQHQHQHQQQHQSLQLPTEGGQAGGVAAERYGYGSTPSLAPLPTASAQKFGSTTDLRHLAARRRNHRLLQRCSNEDALTLDLLSTGSHDRPDGASSKSSGTVVGSSDLTPSPSDSGISELEAALKDRDSELSYLRQAMEHNEKDKEVYWEHETQRLRLFYEGQQRECQLKLRKMEQLLGLQQFQLKQHKLRQSEQVNRLQQQLDLARDSSQGLQQQVDALRHQLEDSEWRVCERNGEIALLKTQLKEAHLEINMKDHAIVSLKHSSNRSSSSSNSNSNKSCDTNTSQSQPKQQAKEEQQQQQHPELQQQQQQQQQQQQQQQQQQQQQQQQQQQQQQQQQQQQQLKQQHQPDQQQLQKIITLKDQVIGALTSELAKLRKELSDLAIAHEYGEEPCGRYTRLKQQLDNLNEICQKTRKYTTTSASPTAVASPAAQVAPPAPSPAAHVATPSCAQELPKLDVLVQRLQLDQGQGTQQTLDTLIEESTTYAEDIAKLRQKLDDFRLNLELEKRQWSAEKDKVLGYQKQLQAHYIQMYQKLRCLDSAGAAVGQVEATSGN

SEQ ID NO: 38320 - DNA, 2354 bp, DROSOPHILA
ccaacggtgccggccacaatcaccggatggagggacaagttaccaaccgtctcgtatagcacaatgcaggcgatggcgatggcctggcggatgagagaaagatcagacgatatgattagcagtgttgtgaaactttataggaagcaaatctagaactaaatagtttcttgacgcttttttgtttttactcgaatgaaaatggtctcaaagctaaaagaataactgttttaagcagctaattatcaatactaactatacctataagatttgggcggatttgttaaaattaatttttggataattttttgattatttttttaaggtgtaacatcgtcaaaatatgccaaaaatggccaaaaaatagaatttccatttttgaacacagttcgactggaaatttaaatacaaactcaacgatatataacattccatattcagacaattactttttgtgttgtggcaaaaaaacgaaataatttatgacgaaaatttgtctattcgcaaaatgatatattttcaaagaggactttcttcataacttggctaaaaatggtcctaaagctaaaagaaaagctgttttaagcagctaattaacaatactaaccatgcctttcacttttcgaaggatctagaaaaattaatttttggccaaattttcgcattttttgtaaggggtaacatcatcaaaatttgcaaaaaaggtcaaaaatttaaaattcccaaatttgaatgcaaatcgattgggatttaaaaaacaaactcaacgagatataacattccacatttggacaataatttcaatttttatcgacaaaatactgattattattaaccaaaatctgggaatcccaagattcgaaacttataagctatttcaatacaaatatggatttatgtttgataaatttattttattctgcacaggtttgaagcttcccacatatgaaacccttggcacaatttaagtttgcattttttttttagatagaatacttaatacttaatagaagccaacacaacgaaaatgtcgcccgcgaatggcgccattggccaggctcaaaatcccggaggccagcagcaactgcctctcctcctgcgacttgcagtagcccagccactgggcaaggataatggtgccagcggcaccaaaaaggaagaagccaccgatcgagaagagtatatcgaggcgcttgtccaccacagtgccgctcacatgacctgaaaacatatccacctcataaacggtagccagattgcttgctttcagggttttacctgttgctatcacaaagcaggtgattagataaccaatcaaggtgccatggaccaacaacgcgtgccgtatgaatgtcatgtccgaaatgctctcaatcaggataatgctcgtcacgatgaagacctgcgagttaaggactcgatgctcaaaaccttcggatgaacaagttcacagacggacaaactaacggacaaacttacggacaaacttacggacaaatttacggacaaataaaacggacacacagacaagctgaaaagtcaaaagttggcatagatcttctagagagtggcattccatagaggaatcactagatgcagtagaaaggagctcactttagttataccagaatataaaaactttcacctaaaagttatgggtagttcttcaattctgcctcaatcctatcaaaccaaaattaatcacttttggccaacgccaaaagctgtcggaaaaggcgaactgataattttaaccacatcgtgtgcttaatggccttaatttcaggccatatgcttctgcactttgtgctttttttttctgtttttggctgtctgctaaaaaaaaaaaaaaaaacaaacactaagtttcgctaagtttcgagtccagccatttttgcgtcaaacatgtcaagcggaaatatgaattttagaaccttaaatttgcaaatccacaaaagtctatagattgcttttaaaccgattagttgtaagcataatttgaaaaagaaaaatgtttgctatgctgagattcttcaatcgaagtcataaataaagtgcactacttaatgagcttgtcacatttgaagccaccagaagccactcacttcacacttatcgccatggtaatgggcgggtgaaaagtggcggaattagaattagaattcgaacccatccccccattcacccattcagccattcacttatcaaatgtgaaaattattccgatattgccgggcgacaaagtgacagcgacagatattggggttttatggcgataaattgacgggccatcgagggccaatacgacaatgtgacaatgtgacagtgggccatcgctaagtgcgacacacccgtgg

SEQ ID NO: 38321 - DNA, 354 bp, DROSOPHILA
atgacattcatacggcacgcgttgttggtccatggcaccttgattggttatctaatcacctgctttgtgatagcaacaggtaaaaccctgaaagcaagcaatctggctaccgtttatgaggtggatatgttttcaggtcatgtgagcggcactgtggtggacaagcgcctcgatatactcttctcgatcggtggcttcttcctttttggtgccgctggcaccattatccttgcccagtggctgggctactgcaagtcgcaggaggagaggcagttgctgctggcctccgggattttgagcctggccaatggcgccattcgcgggcgacattttcgttgtgttggcttctattaa

SEQ ID NO: 38322 - protein, 117 aa, DROSOPHILA
MTFIRHALLVHGTLIGYLITCFVIATGKTLKASNLATVYEVDMFSGHVSGTVVDKRLDILFSIGGFFLFGAAGTIILAQWLGYCKSQEERQLLLASGILSLANGAIRGRHFRCVGFY

SEQ ID NO: 38323 - DNA, 2966 bp, DROSOPHILA
acatgctcaagtacagtaagtcatttataatagtttactttgttgttaattcaattgagtttgtctaggtataaacatttaaaaattttgaaaaatatttacttctgatttaagttgcgtttttttttttttgttaatttgtaattcctttttttcttttcgttttgctttttatgcactatgtttcgatttaagttttaagacgacgaaaaatggaaaagagatgcatgatattttgtatttgtattaattggtatttatttgtttttaacctgagataaaaacaaatttatattgtttgtatgtttgcaagcaagcgacgacgattgacaaaaaatttgtagcaatttgttgcatttagtttggtgtatgtagttggttggccgctggcccctagtctattatataatataatataatataatatatatagtatataataatatagtatatatatatatatttgtatccgtaaccataaccgtaaacgtatctgcatctgtatctttatcttgatctctagctgctcctgcttgtataactatgatatatgtatatgtatgtatatagtaaatgcgctaaatgtataatatagttggtatatgtatatgtatatagagctatgtatgtatgttaatcatgcgtgtatatgtatatgactgcgctggtttggcattgggatctacgaatggcagaggataaaacttaacttagttgagcgaaatttgcttgactctccaattcaattcaattcgattcgaatcgattcgattccaaatcttatctatcatatcgaatcaaaatccaggatttaatattttggataggaaaggaccaactaacgcggcaaggggtatgtacacagttctcttcgcgtcctttgttcatttgtttttgtttttgtttgtttgtttttttttttttgtttttggggtgcagaatatcacatagtcagacatctatatatatacgactacaagttctccgggcaacctccgccttagacatgcagcgtagaggcgtccattgagttcctcgagctgctcgaactgcgacctatcaacgttgccgtgtccgcactgtccgcatccagagggaatcgcttgcgctgcggacgcaggaagaggaacatgaccagcagggccaggaagaaggccagcgccccgaaggccggataaaccacaccgcccagttcgctgggcgtgggcagtgcactgattatatacacacgatccgtgggccgcgggatgcgaatgtgctgcgagtgctccaaggcatcagtatgatccactggctgctccaaatgctgccgctggatactcgatttactggtcgtcgtggtcgttgttgtgcccaccaactggctggtgtccacatttagcttgatcgaacgtcgcatcagacccgtgagctattcaattgaaatcggaagaaagcatataagtatatagtcaatggatgttgaagtacgtaatagactactttaaagataatttcttcttaactctataagcataagcataaaaactctttcgctttgtttgtgccagaaatctcttaatagattagataagaagttgtagataagaaagcatcttgcatacttaaaccgcattgagttaatccttagtttaaactagtttcgagtaaaatttcttttatttagccgcatcattactaccatttaccatcaaataaagatattaaatataaatatatactcaacaatagtaagatattaactattaaacctagtgcttaacttagtcccatgcacttcttatcacaagatatcaatctaattgaaaggactcaccttgtgcttgcacttgacctggatgttgtagacggtgtccggccacaaggagagttccgcccgtgcggtgtccgttagcagattgccgatgagcccgccgccggacacttcccaggtgatgaggcactggcgcgaggcattcgctatcatctcatcccagccgatgtccgttaggacgagcgactcctggcgctgggccttcaggatacgcaactcgaatggtgccaccagcttttggcagcactgtggtgatgtgtacaggattcgtggattgccaacgatgcggtggagcacaaggacaacgccccaggcaggacacgaaacggtaaggttggataaggttgaaaaaagatggagaaggtgaagagaaaggagggtaaagttagctatttgtcaattatttcttgtaattatgtgacgcgcccgcaggtaggcaatgaaatttgttcatccttcgagttgccacttttcgcccccgggcgacaacgtttaacccattaagcctggctgctttcgtttggcataattcatgttcttgccgtgtaagtgcctaaaaatgtttacgcacgacaatttggcagtggcaaaggcaacacaggaacacaacccttttttcagccggcttgcgataataaatgtagatttaatttcgggcatttaaaaagatgcttctccagagaaattttacaaaattgccaaaaatttctaacaaaaatttaagtcggtatggcaaataaagttgaatgcttgcaatgaaaatgatttaaatttaagggattttttacgatagacataaaaacttgagggatttgtttgtgatttgatcaaatgctcatcacatttccactgaattatcattagattataattcagttaaactatacgaagtggactgctgagaattccggcgtttttttcttttttggctgttttgagccggcattaatgggttaatgacatcgttaggctgtcgcacaaaagacaaacatgaatgggagatacttacgtttgtgcaatcaacggaatccttacaataatgccagtccttggaaagctgcaagcagagacgataggacaaagttagttagtgggcgtggcctaatcgaattttaagtaagctagcaaaaagtaatcaggcccaagaccccgg

SEQ ID NO: 38324 - DNA, 561 bp, DROSOPHILA
atgatagcgaatgcctcgcgccagtgcctcatcacctgggaagtgtccggcggcgggctcatcggcaatctgctaacggacaccgcacgggcggaactctccttgtggccggacaccgtctacaacatccaggtcaagtgcaagcacaagctcacgggtctgatgcgacgttcgatcaagctaaatgtggacaccagccagttggtgggcacaacaacgaccacgacgaccagtaaatcgagtatccagcggcagcatttggagcagccagtggatcatactgatgccttggagcactcgcagcacattcgcatcccgcggcccacggatcgtgtgtatataatcagtgcactgcccacgcccagcgaactgggcggtgtggtttatccggccttcggggcgctggccttcttcctggccctgctggtcatgttcctcttcctgcgtccgcagcgcaagcgattccctctggatgcggacagtgcggacacggcaacgttgataggtcgcagttcgagcagctcgaggaactcaatggacgcctctacgctgcatgtctaa

SEQ ID NO: 38325 - protein, 186 aa, DROSOPHILA
MIANASRQCLITWEVSGGGLIGNLLTDTARAELSLWPDTVYNIQVKCKHKLTGLMRRSIKLNVDTSQLVGTTTTTTTSKSSIQRQHLEQPVDHTDALEHSQHIRIPRPTDRVYIISALPTPSELGGVVYPAFGALAFFLALLVMFLFLRPQRKRFPLDADSADTATLIGRSSSSSRNSMDASTLHV

SEQ ID NO: 38326 - DNA, 2722 bp, DROSOPHILA
gcattgttcctcgcctgcagggcggcgattagcagcgtgcctcggccaacggcatgcggatagtcggagacacttgcctcgggattgtagctataggcggtgctctcggcggtcagcagcttgagtaccagcgggttctccttgtcggcaatcagtcctgtaccgcgatagagcagcggtgcggcatccgcctgcctgttggccttgcccacaatggtgtcggcctgtataagattcttggcggaggtcaggatggttgtgtgctcgccagcatcgctaacatcgtagtgcagatggtcaatgaccgccgcattctcctcgtccagctcgaagccgcactcggaggcgaattcccttagcgcgtcgccggatttctcgctgcccgccaccagaacattgccgccatcgtcgacgaactgggccaaacgctccacgctcacatcgccgccgaattcctcgacacttggtgcgaatatgatgacgttcttgtacagatattcaccgtatttggacagcagcaggctggagtcatccgccagtttgtaggtgagcttaaatccgcgatctgtagcccaaagttaaacaattatcaacacatttcattgtccacgtcagaggttaaccggcattttcactcaccctgcagcgatttgaagaagatcgagtgggtttcccggatggccaggttgtccagcagaaccaaggtgttggcgtccgtttccagtaccgcctggcagtgggcaatcgccaaaacggcgatcaggagagccttccacatcattttatccaactaaaacacaaaattctctccggcttttcttgaaaaaaaaaaatgactggctgtcagtgtggccgaatactggtagggtgtgccaaaatatatacaaatataccagaaggaattcaagaaattataaaaaatcgatgatttgattaataatcgattacatttactagccaatttataaacaaaacattttaattcaaattttagattgtgaataacattccttagcaacaaccataatggacatattcgagagcttctgtcgcacgtgcggaaacgaatgcctggaatcgctgtccatttacaatgagtgtgcccaagtgcttgaccagatggtgcccattgcggatatgctagcgtcctgcctgcccgcctccttgccgccactggacccagaggacgactatcccaaacagatctgccgcatctgcgtgaagaagctgtcgatggcctacgagttcagccaccagtggctgggcgcccacggcgagttcaacgtggccctaaagttcgagcagcgccgaaggcgcagccaggccagcaaatcccagtcgcacacgcaaacccaaactcatccggtggaaccgaagaatgagcaactgcccacggtgctggcggaagcagtgtcgaccaaaagaggtgggtgtacaattttcttatctaggctaggtagatttcaaacttctcaatcttccccagcagctgctactcccaccaacgagttcagcagcgactccggaccggccttcaagtgcggcttctgcggcgaatgtttttacacggagaaggcctgcaaatttcacttaaagttctcgcacaaggatctttagagaactgtctgttttttcccttacttgtaatttggttttaagtgtataaatcttttgtgaaattaattttaaattaggaatatatatatatattccttctctttatacaagtgccttctttgagtttttaaacccaaaacgttgcaattgtagggatatagagtgcatttgtgtaagtatgaaacacaaaaaaaacctggaaaactactacccgctatagttgaaccactgaacactggcttttgtacatttggatgtttgttttacttagctttagagtaaacaaaaaaaaatcaaagatgaaagccgacaggatttttccgaagggtccaactcctctagtcatcctcgtcgttgcgcaccttcagggcgcgcggatcgtcgtggcggtagacaacgtagccgagcttgtagcgtcggttatcgccgtccttggcatagtagttggccactccgatggtggccataacgattccggcgagggccaaagcggatccgccgacgatgtccggaatctcgttccaggcgcgcttcagcagcgatgtggagcctcgggcagcggatgcggacatcttggtacactgcgggatggggctattagttcactgggcgcagcaaataaaattataaagcatttaccaaaaattcaacgcgttcagttaagttacacaacgaacaaaccaaacagctgattagagctggcctgctggctatcgatactcgctatcgccgcacagatgcaggcaacgaaatttcgatagactgaatattgaaataaaaaagctttttgaattatcttcgtgacaaatgatttattctagaactgcaactagatgtaatattttcaacgttatgtggaaatttgttcgaattttgtttatttgctgcttaggattctttaaaaaaaagtattttgctaaataaaaattttcgccattgagagtacgatttttatattcgtgacttgtcgagtaaaagtgtagactagattcgtttagaagtaaaagaacaggcaataggaagagtttccgaccatcctaagtatatatattcttgatcaggatcaatagccgagccgatctgaccctatccatctgtctttttt

SEQ ID NO: 38327 - DNA, 659 bp, DROSOPHILA
aataacattccttagcaacaaccataatggacatattcgagagcttctgtcgcacgtgcggaaacgaatgcctggaatcgctgtccatttacaatgagtgtgcccaagtgcttgaccagatggtgcccattgcggatatgctagcgtcctgcctgcccgcctccttgccgccactggacccagaggacgactatcccaaacagatctgccgcatctgcgtgaagaagctgtcgatggcctacgagttcagccaccagtggctgggcgcccacggcgagttcaacgtggccctaaagttcgagcagcgccgaaggcgcagccaggccagcaaatcccagtcgcacacgcaaacccaaactcatccggtggaaccgaagaatgagcaactgcccacggtgctggcggaagcagtgtcgaccaaaagagctgctactcccaccaacgagttcagcagcgactccggaccggccttcaagtgcggcttctgcggcgaatgtttttacacggagaaggcctgcaaatttcacttaaagttctcgcacaaggatctttagagaactgtctgttttttcccttacttgtaatttggttttaagtgtataaatcttttgtgaaattaattttaaattaggaatatatatatatattccttctcttta

SEQ ID NO: 38328 - protein, 175 aa, DROSOPHILA
MDIFESFCRTCGNECLESLSIYNECAQVLDQMVPIADMLASCLPASLPPLDPEDDYPKQICRICVKKLSMAYEFSHQWLGAHGEFNVALKFEQRRRRSQASKSQSHTQTQTHPVEPKNEQLPTVLAEAVSTKRAATPTNEFSSDSGPAFKCGFCGECFYTEKACKFHLKFSHKDL

SEQ ID NO: 38329 - DNA, 2402 bp, DROSOPHILA
aacatatacaaaacatatagaatctgttgattcaatggaaatatagaagaaaaggactttttagcgcacaaatgcgaagcgatgatataattttaatttttttttttctgtattttgccaaccgttctaagtgtaaatgttaaaaccaaaccaaccaagtatttattgggatctcagtcagtctaagatttctcaactgaaaaagaagaagcttgaatggatgcccctcccatttggtctggtttggctaaagctttcggagtttgctggcgacaacgacgggattatcacgccggatttggatggcgcccatttggcgatagtcgaaattgcattcatggcgatcactgtagcggtggacggcgcaataggtgccaccacaacgacaagggaatccgccggtgatgccaagcttcttgccgcacttgtcgcatcgtttttttgtggaatcctgtgcctgattaccatcttgatcctggccggaatcggcggatgtgtcctgattggcggcaccatccttgctgttaaccgccctcgaatcctgctcttccatcggcggttgatcctgctgctgctgcggctgctgctgctcttgtgcgtcgccctggtcgcgttcttcctgatcccgctgctccagatggtggctaaatccatgcagctgaattgacatcgccgactgggtgcctgcatccatgccgctccagatgatgatattcggtacgcttgcgcttcgcatatttcctggttttctgaatatcgcacacaggctccgaaatgcggtctattgtagcatatttattaatttagcatctgtggcctactatacagttgtggtcgaaaacaaaaatggtttttgacttttaaaaccaagtttgaaacgatcgtctttacactttacacttcgcatatgactttcaatccgtgttttcttgcaacttttattcatttgtctatatatttagctatgtcacaatagctagaattgtatatgtacatatttctaggcattcccattgatgacatcggacatgtggcgcttgtaccactcaccgactggagtggccagcacgcagacaaaggcacggaaacaccagtcgaccactgtctgagcgcccgatcctctggagctcgttttcgcattgcacccgttgatggctggcagtgcctgctccacattgagacgcctctcgccgccgaaactctgaacgatgcgctgtgcctggaatccggtctcatccagccagagctgcagccgtgaccagaagcaatggagatagtgacgcacatgggcagcatcctcgaattgcatcctgtccagctgcagacgctgggcagcagtcagctccctgccgcactgatcccgtgctcgcagtagggccagcgattggggtgaggatcgcatgggcaccggaatagcagggggcgtcagttccaccaccagcagcaacagcagcagctggaaataggtgatccaatattgtgagtggcgcaaatcctctgggaagttatgtaacctttgctttgcatacaacaatacaatgagctgaacaatctaacatggtcgcagatgcatggacccatttgtgtgtttcccttagagtccaattgcaaccggtttgtttgccagtacagtacacaaatgtacaatgtacatacaatgggccataaatcacatttactcaccctgctgagcaaaccgatctgtgatctccgcatcattcccacggcgatgtcatcgggagcactggcaaagctggactaagttctaaaaggaaagttccagtggatccacactaatccgattgacatagtaatgggctgctgacctacgataacttgagctatatattcttatattacacttacgtcggttactgtatgtatattatacacagatcttaattattttttaatggcatgttaagcttttcaataatattttaatacatatgttgtaatatgtggtaagtaaatgcaaagtgagatgaacatttttccacacttggctagagcatctgtttttggaaaattcaaaattctcgccgcactttgggttaaatcgatatattggccttttcgagttttgtttttgatgcgaaattggcagtcacagctgccgttcgtcatctgttttatgttagcacataagtcgcggatatatgtatatatacatatatatgtacagatagatatagatcacgatcatccgcagatcatgtgcatatggaatggaacgcagcaacattttcgatttcgtaacattccaccgcccgcaattagcttgtaaacaagttcatatacatttttttctgttttttttttggtttttggcttttgcctgccacatctcatctcagctcgtctcgtctcgatcggatacttcaggtgtggacccaaggaat

SEQ ID NO: 38330 - DNA, 402 bp, DROSOPHILA
atgcgatcctcaccccaatcgctggccctactgcgagcacgggatcagtgcggcagggagctgactgctgcccagcgtctgcagctggacaggatgcaattcgaggatgctgcccatgtgcgtcactatctccattgcttctggtcacggctgcagctctggctggatgagaccggattccaggcacagcgcatcgttcagagtttcggcggcgagaggcgtctcaatgtggagcaggcactgccagccatcaacgggtgcaatgcgaaaacgagctccagaggatcgggcgctcagacagtggtcgactggtgtttccgtgcctttgtctgcgtgctggccactccagtcggtgagtggtacaagcgccacatgtccgatgtcatcaatgggaatgcctag

SEQ ID NO: 38331 - protein, 133 aa, DROSOPHILA
MRSSPQSLALLRARDQCGRELTAAQRLQLDRMQFEDAAHVRHYLHCFWSRLQLWLDETGFQAQRIVQSFGGERRLNVEQALPAINGCNAKTSSRGSGAQTVVDWCFRAFVCVLATPVGEWYKRHMSDVINGNA

SEQ ID NO: 38332 - DNA, 2489 bp, DROSOPHILA
aattgaaaaataatgtttatttaagcatcgtgtttcctgaccagttctggttcatttgggcacctgaaggtcacctggataccattgggaagccagctttgcgaccagatgtccacttggcacaccttggtagcaccctgattatcgatcagctccacagagtaatcattcttaaagccagagaccacctgggacgttgccgaaagaattttggagaggctacaagtatatgatgagaagtttgtccctagaagattgaatctatagcctaccgatagtggggtccttcgccagcagccaatttggtcaaggatgcctcaagcgtttgctgggcactggccagatcctcgccttcgaggacttttggtgcaccgagtccaaacggcgtggcactgaccaacacgcaggcggtgcacaggattagaatcttggcgagaaacatttttatatatgactttgcttgcgacgaactgaacgaaaactgatgggtccgccggcagcagcgtccacttttatagaataatcccgattacgctttagccagagcttaatactcgtaatatattatttaaaattaaaagcatattacttgtatatacaatatttcggggcatctcattagcgactgggtcatacttaccgctcttttccggttgataagacagtcgatttcactgatcccaaattacaatgccaaggccacaaagtacgtttcattctaatctatctaccccaaatcagaaagttcatttaaacatatacaaaacatatagaatctgttgattcaatggaaatatagaagaaaaggactttttagcgcacaaatgcgaagcgatgatataattttaatttttttttttctgtattttgccaaccgttctaagtgtaaatgttaaaaccaaaccaaccaagtatttattgggatctcagtcagtctaagatttctcaactgaaaaagaagaagcttgaatggatgcccctcccatttggtctggtttggctaaagctttcggagtttgctggcgacaacgacgggattatcacgccggatttggatggcgcccatttggcgatagtcgaaattgcattcatggcgatcactgtagcggtggacggcgcaataggtgccaccacaacgacaagggaatccgccggtgatgccaagcttcttgccgcacttgtcgcatcgtttttttgtggaatcctgtgcctgattaccatcttgatcctggccggaatcggcggatgtgtcctgattggcggcaccatccttgctgttaaccgccctcgaatcctgctcttccatcggcggttgatcctgctgctgctgcggctgctgctgctcttgtgcgtcgccctggtcgcgttcttcctgatcccgctgctccagatggtggctaaatccatgcagctgaattgacatcgccgactgggtgcctgcatccatgccgctccagatgatgatattcggtacgcttgcgcttcgcatatttcctggttttctgaatatcgcacacaggctccgaaatgcggtctattgtagcatatttattaatttagcatctgtggcctactatacagttgtggtcgaaaacaaaaatggtttttgacttttaaaaccaagtttgaaacgatcgtctttacactttacacttcgcatatgactttcaatccgtgttttcttgcaacttttattcatttgtctatatatttagctatgtcacaatagctagaattgtatatgtacatatttctaggcattcccattgatgacatcggacatgtggcgcttgtaccactcaccgactggagtggccagcacgcagacaaaggcacggaaacaccagtcgaccactgtctgagcgcccgatcctctggagctcgttttcgcattgcacccgttgatggctggcagtgcctgctccacattgagacgcctctcgccgccgaaactctgaacgatgcgctgtgcctggaatccggtctcatccagccagagctgcagccgtgaccagaagcaatggagatagtgacgcacatgggcagcatcctcgaattgcatcctgtccagctgcagacgctgggcagcagtcagctccctgccgcactgatcccgtgctcgcagtagggccagcgattggggtgaggatcgcatgggcaccggaatagcagggggcgtcagttccaccaccagcagcaacagcagcagctggaaataggtgatccaatattgtgagtggcgcaaatcctctgggaagttatgtaacctttgctttgcatacaacaatacaatgagctgaacaatctaacatggtcgcagatgcatggacccatttgtgtgtttcccttagagtccaattgcaaccggtttgtttgccagtacagtacacaaatgtacaatgtacatacaatgggccataaatcacatttactcaccctgctgagcaaaccgatctgtgatctccgcatcattcccacggcgatgtcat

SEQ ID NO: 38333 - DNA, 489 bp, DROSOPHILA
atgcgaagcgcaagcgtaccgaatatcatcatctggagcggcatggatgcaggcacccagtcggcgatgtcaattcagctgcatggatttagccaccatctggagcagcgggatcaggaagaacgcgaccagggcgacgcacaagagcagcagcagccgcagcagcagcaggatcaaccgccgatggaagagcaggattcgagggcggttaacagcaaggatggtgccgccaatcaggacacatccgccgattccggccaggatcaagatggtaatcaggcacaggattccacaaaaaaacgatgcgacaagtgcggcaagaagcttggcatcaccggcggattcccttgtcgttgtggtggcacctattgcgccgtccaccgctacagtgatcgccatgaatgcaatttcgactatcgccaaatgggcgccatccaaatccggcgtgataatcccgtcgttgtcgccagcaaactccgaaagctttag

SEQ ID NO: 38334 - protein, 162 aa, DROSOPHILA
MRSASVPNIIIWSGMDAGTQSAMSIQLHGFSHHLEQRDQEERDQGDAQEQQQPQQQQDQPPMEEQDSRAVNSKDGAANQDTSADSGQDQDGNQAQDSTKKRCDKCGKKLGITGGFPCRCGGTYCAVHRYSDRHECNFDYRQMGAIQIRRDNPVVVASKLRKL

SEQ ID NO: 38335 - DNA, 1722 bp, DROSOPHILA
ttatctaaccgtttttcttaagtgaaccatcaaaaaatcaagtgaaactattttatagccctaaccttccgcaaattgtaatctaaaaaactagattcgagtgcggatcacgacctattcatcaccctgataagaataatcagttccctgcccccatttaaatatcagtttcaattgactcccggttatcaattgaccaaaagtcaaatttcttgatttatgtttgccaatatgtaaagttaaaaaaaaaaaaaacaaaaaagtaaaagctttacaattgaattgaaaaataatgtttatttaagcatcgtgtttcctgaccagttctggttcatttgggcacctgaaggtcacctggataccattgggaagccagctttgcgaccagatgtccacttggcacaccttggtagcaccctgattatcgatcagctccacagagtaatcattcttaaagccagagaccacctgggacgttgccgaaagaattttggagaggctacaagtatatgatgagaagtttgtccctagaagattgaatctatagcctaccgatagtggggtccttcgccagcagccaatttggtcaaggatgcctcaagcgtttgctgggcactggccagatcctcgccttcgaggacttttggtgcaccgagtccaaacggcgtggcactgaccaacacgcaggcggtgcacaggattagaatcttggcgagaaacatttttatatatgactttgcttgcgacgaactgaacgaaaactgatgggtccgccggcagcagcgtccacttttatagaataatcccgattacgctttagccagagcttaatactcgtaatatattatttaaaattaaaagcatattacttgtatatacaatatttcggggcatctcattagcgactgggtcatacttaccgctcttttccggttgataagacagtcgatttcactgatcccaaattacaatgccaaggccacaaagtacgtttcattctaatctatctaccccaaatcagaaagttcatttaaacatatacaaaacatatagaatctgttgattcaatggaaatatagaagaaaaggactttttagcgcacaaatgcgaagcgatgatataattttaatttttttttttctgtattttgccaaccgttctaagtgtaaatgttaaaaccaaaccaaccaagtatttattgggatctcagtcagtctaagatttctcaactgaaaaagaagaagcttgaatggatgcccctcccatttggtctggtttggctaaagctttcggagtttgctggcgacaacgacgggattatcacgccggatttggatggcgcccatttggcgatagtcgaaattgcattcatggcgatcactgtagcggtggacggcgcaataggtgccaccacaacgacaagggaatccgccggtgatgccaagcttcttgccgcacttgtcgcatcgtttttttgtggaatcctgtgcctgattaccatcttgatcctggccggaatcggcggatgtgtcctgattggcggcaccatccttgctgttaaccgccctcgaatcctgctcttccatcggcggttgatcctgctgctgctgcggctgctgctgctcttgtgcgtcgccctggtcgcgttcttcctgatcccgctgctccagatggtggctaaatccatgcagctgaattgacatcgccgactgggtgcctgca

SEQ ID NO: 38336 - DNA, 369 bp, DROSOPHILA
atgtttctcgccaagattctaatcctgtgcaccgcctgcgtgttggtcagtgccacgccgtttggactcggtgcaccaaaagtcctcgaaggcgaggatctggccagtgcccagcaaacgcttgaggcatccttgaccaaattggctgctggcgaaggaccccactatcgcctctccaaaattctttcggcaacgtcccaggtggtctctggctttaagaatgattactctgtggagctgatcgataatcagggtgctaccaaggtgtgccaagtggacatctggtcgcaaagctggcttcccaatggtatccaggtgaccttcaggtgcccaaatgaaccagaactggtcaggaaacacgatgcttaa

SEQ ID NO: 38337 - protein, 122 aa, DROSOPHILA
MFLAKILILCTACVLVSATPFGLGAPKVLEGEDLASAQQTLEASLTKLAAGEGPHYRLSKILSATSQVVSGFKNDYSVELIDNQGATKVCQVDIWSQSWLPNGIQVTFRCPNEPELVRKHDA

SEQ ID NO: 38338 - DNA, 3040 bp, DROSOPHILA
atataagtgagaatatcgattaggtatgaatgaacacggtaatttccccgataatttcgatagctgcgaacagatcaggtcgctttcattattcaatttgtattaactttcgttcgttgttgtcgtctggctggcggctagaaaaatgtatgcatcgcatttcaataataatgaaaacaaaagttaaaacaaataaaacaaccgctagtttcggtgcgatggagaaagggcgaggaggggggctagtgtggatagagcgggatagtgagattccgtcgaacggtgattgcaagaaaatgacattttacagttgcccccaaacaccctacactcacctgcgttttggagcatctcggttttatgacaccgttggcagcgctccatcgaaaaacctagaactacaaagtattactcatacattcgcgaattaataatcctttttatatcatacattatgatatccttattatataaggcattattgttaataattatataaaaatatggaatattatgatcactcttttctttaggatatcagtactagggtccagtgcagagacgtcagaaactgataaaaattcgaagatatttattaattttttttagaaagaaacgcatgatgcagagtgggagattccacgctgcgtaacagaatggaaactttatattaattttatcaatttacaagaactcatgcagatagcttgtatgcaagttctttaaagattaacaaattaatcggagaataaaaatattagtaacataatgaataaggtaataatggcaaaaagaaatccattattaatttgctaaaagaaaggtatacacgcacaaagggcatttgaaggtcggcgcagggcaaggtgtcatccatttcacccgagggctccgtaggtcaagatgcttgtcgtcgccagcattggctgttgtatataaattttgacaaaagaaagacttcggtttaaaccaattttggcaaggcggcgaccataaggtgatgaccactcgacgcgacgacatggcatggattagcggccgttcccacctgctggtgcctgtgatcttggtgctgttaataccgttggtcgcgggcttcggcaacgagtatgtccacatcaaggtgcatgtgcccaaagaggagtcagcggcggaggagtcgccacacaaggtgatccaccactaccaccaccatccgcatccgcatcagttataccgcaatcggggacgagcccgtcccaagcccagtccactgctggagagcgtaatcctctcggatctggacaagccgctgcacatgagcgagcatgcggactatctgaatcacgccaaggagctggccgaccacctcacggagacgtatgccaaaaaggcagctcctccgccgccgccgccgcccaagaagaaggtcaacacttatacgatcattgaggagcagcacagaccacatggctacgactacgaggatcaccatgagcccagtgtggagacttatcgagtgattgaatcgcgacccaagcagcagcaccatcatcacactcatactcaccatccggttgaggaggaggaggtggacgacgattatggatatcactatccgagcgggggaaatcatcatcatcatcatcatcatcagactggcgcctatgcggaacccgcaccagtggaggagcacatcgaccaggagccggatacgggctataagtattcgccacacagtcacgcctacatcccgcccagccacggtcaggcccagcggagctccaagcaaaccagagcgccagcgtacactctcgaagctccgcaggaatcctccttcggatacgattactcgcgaccctcggccggaagtagcactgacttccggccatccgtccaggtgccatccagtgacccgtacggcgaggaggaaccggcggacacctatggaccaccgcttacggccacaaggcgtcgccggccatcgcaatccctggtggattggcccgagtccaagggattcaacagtgccgcgtccgaaacatacagtggcgtcgatagctacaacgtgggtcatgttcagggctatggatccagtagctatcaccagtacagtggtgggccctatctgtaggcgttccaacaccccgtctaatctaagatctatttattgcactttttttttcctagcttcgtaagtcgatagtcagttttcagatttaagcgataaataaataaatgtttgtaaacacttaaagaaatgttattcaatttctaggaatcaagttgttagaagtaataaacaaaaggttaacttatttgtttatttatttatttgtttcaactcaatcctagcagttggaaagcaccaagaccacttgaaaattataatgtaataaaaacgcaaatttgaatagttgaagtaataaaaaaaagagactgtctaattagtatgcatattatgatcttgaattctcaaattagtttatttaaacactaaaatctaatattctaatggtgcaagagtaaaatgcactcatttttgttattgacttcaactttggataccaaccggttcacttggcaatgggaatttaagtatactacttagtgcaattatcctaagtcttgattctatctataaaacgtataatatatttacattctgattatttattattatttcaaatacggaaatcgtgtttggtacattcatacatggactactgttctcagtgtttttgaggaagtcagttaggctaatggatttctcagttgtttgttggcccatttaaagggagatccgccgcaaggataaggcctgtccatccataagggtttcacttccgagcagtcaacgatgagcggccatctgggtcgggtcctgcagttccacctgcggctctaccaggtgctcggcttccatgggctgccgttgccgggcgatgggaatccggccaggaccaggaggcgtctgatggcatggagcctgttcctgctcatttcgctgagtgccctcgtactcgcgtgcctctttagcggcgaggagttcctctatcgc

SEQ ID NO: 38339 - DNA, 1040 bp, DROSOPHILA
atgaccactcgacgcgacgacatggcatggattagcggccgttcccacctgctggtgcctgtgatcttggtgctgttaataccgttggtcgcgggcttcggcaacgagtatgtccacatcaaggtgcatgtgcccaaagaggagtcagcggcggaggagtcgccacacaaggtgatccaccactaccaccaccatccgcatccgcatcagttataccgcaatcggggacgagcccgtcccaagcccagtccactgctggagagcgtaatcctctcggatctggacaagccgctgcacatgagcgagcatgcggactatctgaatcacgccaaggagctggccgaccacctcacggagacgtatgccaaaaaggcagctcctccgccgccgccgccgcccaagaagaaggtcaacacttatacgatcattgaggagcagcacagaccacatggctacgactacgaggatcaccatgagcccagtgtggagacttatcgagtgattgaatcgcgacccaagcagcagcaccatcatcacactcatactcaccatccggttgaggaggaggaggtggacgacgattatggatatcactatccgagcgggggaaatcatcatcatcatcatcatcatcagactggcgcctatgcggaacccgcaccagtggaggagcacatcgaccaggagccggatacgggctataagtattcgccacacagtcacgcctacatcccgcccagccacggtcaggcccagcggagctccaagcaaaccagagcgccagcgtacactctcgaagctccgcaggaatcctccttcggatacgattactcgcgaccctcggccggaagtagcactgacttccggccatccgtccaggtgccatccagtgacccgtacggcgaggaggaaccggcggacacctatggaccaccgcttacggccacaaggcgtcgccggccatcgcaatccctggtggattggcccgagtccaagggattcaacagtgccgcgtccgaaacatacagtggcgtcgatag

SEQ ID NO: 38340 - protein, 346 aa, DROSOPHILA
MTTRRDDMAWISGRSHLLVPVILVLLIPLVAGFGNEYVHIKVHVPKEESAAEESPHKVIHHYHHHPHPHQLYRNRGRARPKPSPLLESVILSDLDKPLHMSEHADYLNHAKELADHLTETYAKKAAPPPPPPPKKKVNTYTIIEEQHRPHGYDYEDHHEPSVETYRVIESRPKQQHHHHTHTHHPVEEEEVDDDYGYHYPSGGNHHHHHHHQTGAYAEPAPVEEHIDQEPDTGYKYSPHSHAYIPPSHGQAQRSSKQTRAPAYTLEAPQESSFGYDYSRPSAGSSTDFRPSVQVPSSDPYGEEEPADTYGPPLTATRRRRPSQSLVDWPESKGFNSAASETYSGVD

SEQ ID NO: 38341 - DNA, 3340 bp, DROSOPHILA
ctcggccggaagtagcactgacttccggccatccgtccaggtgccatccagtgacccgtacggcgaggaggaaccggcggacacctatggaccaccgcttacggccacaaggcgtcgccggccatcgcaatccctggtggattggcccgagtccaagggattcaacagtgccgcgtccgaaacatacagtggcgtcgatagctacaacgtgggtcatgttcagggctatggatccagtagctatcaccagtacagtggtgggccctatctgtaggcgttccaacaccccgtctaatctaagatctatttattgcactttttttttcctagcttcgtaagtcgatagtcagttttcagatttaagcgataaataaataaatgtttgtaaacacttaaagaaatgttattcaatttctaggaatcaagttgttagaagtaataaacaaaaggttaacttatttgtttatttatttatttgtttcaactcaatcctagcagttggaaagcaccaagaccacttgaaaattataatgtaataaaaacgcaaatttgaatagttgaagtaataaaaaaaagagactgtctaattagtatgcatattatgatcttgaattctcaaattagtttatttaaacactaaaatctaatattctaatggtgcaagagtaaaatgcactcatttttgttattgacttcaactttggataccaaccggttcacttggcaatgggaatttaagtatactacttagtgcaattatcctaagtcttgattctatctataaaacgtataatatatttacattctgattatttattattatttcaaatacggaaatcgtgtttggtacattcatacatggactactgttctcagtgtttttgaggaagtcagttaggctaatggatttctcagttgtttgttggcccatttaaagggagatccgccgcaaggataaggcctgtccatccataagggtttcacttccgagcagtcaacgatgagcggccatctgggtcgggtcctgcagttccacctgcggctctaccaggtgctcggcttccatgggctgccgttgccgggcgatgggaatccggccaggaccaggaggcgtctgatggcatggagcctgttcctgctcatttcgctgagtgccctcgtactcgcgtgcctctttagcggcgaggagttcctctatcgcggcgacatgttcggctgtgccaatgatgcccttaaatacgtattcgccgaattgggcgtgctggccatatatctggagacgctgagcagccagcggcatttggccaacttctggtggctgcacttcaagttgggcggccaaaaaacgggcttggtgagcctgcgcagtgagttccagcagttttgtcgctatctgatattcctgtacgccatgatggccgccgaagtggcgatccatttgggattgtggcagttccaagcgctcacccaacatatgttgctcttttggagcacctatgagccgctcgtgtggctgacgtatctgcgcaatctgcagttcgtactgcacttggagctgctcagggagcagctgaccggcttggaacgcgaaatgggtctgctggcggagtactcgcgatttgctagcgaaacgggtcggagttttcctggattcgaaagtttcctgcgccgacgactagtgcagaagcagcgcatctatagccatgtgtatgacatgctcaaatgtttccagggtgccttcaacttctccattctcgccgtcctgctgaccatcaacatacgcatcgccgtggactgctacttcatgtactacagcatctacaacaatgtgattaacaacggtgacttggggatctatcatttaagtacatcatgtagtatatatggagtatcatcctacagattactacctaatcgttcccgccttgctcgagattcccgccttcatatacgcttcgcagagctgcatggtcgtggtgcccaggatcgcccaccagctgcataatatagtcaccgattccggttgctgcagctgtcccgatctctccctgcaggtgggctgccatggtatcatgctgtcgtatctcactttcccatccttgattcttggcagattcagaacttttcactgcaactcctgcatcagccgatacgaatcgattgcctcggcctgaccatcctggattgcagtcttctaactcgggtgggtgtggtgtactctcgctcttcgagtaatggtttcacacataaccactgtcctttcagatggcctgttccgtgggcacctacatgatctatagcatccagtttataccaaagttcagcaatacctatatgtaggacatccttaaaagtggaaaatgattaggtcaacataatgctgaggaacatatgcttttgaagttgtccttaaaaactttagagattcaccaactagcatttctccatgtggtttttaatctctacaagttgcacccacagtttaaatcagattgaatcttgggtttacatattaaagctttgttatattcataaaattataggtaattacataagtgtatttatttatatgtatatgtatatcttaaaccaaggatagggcctgggtgtcacaagcgttcagtattccgttaagcggattcattatttatttacaagggttccttggctggcgactggacgggcactggaggaggtggtggaggagcagttggtgcccaccaaacgttgtgccgacgttgccctatacaagtttatatgctgagattatcccctccatggccatcgcgtttgcttttgattttcttattgatttctcttaagatgcgctgaacataaaacaaatatattaaagtaatggtaaagtactagctcagaatttgagtcattatatccaagactccggggactatagactacggactaatgcagggaatattggtgatgcagatcaattggcttccattatggggcctaatcgtactcatggcttgattcccgctttgcaatcaggttctcgcgctcatcatcgttgccctcgatgatggtgattccgcccaagccgcttccgtggtttcggtttagctgcttcacacggtgcaccgtctccgtgagaccagattcggtaagcacctccacctcgtcgtcatcctcgtcttcgtccggcacggtgaagtatggatgcgaggatactggacggaacttgtagccagtcagcacgaagaacacgtatgtggccatctcacggaacatctcgtctagccaggcgtattggaacaccaccgtcatctgcagcagatcgacgatgatccgcgtgaagtagatatagcacacgatcatg

SEQ ID NO: 38342 - DNA, 1158 bp, DROSOPHILA
atgagcggccatctgggtcgggtcctgcagttccacctgcggctctaccaggtgctcggcttccatgggctgccgttgccgggcgatgggaatccggccaggaccaggaggcgtctgatggcatggagcctgttcctgctcatttcgctgagtgccctcgtactcgcgtgcctctttagcggcgaggagttcctctatcgcggcgacatgttcggctgtgccaatgatgcccttaaatacgtattcgccgaattgggcgtgctggccatatatctggagacgctgagcagccagcggcatttggccaacttctggtggctgcacttcaagttgggcggccaaaaaacgggcttggtgagcctgcgcagtgagttccagcagttttgtcgctatctgatattcctgtacgccatgatggccgccgaagtggcgatccatttgggattgtggcagttccaagcgctcacccaacatatgttgctcttttggagcacctatgagccgctcgtgtggctgacgtatctgcgcaatctgcagttcgtactgcacttggagctgctcagggagcagctgaccggcttggaacgcgaaatgggtctgctggcggagtactcgcgatttgctagcgaaacgggtcggagttttcctggattcgaaagtttcctgcgccgacgactagtgcagaagcagcgcatctatagccatgtgtatgacatgctcaaatgtttccagggtgccttcaacttctccattctcgccgtcctgctgaccatcaacatacgcatcgccgtggactgctacttcatgtactacagcatctacaacaatgtgattaacaacgattactacctaatcgttcccgccttgctcgagattcccgccttcatatacgcttcgcagagctgcatggtcgtggtgcccaggatcgcccaccagctgcataatatagtcaccgattccggttgctgcagctgtcccgatctctccctgcagattcagaacttttcactgcaactcctgcatcagccgatacgaatcgattgcctcggcctgaccatcctggattgcagtcttctaactcggatggcctgttccgtgggcacctacatgatctatagcatccagtttataccaaagttcagcaatacctatatgtag

SEQ ID NO: 38343 - protein, 385 aa, DROSOPHILA
MSGHLGRVLQFHLRLYQVLGFHGLPLPGDGNPARTRRRLMAWSLFLLISLSALVLACLFSGEEFLYRGDMFGCANDALKYVFAELGVLAIYLETLSSQRHLANFWWLHFKLGGQKTGLVSLRSEFQQFCRYLIFLYAMMAAEVAIHLGLWQFQALTQHMLLFWSTYEPLVWLTYLRNLQFVLHLELLREQLTGLEREMGLLAEYSRFASETGRSFPGFESFLRRRLVQKQRIYSHVYDMLKCFQGAFNFSILAVLLTINIRIAVDCYFMYYSIYNNVINNDYYLIVPALLEIPAFIYASQSCMVVVPRIAHQLHNIVTDSGCCSCPDLSLQIQNFSLQLLHQPIRIDCLGLTILDCSLLTRMACSVGTYMIYSIQFIPKFSNTYM

SEQ ID NO: 38344 - DNA, 2088 bp, DROSOPHILA
cactctcaacacaccgtaaatccacttccgcagtaaagatccggcattggcatcgatcggcagatcgcacgaggattcaatgtgaaccgggtgcacagttccgcctggcgcctgtacttaaatacccgatcccgagtgtccaagaatacgaaatgccactccagcggccgctgaaagaggtccgccttttgaacctgtcaattgaagaaaaacatttttacattctatcattcctttttgcaggaattatattccttgaagaggatttttatcacaacttccctaaaaatggtcatatagatgtaagaataacagttttgagcagctaattaccactgctaactatccctataactttttgacgggttttgggaaattaattttttggtaaatttttgcattttttgtaaggggtaacatcatcaaaatttgcaaaaaattgacaaaaaatagaatgtccgttttttaactcaatttgattggaaatttaattacgagctcaacgaggtatgacattctatattcagacaattattttttaagttgtggcaaaaaaaccgcttatttgatgaccgaaattcagaaaaaccgattttgccaaaaagttgatatttacaaacggaattttcgtcataacatggctaaaaatgctcatatagatgtaaaaataactgttttgagcagctaattaccaatactaaccatccatatcattttttgacggactttgtaaaattaatttttggccaaattttcgcatttattgtaaggggtaacatcatcaaaatttgcaaaaaattgacaaaaaatagaatgtcattttttgaactcaatttgattggaaatttaattacgagctcaacaaggtataacacttaatatttggatcattttatctaatgttttggtcaagaaaagtgctcttctaagacggaaaatcggaaaattcccatttccgtacggtttttgaccactgggctcaccttttcgaaaatgccattcatggcggcagcgcgtgcgaatagggctatataagttggcgccggacgcagcgatcgaatgcgctcgaggaaatgctggccaggatcggtctgactggcgtccatgattagtgtccgaaagggatagccgactagcatctgttgcatggcttcgacggcgtcgcgggcattcatgaacaccatggccacgttgttggcccgcttctggcgcataaaatcaccgaacatgtccagaaagggacgcatgatccgctccaaacgcacatagccaatgcccagggagcggaccaggttgtagccctcctcccagtggctgtaggtgagatcgatcacggcactcgcgccgacagtggacagaatttcacaaactgcagaaggacaattggttgagaaaattctaaattatataatatgatattggcacattacaaggtttacaaaaggattacaaaacccccacaaacccccaatgccaacgattttcagcgacagtacttacacctctgcatgtccaagccatcttccgaccgggtcagagtcaaggtggtatcatccaccttaacatccagacgcagtgcatccaactccttaagtaccatcgctatatcggtatcaaattccgcccgttgaacaggctcaatccaaaaggcttttaggagtaatcagaaatttagctaccgatcgaggcgaatttccaagaacacccacttatcttgagtacttccgagccagcgaaacgaagtgcgagcagcagtaccagcagtggtagctccatggctccaaccgatttcagagagttctagccgggacttaagtcctagcaatgtcgccaaatcggacaacagccccaattgctgtccaattatctatcccaattatatgatggcgtgcggtgcccatcattgtgcaatatgcatatttcagcagatggaattgacagtatgcgacagcttgagtgcaattccattaccatggaaagtcaaagggattggcttggttaattccttatattctctttatgcgacaaagtacaaagtatcaaatcataatcttttgttcgggcagggccttagtaatacgaaaaaaa

SEQ ID NO: 38345 - DNA, 480 bp, DROSOPHILA
atggagctaccactgctggtactgctgctcgcacttcgtttcgctggctcggaagtactcaagataaccttttggattgagcctgttcaacgggcggaatttgataccgatatagcgatggtacttaaggagttggatgcactgcgtctggatgttaaggtggatgataccaccttgactctgacccggtcggaagatggcttggacatgcagaggttttgtgaaattctgtccactgtcggcgcgagtgccgtgatcgatctcacctacagccactgggaggagggctacaacctggtccgctccctgggcattggctatgtgcgtttggagcggatcatgcgtccctttctggacatgttcggtgattttatgcgccagaagcgggccaacaacgtggccatggtgttcatgaatgcccgcgacgccgtcgaagccatgcaacagatgctaccctattcgcacgcgctgccgccatga

SEQ ID NO: 38346 - protein, 159 aa, DROSOPHILA
MELPLLVLLLALRFAGSEVLKITFWIEPVQRAEFDTDIAMVLKELDALRLDVKVDDTTLTLTRSEDGLDMQRFCEILSTVGASAVIDLTYSHWEEGYNLVRSLGIGYVRLERIMRPFLDMFGDFMRQKRANNVAMVFMNARDAVEAMQQMLPYSHALPP

SEQ ID NO: 38347 - DNA, 2855 bp, DROSOPHILA
tcatccaaccaaaacagctcgtatatgcggtcgtgccgctggagttcattcgctcgctccagatctttttccttctgcttcgggggggtgtatttgagaaagtagtcggcatacttgctgtcgttgtcccgccccggggaatgcaccggctccgatccgatcagctttatcgagtcattctgctgatccttcgacaacgattcatccgccttcttttcagtatgcccacacaccttttcttctatcttcaagggttcgctctccgcctcaatgcggcggcactggttctcctttagcttgagctcccggttaatctgccgcctttcctccctctgcaaaatctccatctgctggcgatgctccgcttctgagggaaacctatcccttgtgaagtagaacatgctatggtgtctctctttgggtttcttctcttggcacgtcttgtttgagtagcgattctttggaatcatacaagagtcccattgtatcatccttgaagggctatctttgatgttgtccttctgggtctgaatcgcagtttgaacatgggccttcgcttcggtatggaatttacgttgagactgtgcctgcgattgcactttgcttttcttctggcgagccgcggctgccgcggccgccacggcagccaattcccgttggatcgccgcatttttgtgttggcatatgtgcacagattttcgctgtgcagcaggagcagtagcagcagcagcaggaggagctgcagctggaggagcagaagcaatagaggctttcttaactgcagactccatgtggttgatctccttcgactgtgccttatgtgcagagcccagcagcttaatgttcttgcgcgactgggtcacctcgacggaagatggctccttcttccattccgccgggctcgtggtcgattgtttggcactcattgcaatgtggtgggatttggatgagttgaaaatttgtgattcggcaggcagttatgtgaattatgttaatatgtatggttgggctgggtttagtgggtctgctgtcatggaactaatattacacttaactaaaggcacacttagaattttgaatattcacattctcataccacacagacaggaatttttaaaactattgtgattaaatgaaatttgtggttcgaaatgaagaatactgactgagataccgcctccaaatcgatctaaatggcctcacctacatgaccaagtagctggacgacaagctgggcgaagactccgttagcgaggagcagctgaacatcatctgcgagctgctcctgcgtttcggcgacttggccacagaaaaggatcgcgccgtcgtcacacacgccatcaatctgctgacaaacatctccggcagctgcctgacagaactcaccctgcgttgctccaatgccgagttggagtcgcacaaggaaagagagctggacaacgagaaggaaaaagatacagaagctggagcgggagccaaaccccgtgagtgctgctcgcagtgcttcgaaaagcgcaatgttcggagtctggacgtgctactccgctacctaaggcaatctctggcccaacaggaggccgaggctagctcgcatgagttgctttccccagtgctgaccgtgctggtgaaatgtgcgcgcagcgatcgagttatgcgtcactatctacgccaggagattctgccgccgctgcgggacgttagtcaacgacctgaggttggtcaggagctgcgcaatcatcagtgccggttccttatactcaaggcaatctggcacaaaaatatggatcactgcgggtttttgtacgaaaaaacgttccgtctttataaacccaatagaagttacaatataaaatagatagaaaagatctacgacaaaaagaatcttcactcattgcattcgcgtttcaaaatatatgtatgtatattgtgtcaagattgggacaaatattctaggacatatcagttgctctccggcaaggagtccgcctcctgaatgtcgtcctccgtgggcctcatgtgatcgtagggagcatggtggttgggtttgtggtggcgatggcggcacgccttgtggtggtgaactgggagttcttcttggtcattctgtgccaacttgcggcgatatttttcctcctgcctgcgatcattcagccaaaacaacccgtatatgcggtcgtgctcccgctggagtccattcgctcgctcaagatcattccaattctgctgtggggtggtgtatttgagaaagtagtcggcatacgtggtgtagttgtcccgccccggggaatgctccgatccggaatcgcgtcccccactgtccggtgcggggttgagttctttccctatttccttatatgctgtatagtacttagctctgtaggcgtggtccaggtcgagattatcgtactcattggtctcgtcgcgggccaagaactcttgcacctggcgctggcgctccttttcttgctcctggcgaaagatctcgtagttttgggatccgggaccaccaatgccctccggcagggctcttctgtcatcctcatccttctcatcactctcctttgaccgctgcagctttttcaagtgggtgctaacgttcgcatagttaagcacatccgcattcaactcgacaaagtccaccaactcctccgtgcacttctccatctctagctccaggtgatggatccgttcgcggacgcatgtgccaaaggtgatcgaatccttctgctgatccttggacaacgattcatccgccttcttttcagtatgctcacacaccttttgttctatcaccttgatcgtcttggactcctgttcagttgtctccttcaagggttcgctctccgcctcaatgc

SEQ ID NO: 38348 - DNA, 654 bp, DROSOPHILA
atggttgggctgggtttactggacgacaagctgggcgaagactccgttagcgaggagcagctgaacatcatctgcgagctgctcctgcgtttcggcgacttggccacagaaaaggatcgcgccgtcgtcacacacgccatcaatctgctgacaaacatctccggcagctgcctgacagaactcaccctgcgttgctccaatgccgagttggagtcgcacaaggaaagagagctggacaacgagaaggaaaaagatacagaagctggagcgggagccaaaccccgtgagtgctgctcgcagtgcttcgaaaagcgcaatgttcggagtctggacgtgctactccgctacctaaggcaatctctggcccaacaggaggccgaggctagctcgcatgagttgctttccccagtgctgaccgtgctggtgaaatgtgcgcgcagcgatcgagttatgcgtcactatctacgccaggagattctgccgccgctgcgggacgttagtcaacgacctgaggttggtcaggagctgcgcaatcatcagtgccggttccttatactcaaggcaatctggcacaaaaatatggatcactgcgggtttttgtacgaaaaaacgttccgtctttataaacccaatagaagttacaatataaaatag

SEQ ID NO: 38349 - protein, 217 aa, DROSOPHILA
MVGLGLLDDKLGEDSVSEEQLNIICELLLRFGDLATEKDRAVVTHAINLLTNISGSCLTELTLRCSNAELESHKERELDNEKEKDTEAGAGAKPRECCSQCFEKRNVRSLDVLLRYLRQSLAQQEAEASSHELLSPVLTVLVKCARSDRVMRHYLRQEILPPLRDVSQRPEVGQELRNHQCRFLILKAIWHKNMDHCGFLYEKTFRLYKPNRSYNIK

SEQ ID NO: 38350 - DNA, 3798 bp, DROSOPHILA
ggcggaatatggtttgtagttcgggattctcctttttgcagcgccggcagtagtactgtttgatgtgtttagcctccttctcggtgatccctatacagtcgccgtggtaccactcctcgcaaccatcgcagcctctggaaagcgaagggtacaagtagttagccgggatctagccctttaaggccattcaactcacatcatgaacctggagcagtcggaggagcggcatatgcagtacgcttggtcttcctgctttagaatggtggctatcttggacttgcgctcaggcaaatcaaattcccgtgcgatctcccgcctgatttcctctttctgtttggaaacctcctttgtagttaaaaatatgattgccgtgcagcgggtgaaacttacggtcttcttatatttgcgcttgtccgtcatctcgcagcaatctttccgacaacaaatccagtccaaatccaaatccgtcaattaagtttcatggaatttttttttgcgatggagatggtgaatgaaaggatatcgatagcctactaataatgtattgcagacaatcgataggttctggcctaataaaatatataatatttagcataaaactacgttgtagattttaattgatgtatgactatacaataaaaacaattttaggtatttattgtaagctgtgtataaatataaaatgcttcgtaacacttatatcgagagaactaattccatagtcttaataacaaacgatagtgtgttcgagatctatgagattaaatagagttcttgaaagagaaacaacgtgaatataaaacctacaaaagattgttactttatatatacctaatttttatttttcgataatctttaagattttgccgcggcccagtattttcgaagtttcgtaaaattaaacatcgatagaaaaattaagcatcgaattaccactgacattgtcggctttttctcacctctaataaccgcgcggttttttctttgtatttcgttaccattttttctcaactgaactgaattgaatgtgaatagtctgcaattatggcggccctgagcaacctaaaacagtgtccgccgttctccacgctgccggatctggcgctgcggcacaatcacatcccagagctggaacgctatccgcagataaacctgaacagcgaacttctggccaatccggctggtcagcggtactacggcggacagagcttcgtatctgtgaatgagggtgtcctaaagcgcatagctcgcagcttctttaatggcggattctggaagacgctggaggaggcacgcagcccagagaccagggagcaggcgccgcttattgcccaggcgggtgatttaatcgcacaatttctgggcctggccaccggcctgaggatcctcccgcacacccagcagcttagtgcagagcgtattgctcagttcgtggagaccaggtgggtggggcgcagccaactgaccaataatacctaaaccttactgtcccattcattcagggattggctcaacagcgatgtgcgctatcttgcctggaatcagcacttcttttgcttagccgtagccggtgtagacgatgtggtgcgcatctacacaaagagttccagtgcgaccactgccactgttttaaagagtccatcccaaacgcagatcacctgcatggcgtggcgtccactctgcgcttccgagatcgtgataggttgtcggcagggtctgtgtttctgggaagtggacagcactttgcatttgggacgcacaaatgcacccagcgagatttttaaatagtcagtatagaaaatttatcgttagttggtaaatacataacttattttcccttttagcccaaacaatctgccaataacctcgatgcagtggaacaaggatggcacccagttggccaccgcctcaataggagatcgttccattattatctggcagccggacaccggaatgatgcagccactcaagcgtttgggtccgccgggctcgctgctgaagtggtcgccggataatgactggctgttcgcagccaccgtggatcgggtgttccgcgtgtggaactgccaccagcaatggaccaccgagcgatgggtgtgcggtcccggaggctatgtccaaacagcctgttggtcgccctgcggtcgcttcctgctcttcgtcagcagtgccgaaccgattctctaccgcctgcagttcgtgcaacagagtctgctatcctgtaagtacgaaagctttgagtacgtattcagggcagtctgctcccagtgtctgaactgaaacggtggtcagatacaagggtgcgatttggggctgccccagatcaaagcagtcagtaacaggttggcggctgttgcagcttacagaccgcctgtataatgctgactacaaaaacaaaaaccggtaccaatgtactagttgatatttaacatattccgtttttgtatctccttgcagcttcggcggatgagaaggaaatcctgcccattgcagatctaaatgcttgtagcattgatgcgaatcgcacgcttgtcggtggtcccgcccagcagcttgcttgggatccgcatggcaattatctggtagtcacattcaaggcgaccaactgcatcgccgtcttccgcaccttcatacagaagttcgatctgcagatttcggcggcttactatctgagcggcgagacggcggcggagcacccgagcttcatctgcttccagccactctacgaggataacgatcgctccgtgctgacgatcgcctggtcgtcgggccgcatccagtactacgccttcgactgatcttaaagcttagtgattttcatagtaatacattttttgatttggtttttgtaagcgttaatacacagttaaacaggttaaccttaatttggaatccaacaatggtaggggattgagataaattcaaaggtgtgagtctgtggcacttgaaagtatatctgtaatgtggcaggtaattgacttttacaagcaaacagtaccattgccacacccccacatttatctcttttttacagatttgattgaaatggacaaagcgttttacacctttaaggtaattgaatcaattcgagaacaattcctaatttattatttttgcttaaaattggtccagcaattgttttgcaatttatataaagaatcaaataaaatatctgattacgcttataaggatttattaatatttttaataaaataccacttccttaatggaatacaatcaatttttgacaacgtatttttgctgtggaatcatagtagttatttttttctttaatttttatgaacctcaaaaagccaaggtaattttgaatagactcagtataatatgaagtaattattgtccgtaacaaagtcttcggtcgaatacgagttcctataacttccaactgtcttaaagctgcaaaacgctccgcattaacatggaaatataaatatataaataatgctatgtgtatacagatagtatataacgtgactttcgattacataacaaaacaaagagttaaatatcaaacataataagggaacgattgctgaggcaaagggatcacacttggagcaatactaagtcataatttacaaacacacacaacataactgcacatctaattaatcgagttggtcccttggatgctctagatgtccccaaagaagtaacccagagcagtggctgccctcatccgcaccagcgcctgttcgtccttgagcagcacggcaatcttgctggccacagtctccgtttggacgtttctctcgctgaggaagttgtgcagaatgc

SEQ ID NO: 38351 - DNA, 1445 bp, DROSOPHILA
ttttttctcaactgaactgaattgaatgtgaatagtctgcaattatggcggccctgagcaacctaaaacagtgtccgccgttctccacgctgccggatctggcgctgcggcacaatcacatcccagagctggaacgctatccgcagataaacctgaacagcgaacttctggccaatccggctggtcagcggtactacggcggacagagcttcgtatctgtgaatgagggtgtcctaaagcgcatagctcgcagcttctttaatggcggattctggaagacgctggaggaggcacgcagcccagagaccagggagcaggcgccgcttattgcccaggcgggtgatttaatcgcacaatttctgggcctggccaccggcctgaggatcctcccgcacacccagcagcttagtgcagagcgtattgctcagttcgtggagaccagggattggctcaacagcgatgtgcgctatcttgcctggaatcagcacttcttttgcttagccgtagccggtgtagacgatgtggtgcgcatctacacaaagagttccagtgcgaccactgccactgttttaaagagtccatcccaaacgcagatcacctgcatggcgtggcgtccactctgcgcttccgagatcgtgataggttgtcggcagggtctgtgtttctgggaagtggacagcactttgcatttgggacgcacaaatgcacccagcgagatttttaaatacccaaacaatctgccaataacctcgatgcagtggaacaaggatggcacccagttggccaccgcctcaataggagatcgttccattattatctggcagccggacaccggaatgatgcagccactcaagcgtttgggtccgccgggctcgctgctgaagtggtcgccggataatgactggctgttcgcagccaccgtggatcgggtgttccgcgtgtggaactgccaccagcaatggaccaccgagcgatgggtgtgcggtcccggaggctatgtccaaacagcctgttggtcgccctgcggtcgcttcctgctcttcgtcagcagtgccgaaccgattctctaccgcctgcagttcgtgcaacagagtctgctatcctcttcggcggatgagaaggaaatcctgcccattgcagatctaaatgcttgtagcattgatgcgaatcgcacgcttgtcggtggtcccgcccagcagcttgcttgggatccgcatggcaattatctggtagtcacattcaaggcgaccaactgcatcgccgtcttccgcaccttcatacagaagttcgatctgcagatttcggcggcttactatctgagcggcgagacggcggcggagcacccgagcttcatctgcttccagccactctacgaggataacgatcgctccgtgctgacgatcgcctggtcgtcgggccgcatccagtactacgccttcgactga

SEQ ID NO: 38352 - protein, 466 aa, DROSOPHILA [sequence omitted]

SEQ ID NO: 38353 - DNA, 3119 bp, DROSOPHILA
aaccaaaaattatccaatctggctttgatttcagtgatcagcttttgtctaaatgccattattattagtgttagctaaaataattataatctatccaattagcttcaattcgtagataagttcggtctcccaacttttacagaatttctttaaccattaaccatgtagaacgttgtacttattaagttattacgcacttcgttgttattttgttgtcccgtgaattgttcgcacttttaaagttgataccatggcatcccataacgtacggcttgaaaaaaataactaaatgcaaaacaatcgttggggtcttccaatttcaggaagtagggagcagatgaacatcaaatctgaattcatttaaatacacgcccacactataggacaactaggacgacttttcattttaatagttaagtgcatgtatgtattatatttataaaattccaattatacacttaggatctaggaatgaaagctcttattccgattctcagttttctattacaaatgatgttgcatgtgtgtaacactaactatagctctagaatcgaactaaacgaactacaaagtctatctatgacagacggcagtgaggagcacttgaagagccatcaagttgtggatgtcgacacggccatgcaaccaactatcccatccgcacattgttcatgtccatgtctaatctatgttgtaaattccgcataatagggtaaaggaataattccaaaactttctaaaagttacgtgtctttgatctatatacaagaaatcctatctagagctttattgtgttcaatttgctatagcgatgatactagtagatcaacttatatacatcaaaacatagtaatattttttgtgcgagtctaaatgtacggctatcctaagcttaacaataaaataaatcaatcaaggtcatgctataataatcaagccacatattttccgattcataatgctttgaaactaaattttaattattaatattgaatcagagttataaggatcgactcctctccggcgaggagtccgcctcttgaatgtcgccctccatgggcctcatgtgatcgaagcgagcaatgtagctgggtttgtggtggcgatggcggcacgccttgtggcagtcatttgggatttcttcttggtcattctgttccaattttcggcgatacttttcctcctccctgcgctcatccaaccaaaacagctcgtatatgcggtcgtgccgctggagttcattcgctcgctccagatctttttccttctgcttcgggggggtgtatttgagaaagtagtcggcatacttgctgtcgttgtcccgccccggggaatgcaccggctccgatccgatcagctttatcgagtcattctgctgatccttcgacaacgattcatccgccttcttttcagtatgcccacacaccttttcttctatcttcaagggttcgctctccgcctcaatgcggcggcactggttctcctttagcttgagctcccggttaatctgccgcctttcctccctctgcaaaatctccatctgctggcgatgctccgcttctgagggaaacctatcccttgtgaagtagaacatgctatggtgtctctctttgggtttcttctcttggcacgtcttgtttgagtagcgattctttggaatcatacaagagtcccattgtatcatccttgaagggctatctttgatgttgtccttctgggtctgaatcgcagtttgaacatgggccttcgcttcggtatggaatttacgttgagactgtgcctgcgattgcactttgcttttcttctggcgagccgcggctgccgcggccgccacggcagccaattcccgttggatcgccgcatttttgtgttggcatatgtgcacagattttcgctgtgcagcaggagcagtagcagcagcagcaggaggagctgcagctggaggagcagaagcaatagaggctttcttaactgcagactccatgtggttgatctccttcgactgtgccttatgtgcagagcccagcagcttaatgttcttgcgcgactgggtcacctcgacggaagatggctccttcttccattccgccgggctcgtggtcgattgtttggcactcattgcaatgtggtgggatttggatgagttgaaaatttgtgattcggcaggcagttatgtgaattatgttaatatgtatggttgggctgggtttagtgggtctgctgtcatggaactaatattacacttaactaaaggcacacttagaattttgaatattcacattctcataccacacagacaggaatttttaaaactattgtgattaaatgaaatttgtggttcgaaatgaagaatactgactgagataccgcctccaaatcgatctaaatggcctcacctacatgaccaagtagctggacgacaagctgggcgaagactccgttagcgaggagcagctgaacatcatctgcgagctgctcctgcgtttcggcgacttggccacagaaaaggatcgcgccgtcgtcacacacgccatcaatctgctgacaaacatctccggcagctgcctgacagaactcaccctgcgttgctccaatgccgagttggagtcgcacaaggaaagagagctggacaacgagaaggaaaaagatacagaagctggagcgggagccaaaccccgtgagtgctgctcgcagtgcttcgaaaagcgcaatgttcggagtctggacgtgctactccgctacctaaggcaatctctggcccaacaggaggccgaggctagctcgcatgagttgctttccccagtgctgaccgtgctggtgaaatgtgcgcgcagcgatcgagttatgcgtcactatctacgccaggagattctgccgccgctgcgggacgttagtcaacgacctgaggttggtcaggagctgcgcaatcatcagtgccggttccttatactcaaggcaatctggcacaaaaatatggatcactgcgggtttttgtacgaaaaaacgttccgtctttataaacccaatagaagttacaatataaaatagatagaaaagatctacgacaaaaagaatcttcactcattgcattcgcgtttcaaaatatatgtatgtatatt

SEQ ID NO: 38354 - DNA, 1119 bp, DROSOPHILA
atgagtgccaaacaatcgaccacgagcccggcggaatggaagaaggagccatcttccgtcgaggtgacccagtcgcgcaagaacattaagctgctgggctctgcacataaggcacagtcgaaggagatcaaccacatggagtctgcagttaagaaagcctctattgcttctgctcctccagctgcagctcctcctgctgctgctgctactgctcctgctgcacagcgaaaatctgtgcacatatgccaacacaaaaatgcggcgatccaacgggaattggctgccgtggcggccgcggcagccgcggctcgccagaagaaaagcaaagtgcaatcgcaggcacagtctcaacgtaaattccataccgaagcgaaggcccatgttcaaactgcgattcagacccagaaggacaacatcaaagatagcccttcaaggatgatacaatgggactcttgtatgattccaaagaatcgctactcaaacaagacgtgccaagagaagaaacccaaagagagacaccatagcatgttctacttcacaagggataggtttccctcagaagcggagcatcgccagcagatggagattttgcagagggaggaaaggcggcagattaaccgggagctcaagctaaaggagaaccagtgccgccgcattgaggcggagagcgaacccttgaagatagaagaaaaggtgtgtgggcatactgaaaagaaggcggatgaatcgttgtcgaaggatcagcagaatgactcgataaagctgatcggatcggagccggtgcattccccggggcgggacaacgacagcaagtatgccgactactttctcaaatacacccccccgaagcagaaggaaaaagatctggagcgagcgaatgaactccagcggcacgaccgcatatacgagctgttttggttggatgagcgcagggaggaggaaaagtatcgccgaaaattggaacagaatgaccaagaagaaatcccaaatgactgccacaaggcgtgccgccatcgccaccacaaacccagctacattgctcgcttcgatcacatgaggcccatggagggcgacattcaagaggcggactcctcgccggagaggagtcgatccttataa

SEQ ID NO: 38355 - protein, 372 aa, DROSOPHILA
MSAKQSTTSPAEWKKEPSSVEVTQSRKNIKLLGSAHKAQSKEINHMESAVKKASIASAPPAAAPPAAAATAPAAQRKSVHICQHKNAAIQRELAAVAAAAAAARQKKSKVQSQAQSQRKFHTEAKAHVQTAIQTQKDNIKDSPSRMIQWDSCMIPKNRYSNKTCQEKKPKERHHSMFYFTRDRFPSEAEHRQQMEILQREERRQINRELKLKENQCRRIEAESEPLKIEEKVCGHTEKKADESLSKDQQNDSIKLIGSEPVHSPGRDNDSKYADYFLKYTPPKQKEKDLERANELQRHDRIYELFWLDERREEEKYRRKLEQNDQEEIPNDCHKACRHRHHKPSYIARFDHMRPMEGDIQEADSSPERSRSL

SEQ ID NO: 38356 - DNA, 3289 bp, DROSOPHILA
atggcggcggatgttggcctggtatctcccggcactccggcgttcacgcttccgttacgattttacaaaataaaagattcggaatcgaatagaaaaaacgagtgtacgttcctggcttggaatcagaaggtcgtgtgtgatgtagaaaagttccggacaacaactggcattgtcgacagttcgtctggggcaacagtcacaaatcgcctcgactacttgattgcccgggtagccggattcgttcagactcgcttgaaatttcgacttcacttgtgtgacctgtgtgtcctgacatcccttttggtgtcttgcacccaactacagcatgcccactctactccatagttttccatcgttttcaaagtcctgccgtttccaatggttgccccccgctcttcatttacccggaaccattgttttggatatttacacccggactcggtggcctattcctatatgatcttcaaaatatgttgagcgtagagtattccttttttcatgactttgtttaatgcattaatattaacctatctgaatgtattactttatctttacctttagttaaaaaaaaagccaacaatgaaacctaacaatgaacagaaaacaaatcgtatatagaaattataaataacttgaatcaagctaataacctaataaaactaaggtgtgtgctgatgtaatccatgtgaatgatatccacggtagagctaacccaatgtatccaacccctttacgtgcaggttgctatcaataaatgcatatttgatgcttagttttcaataacaaacatgggcgtaccgccgatcccggcgcgtagcaacctacttctggccgggaagcggacacaacagctggcgagcgtgttatgcggttgccaggagaaaggcgccactagaaactttgcgtcgggtaagtccaaagattactggattgtcgtagaaaaatatttcttggacatcagtttattgttatttcttgctatgattaggggattacaaatctatggattttccggtttatgctgttgttgctgcaacagctgtcgctgctgctgcaacagctgcatttgcagttgcagttgctgaacatgatgtggcttcaagtgcagttgctgcagcaactgttgttgctcctgctcctgctgttgttgcaactcctgctgttgttgtaactcctgctgttgttgctgctgctgcggttgttgctgcaacattagcttttgcttctcttggtactgtttctgctgagtctgtatctgttgcctctgcttctcgaactcctccagttgctcctgctgtttgagcaccagctcgtccatgttgagctctagatgcttgcgtgtttcctcggcggcgcggctaggcgtaatattccactcttgcatttgttgcggcagaatctgagagtgtaaaggactttggtgtttaattggagtcttatagtctggccaaaaaatgaaactaacctgaaataggcgttcgatggctagattagagccacactcatcgctgcagtacttgctctgcggcctcgcatgggagcagcaattgggtccgtggcactgctggatgccctgtagctccggattgaggaatatctccggactgaccgcccgcgggctcacctggacattggaagtcttgggtgccgccttatcccgcttcgtacctgcttgagtcggctgcgactcctttggttcttgggcgctgctgtttttgcgcttcgctgccgcagtggtcggtggcggcgcttgctggctggttgttgcgggcgccaccggtgcagcagcaggcgcagctcccgatggacctacgcccggggcattgagacttgtagaggcggcgttcgatgcggctgcacgttcggtggccaccaggcggaatatagtctgcagttcgggattctcttttttgcagcgccggcagtagtaatttttgatgtgctcagcgtccttctcggtgatctctatacagtcgccgtggtaccactcctcgcaaccatcgcagcctctggaaagcgtagttgacaagtggttaggcgggatctagccctttaaggccattcaactcacatcatgaacctggagcagtcggaggagcggcatatgcagtactcacggtctttctgcttaagaatggtggctatcttggacttgcgctcaggcaaatcaaattcccgtgcgatctcccgcctgatttcttcttcctgtttggaaatctcctttgtagctaaaaatatgattgctgtgcagcgtgtgaaactcacggtcttcttatcattgtccgtcatctcgcaccaatctttctgacaactaaagtccaattccaaatccgtcaattaagtttcagggaatttttctttttgcgatggagattgtaaatgaactgtattcctggctttgaatcagcaggtcgtgtgtgatgtagaaaagttccggacaacgactggcatttttgacagttcgtctgggggaacagtcacaaatcgccacgactacttgattgcccgggtagccggattcgttcagactcgcttgaaatttccactgcacttgtgcgtcctgacattccttttggctcccaactacagcatgcccactctaatccatagcctccatcgttttcaaggtcctgccgtttccaatggttgccccccgctcttcatttacccggaaccattgtttcggatatcaaaacccggactcggtggcctatgtctatatgatcttcaaaatatgttgagcgtagagtattctttttttcatgactttgtttaatgcagtaatattaacctgcattattaaaaaaagcctacagcttaagaaaatgtatttaatatgctaacttattttctagattatttctaaatacaaactaacaatgaacagaaaacaaatcgtatatagaaattataaataacttgaatccagctaataaactaatattaaggtgtgtgctaatgtaatccatgtgaatgatatccacggttgagctggcctaatgtattaatagcatgttgctatcaataaatgcatatttgatgcttagttttcaataacaaacatgggcgtaccgccgatcccggcgcgtagcaacctactactggccgggaagcggacccaacagctggcgagcgtgttatgcggttgccaggagaaaggcgacactagaaactttgcgtcgggtaagtccaaagattactgtcgtagaaaaatatttcttggacgtcagtttattgttagttcttgctatgattaggggactacaaatctatgtttttttctgcaggt

SEQ ID NO: 38357 - DNA, 1161 bp, DROSOPHILA
atgacggacaatgataagaagaccgtgagtttcacacgctgcacagcaatcatatttttagctacaaaggagatttccaaacaggaagaagaaatcaggcgggagatcgcacgggaatttgatttgcctgagcgcaagtccaagatagccaccattcttaagcagaaagaccgtgagtactgcatatgccgctcctccgactgctccaggttcatgataggctgcgatggttgcgaggagtggtaccacggcgactgtatagagatcaccgagaaggacgctgagcacatcaaaaattactactgccggcgctgcaaaaaagagaatcccgaactgcagactatattccgcctggtggccaccgaacgtgcagccgcatcgaacgccgcctctacaagtctcaatgccccgggcgtaggtccatcgggagctgcgcctgctgctgcaccggtggcgcccgcaacaaccagccagcaagcgccgccaccgaccactgcggcagcgaagcgcaaaaacagcagcgcccaagaaccaaaggagtcgcagccgactcaagcaggtacgaagcgggataaggcggcacccaagacttccaatgtccaggtgagcccgcgggcggtcagtccggagatattcctcaatccggagctacagggcatccagcagtgccacggacccaattgctgctcccatgcgaggccgcagagcaagtactgcagcgatgagtgtggctctaatctagccatcgaacgcctatttcagattctgccgcaacaaatgcaagagtggaatattacgcctagccgcgccgccgaggaaacacgcaagcatctagagctcaacatggacgagctggtgctcaaacagcaggagcaactggaggagttcgagaagcagaggcaacagatacagactcagcagaaacagtaccaagagaagcaaaagctaatgttgcagcaacaaccgcagcagcagcaacaacagcaggagttacaacaacagcaggagttgcaacaacagcaggagcaggagcaacaacagttgctgcagcaactgcacttgaagccacatcatgttcagcaactgcaactgcaaatgcagctgttgcagcagcagcgacagctgttgcagcaacaacagcataaaccggaaaatccatag

SEQ ID NO: 38358 - protein, 386 aa, DROSOPHILA
MTDNDKKTVSFTRCTAIIFLATKEISKQEEEIRREIAREFDLPERKSKIATILKQKDREYCICRSSDCSRFMIGCDGCEEWYHGDCIEITEKDAEHIKNYYCRRCKKENPELQTIFRLVATERAAASNAASTSLNAPGVGPSGAAPAAAPVAPATTSQQAPPPTTAAAKRKNSSAQEPKESQPTQAGTKRDKAAPKTSNVQVSPRAVSPEIFLNPELQGIQQCHGPNCCSHARPQSKYCSDECGSNLAIERLFQILPQQMQEWNITPSRAAEETRKHLELNMDELVLKQQEQLEEFEKQRQQIQTQQKQYQEKQKLMLQQQPQQQQQQQELQQQQELQQQQEQEQQQLLQQLHLKPHHVQQLQLQMQLLQQQRQLLQQQQHKPENP

SEQ ID NO: 38359 - DNA, 4115 bp, DROSOPHILA
ttcttatcattgtccgtcatctcgcaccaatctttctgacaactaaagtccaattccaaatccgtcaattaagtttcagggaatttttctttttgcgatggagattgtaaatgaactgtattcctggctttgaatcagcaggtcgtgtgtgatgtagaaaagttccggacaacgactggcatttttgacagttcgtctgggggaacagtcacaaatcgccacgactacttgattgcccgggtagccggattcgttcagactcgcttgaaatttccactgcacttgtgcgtcctgacattccttttggctcccaactacagcatgcccactctaatccatagcctccatcgttttcaaggtcctgccgtttccaatggttgccccccgctcttcatttacccggaaccattgtttcggatatcaaaacccggactcggtggcctatgtctatatgatcttcaaaatatgttgagcgtagagtattctttttttcatgactttgtttaatgcagtaatattaacctgcattattaaaaaaagcctacagcttaagaaaatgtatttaatatgctaacttattttctagattatttctaaatacaaactaacaatgaacagaaaacaaatcgtatatagaaattataaataacttgaatccagctaataaactaatattaaggtgtgtgctaatgtaatccatgtgaatgatatccacggttgagctggcctaatgtattaatagcatgttgctatcaataaatgcatatttgatgcttagttttcaataacaaacatgggcgtaccgccgatcccggcgcgtagcaacctactactggccgggaagcggacccaacagctggcgagcgtgttatgcggttgccaggagaaaggcgacactagaaactttgcgtcgggtaagtccaaagattactgtcgtagaaaaatatttcttggacgtcagtttattgttagttcttgctatgattaggggactacaaatctatgtttttttctgcaggtatataatttgagttttctgtggtatttgggccttcttttgctgctgctgcaacagttgaagttgaagttgctgcagatgatgtggcttcaattgcagttgctgttgctcctgctgttgttgctgctgctgttgttgctgctgctgtggttgttgcagctgctgctgttgttgctgctgttgttgttgctgctgctgttgttgctgttgctgttgttgctgcaacattagcttctgcttttcctggtactgtttctgctgtgtttgtatttgttgctggtgagccaggcgtcgcctctgcttctcgaactctaccagatgctcctgctgtttgcgcaccagctcgtccatcacctcgtggttgtaggtggagtgcagcatcaggccgagcaggttcgctcgcgaggtgagctgctgccgcatcacgcgctcctgctccatcaggtcgtccatcttgagccattgacgcacacgctccagatctatctcagcacgccggatcttctcccaggcgtagtgcttgaagcaattcttctttggcgcacgacaaaactcgcccgtgggattgaagacgttgttcactaagggcgaaccacacacatccgtatcgttcaccttcggatccttgctgtgctccggacacaatactctcaatcgcttacagtaagtcttacttgccggattgtagaaatcacaaaacatattgtttccctccattcgcgttttgaatatgctcccgaagctggcctgcgattcgtatttgttgaagcacttctccatatgcttgatggcagtgcgcgagtgaatctcgtggccacaggtgatgcagtacatgctctgttcgtcctccatgtcggcggtgtcttgtgaccccaatgtatcaatggagcttcgtttggctcgctccaccaccatgttgagctcttcggagcgcttctctagctcggcaagtgcgaaacgcaccagggactgcttatgacgaatgttatcaagatgcttgcgtgtttcctcggcggcgcggctgggcgttagattccactcttgcagtcgttgcggcagaacctgagagtgtaaaggactttggtgtttaattgtcatagtctggccaaaaaatgaaactaacctggaagatgcgttttgtggccagattgaagccacacttatcgctgcagtacttgctctgcggtctcgcatgggagcagcaattgggtccgtagcactgccggatgccttgtagctccggattgaggaatatctccggactggccgcccgcgggcccacttggacattgcgactcttgggtgccgccttttcccgcttcctacttgggccggcttgagttgcctgcgactcctttaagaccgtcgccgcctggacaacgcaggtgcggaatatgcagcgcggcttgtggcccacgcgaacgcggcacgcgtcgcactggttgcaattgggacgccggcatccctcacaggtaccacaacgtttgcccatctttggttctcgggcgctgctgtttttgcgcttcgctgccgcagtggtcggtggcggcgcttgctggctggttgttgcggacgccaccggtgcagcagcaggcgcagctcccgatggacctacgcccggggcattgagacttgtagaggcggcgttcgatgcggctgcccgttcggtggccaccaggcggaatatggtttgtagttcgggattctcctttttgcagcgccggcagtagtactgtttgatgtgtttagcctccttctcggtgatccctatacagtcgccgtggtaccactcctcgcaaccatcgcagcctctggaaagcgaagggtacaagtagttagccgggatctagccctttaaggccattcaactcacatcatgaacctggagcagtcggaggagcggcatatgcagtacgcttggtcttcctgctttagaatggtggctatcttggacttgcgctcaggcaaatcaaattcccgtgcgatctcccgcctgatttcctctttctgtttggaaacctcctttgtagttaaaaatatgattgccgtgcagcgggtgaaacttacggtcttcttatatttgcgcttgtccgtcatctcgcagcaatctttccgacaacaaatccagtccaaatccaaatccgtcaattaagtttcatggaatttttttttgcgatggagatggtgaatgaaaggatatcgatagcctactaataatgtattgcagacaatcgataggttctggcctaataaaatatataatatttagcataaaactacgttgtagattttaattgatgtatgactatacaataaaaacaattttaggtatttattgtaagctgtgtataaatataaaatgcttcgtaacacttatatcgagagaactaattccatagtcttaataacaaacgatagtgtgttcgagatctatgagattaaatagagttcttgaaagagaaacaacgtgaatataaaacctacaaaagattgttactttatatatacctaatttttatttttcgataatctttaagattttgccgcggcccagtattttcgaagtttcgtaaaattaaacatcgatagaaaaattaagcatcgaattaccactgacattgtcggctttttctcacctctaataaccgcgcggttttttctttgtatttcgttaccattttttctcaactgaactgaattgaatgtgaatagtctgcaattatggcggccctgagcaacctaaaacagtgtccgccgttctccacgctgccggatctggcgctgcggcacaatcacatcccagagctggaacgctatccgcagataaacctgaacagcgaacttctggccaatccggctggtcagcggtactacggcggacagagcttcgtatctgtgaatgagggtgtcctaaagcgcatagctcgcagcttctttaatggcggattctggaagacgctggaggaggcacgcagcccagagaccagggagcaggcgccgcttattgcccaggcgggtgatttaatcgcacaatttctgggcctggccaccggcctgaggatcctcccgcacacccagcagcttagtgcagagcgta

SEQ ID NO: 38360 - DNA, 1992 bp, DROSOPHILA
atgacggacaagcgcaaatataagaagaccgtaagtttcacccgctgcacggcaatcatatttttaactacaaaggaggtttccaaacagaaagaggaaatcaggcgggagatcgcacgggaatttgatttgcctgagcgcaagtccaagatagccaccattctaaagcaggaagaccaagcgtactgcatatgccgctcctccgactgctccaggttcatgataggctgcgatggttgcgaggagtggtaccacggcgactgtatagggatcaccgagaaggaggctaaacacatcaaacagtactactgccggcgctgcaaaaaggagaatcccgaactacaaaccatattccgcctggtggccaccgaacgggcagccgcatcgaacgccgcctctacaagtctcaatgccccgggcgtaggtccatcgggagctgcgcctgctgctgcaccggtggcgtccgcaacaaccagccagcaagcgccgccaccgaccactgcggcagcgaagcgcaaaaacagcagcgcccgagaaccaaagatgggcaaacgttgtggtacctgtgagggatgccggcgtcccaattgcaaccagtgcgacgcgtgccgcgttcgcgtgggccacaagccgcgctgcatattccgcacctgcgttgtccaggcggcgacggtcttaaaggagtcgcaggcaactcaagccggcccaagtaggaagcgggaaaaggcggcacccaagagtcgcaatgtccaagtgggcccgcgggcggccagtccggagatattcctcaatccggagctacaaggcatccggcagtgctacggacccaattgctgctcccatgcgagaccgcagagcaagtactgcagcgataagtgtggcttcaatctggccacaaaacgcatcttccaggttctgccgcaacgactgcaagagtggaatctaacgcccagccgcgccgccgaggaaacacgcaagcatcttgataacattcgtcataagcagtccctggtgcgtttcgcacttgccgagctagagaagcgctccgaagagctcaacatggtggtggagcgagccaaacgaagctccattgatacattggggtcacaagacaccgccgacatggaggacgaacagagcatgtactgcatcacctgtggccacgagattcactcgcgcactgccatcaagcatatggagaagtgcttcaacaaatacgaatcgcaggccagcttcgggagcatattcaaaacgcgaatggagggaaacaatatgttttgtgatttctacaatccggcaagtaagacttactgtaagcgattgagagtattgtgtccggagcacagcaaggatccgaaggtgaacgatacggatgtgtgtggttcgcccttagtgaacaacgtcttcaatcccacgggcgagttttgtcgtgcgccaaagaagaattgcttcaagcactacgcctgggagaagatccggcgtgctgagatagatctggagcgtgtgcgtcaatggctcaagatggacgacctgatggagcaggagcgcgtgatgcggcagcagctcacctcgcgagcgaacctgctcggcctgatgctgcactccacctacaaccacgaggtgatggacgagctggtgcgcaaacagcaggagcatctggtagagttcgagaagcagaggcgacgcctggctcaccagcaacaaatacaaacacagcagaaacagtaccaggaaaagcagaagctaatgttgcagcaacaacagcaacagcaacaacagcagcagcaacaacaacagcagcaacaacagcagcagctgcaacaaccacagcagcagcaacaacagcagcagcaacaacagcaggagcaacagcaactgcaattgaagccacatcatctgcagcaacttcaacttcaactgttgcagcagcagcaaaagaaggcccaaataccacagaaaactcaaattatatacctgcagaaaaaaacatag

SEQ ID NO: 38361 - protein, 663 aa, DROSOPHILA
MTDKRKYKKTVSFTRCTAIIFLTTKEVSKQKEEIRREIAREFDLPERKSKIATILKQEDQAYCICRSSDCSRFMIGCDGCEEWYHGDCIGITEKEAKHIKQYYCRRCKKENPELQTIFRLVATERAAASNAASTSLNAPGVGPSGAAPAAAPVASATTSQQAPPPTTAAAKRKNSSAREPKMGKRCGTCEGCRRPNCNQCDACRVRVGHKPRCIFRTCVVQAATVLKESQATQAGPSRKREKAAPKSRNVQVGPRAASPEIFLNPELQGIRQCYGPNCCSHARPQSKYCSDKCGFNLATKRIFQVLPQRLQEWNLTPSRAAEETRKHLDNIRHKQSLVRFALAELEKRSEELNMVVERAKRSSIDTLGSQDTADMEDEQSMYCITCGHEIHSRTAIKHMEKCFNKYESQASFGSIFKTRMEGNNMFCDFYNPASKTYCKRLRVLCPEHSKDPKVNDTDVCGSPLVNNVFNPTGEFCRAPKKNCFKHYAWEKIRRAEIDLERVRQWLKMDDLMEQERVMRQQLTSRANLLGLMLHSTYNHEVMDELVRKQQEHLVEFEKQRRRLAHQQQIQTQQKQYQEKQKLMLQQQQQQQQQQQQQQQQQQQQQLQQPQQQQQQQQQQQQEQQQLQLKPHHLQQLQLQLLQQQQKKAQIPQKTQIIYLQKKT

SEQ ID NO: 38362 - DNA, 3072 bp, DROSOPHILA
attaatgatgagtactaactatttaaaaagtagcattacacaattacaaaatattaaccagtgttttcacaacttttgacccgactccgcctatttgcgatgcgctagaattcccactgttagcccggtttttacgttcgcacattcgtggaagcgtgtgaattccttgaattcaggccgtaaatgttctattattatcccaaaaaggagagcaggtgggcgcagaaaaaagggggtaggaggtgggtttttcgatattggccgaagggcatttttcaaattgaaaagtgagccccaaaaccgcaaggttcttaactacctctatttattggctcacataatagatgcaaaagggtccactgtcctcgcaagggctcctccattcggtgcactgaaaaaaaaaaaaatggaagtgccatcataaagaaatatattctaataaaaacttattttaattatactgggtagttaaaagtttttaggttgtacatagtttattgaacaatgattctctactttccagattactttccagtttcagttgaagttttctcgcagtgtagtgcaatcctgcgatgacttttgctatccttctctgtggctcctttcgccaatttcccggcccaagtgtggcccccatttggaaatgcaaaaaggcaccggatgcaccggcagttgcacttgcacccatcggagtggcgacccccttctaaccagcaacaccccccgccaccctctcttccaaccttttaaactccgtttaggtgtgcagacaacgaaacctacaatttgattatcgcaatgagaattgcagcacttggcaacgacaacgattcacttgggccctggaatccgtgagccccagcagccaggacctcagatccttggccaggagttggggcattcggtcagccgtcctaaaaactccggcacccttccgagtcgcgttcgcattttgtcaacatgtgtagctgtctgttttaatggtcaatttctcactctaaatggccactggtgccgggcgaaggcaagccagttttcgaaaaaggagcaggagtttctggccgagaccctcgggctgcgaaaaattcacaaagtaaagagagtgtccaaatattgcgctctattctaaggatattagattgttatgtatttaggtatttaccattatttaaagtgtttttagagccgacataggctaaataatttatattgtggtaggatggatcaaggaatcattgttaaatttttcccattaagcttaataatatcattttagtacttacattcatggttcgaagggtatgcagtagtcgttatgcaaaattcagctccataggcctctgcacttttttcttgagccccctttttcagtccggaagatgcgactggaacgcattttgcggccggcacataggttcctctggattctgcatctgcatctgagttcgaatcgaaatctctggttccatctcctgctcctactccaacggccaaccaccgactccaattggggaacacatctcatctgcatctccatctcctggcggcgaaaagagtaccccggaggaggatgcccacagcatttggtgacttttgccgttggccggaagtgtgaccgaggcaaaggaagtagttaaccgaccgaaagtgggcgatgtgaatggcggatggggggcagcaccactggtgcaccatcgaccagggtatccagggcgtggaatctccatccgctccatcttctaatggcagcaaatcatttacagatgtcgcaacattttgcataaaaatttgctgtcacagacaacacaagagtccggccgttagatgctgctgcaccacctggctttcctggaaaatgtggaaaagcggtggtggcaccacccagccacccaccattagtgaccttaaacgcttttccaagcaggaaatgcattttcatttagcagcggaagtagctgcaaatgagcttttagtttttcctcaccttcggcattctcgtgcgtccgcatttccggtccaccgtccacctggttcacctggttcacctggtccacatcctcccattgcatccacatactcaaccaactgttgctggatctgctcaagcattagcattagcgaccagtcaatggcccatcgatgtcctggtttttccattcgagttggggtttgagtttcgtcctggtttccgtccagcgcctccctgctcctttccctgcggaaatatgcgtctgccacacgtccgccaaatgacgacatgtgtgcgtaaagggagtgcactcgaaaaatatgataggataggatcataacttctaattgcgtgaaagtttcgtcctgccaatggctaatttcgcctgctgccaatagaaaagttagcatttatttgacattatcagtcgaacagcgacttctgaagatgattttgcagaattttaactacaacaatgaaaataatggcccaaattgggaatggcatacgttgttaggctcgtaatcgaattcctaattgatttgggcaataatttggaaacttaaaatttttgtcaatttttgcaatttttaatgatgttaccccttacataaaatgagaaaattgagccaaaaattaatttcctaaaatccaccaaaaactcattggggttgttagtattgataatgggctgctcaaaacagctgttctttcgtctaaacgaccatttttagccaagttataattaaaatccccattgtaattttcgaatttttggcaaaatccgtttttccgaatttcggccatcaaataatcagtttttttgtcacaactttaaaaataattgtctgaatattaagtgttatacctcgatgagatcgtaatgaaatttccaatcaaactgtgttcaaaaatttaaattaaatttttttgacatttttttcaaattttgatgatgttaccccttacaaaaaatgcgaaaattgacctaaaaattaatttccctaaaaacttcaaaaagtgatagggatcgttagtactggtaattagctgctaaaaacagttattcttacatctatatgagcatttttggccaagtt

SEQ ID NO: 38363 - DNA, 324 bp, DROSOPHILA
atgcaatgggaggatgtggaccaggtgaaccaggtgaaccaggtggacggtggaccggaaatgcggacgcacgagaatgccgaagaagatggagcggatggagattccacgccctggataccctggtcgatggtgcaccagtggtgctgccccccatccgccattcacatcgcccactttcggtcggttaactacttcctttgcctcggtcacacttccggccaacggcaaaagtcaccaaatgctcccgagggtctcggccagaaactcctgctcctttttcgaaaactggcttgccttcgcccggcaccagtggccatttag

SEQ ID NO: 38364 - protein, 107 aa, DROSOPHILA
MQWEDVDQVNQVNQVDGGPEMRTHENAEEDGADGDSTPWIPWSMVHQWCCPPSAIHIAHFRSVNYFLCLGHTSGQRQKSPNAPEGLGQKLLLLFRKLACLRPAPVAI

SEQ ID NO: 38365 - DNA, 2330 bp, DROSOPHILA
tcgaaacgcactgtacccgggtcgacgacataacctttcgcttttcactggactgcggaatggggaggagggggaggtagttcttacaaaacgggcttctatttacagttaatgatagattaggagtgttgctccgtacaacccgttgcaaatacatacgacatcgtccagatcctggagttcatggaccaccggacacactcgctaaattcgccaacgcattatataatctctggttacttagcacaaatcgtttcctcctccgtctccctccaccttctacacctatgtacacaaatgacaaaagtttctctgcacctgggccctgacgtagcatatcctatatacaatatatggcataaatagatataaatttataaagactaatgttaaacacacacatgacagacacacagacagacagacagacagtcaggcacacgcacacaaacacgtacaaattttggcgattttcatgttgattgcaaaaggtttccatatatgtgtgtactatatgtataatagatatagcagatcggcagggcgaatacagtgcgtggcattagctcggtgaattgctccgcaaattgctttattcgccaattactatacctgcacccatgaaacgcactgtatctgtatccacatgctcgtgtttaatttatctcatattcttatctccatcttcactctaatttctcgttatcgatcaatttatatatagaaagcattaaacgtataaataatttctttcgatatcggatcgtgtaaaacgtcttccaaagtgcattaaaaaaaatttaaatcataataacaaagcgtaaaaattacataataaaattacttaaagtttagcaatagctacaacagcagtgcaacttatatacacacacatctggtgtaaatagctctagttagatagatacacccttacatgctctccactccaaataatttcgtaaaaaaaaggtcacgaactagggctagttcccttagttccctaaaagaaggttgaaaatttgcgtttgttctggttctggttctggttctggttctgaatctggttgtgattgtggatgttctggtgcggacgttggtgatgatgatgctgctgctgttggtgatgatgatgatggtgctgatgactattggttcccactccattgcttatcggtttgaggggcaagacaggaacacaggcataggcagccggctccagttgggcattgtaaaactgcccctgcggctgtggaccggcgatggcagctggagcaacggcagcggttggagcagcgactgctgtccccggagcttggctggcgggtggcatcaggagcacaggcaccaccacgggttatacggagatctcgtagttcatgtcgtagatgctggctctatccggagtgcccgaattggaggcgttgctctgcattaggtgaccaccgccaccgccgcccgcctgttgattgtttcccactgacccgctgccgggaatgccaccgttttgctgctgttccagtgactgcatctccatggagtcggccatctccagcgctcgcacaaagctcatgggtcgcgttggcgtctgtttccgcttgatctgtggcgagggctgcgtctgcagattgccaccgccctgatttcccataggattgggcggaaatacggccactccgccgcgcaatgccggctgatagccgccgcctccagtggcgggattactggctgtcacgctagctaaactgccactgctgccggctgctccaaccgctccgccgcctccgtagcgcagtatatagctctggccagctccggacacctgtggcatggtggtgggactcgtgggattggagcgatgatatgaggctgctgccgcagccgccgcctgttgttgctgctgctgctgctgctgctggatggtgtagtcctggagtcgcgagtgcgtcataatcagcggatgtgctcctccgcccgccgtcatgtactgggcatgcggcatcactccggcggcggctccgctgctggacagcgtgcccgcactgctgccaatcccgctgctgaccacctgttgtgcctgctgctgttgctgctgctgctgtccggcgttgttggtgaatcccggcgacgtatccttccacatgtaaacgccgcgctgcggactgccggcgagctctcgtatattatccaccgtattgttggatcgtgcgtaggacaactctccgccggcaacgcctcctccagcaccctggcgcaccagttcgccctcggagaggaagcgtctctgtgggctgccaccgtacgccgcctgcgctaaagcggcatgttgcgga

SEQ ID NO: 38366 - DNA, 330 bp, DROSOPHILA
atgccacccgccagccaagctccggggacagcagtcgctgctccaaccgctgccgttgctccagctgccatcgccggtccacagccgcaggggcagttttacaatgcccaactggagccggctgcctatgcctgtgttcctgtcttgcccctcaaaccgataagcaatggagtgggaaccaatagtcatcagcaccatcatcatcatcaccaacagcagcagcatcatcatcaccaacgtccgcaccagaacatccacaatcacaaccagattcagaaccagaaccagaaccagaaccagaacaaacgcaaattttcaaccttcttttag

SEQ ID NO: 38367 - protein, 109 aa, DROSOPHILA
MPPASQAPGTAVAAPTAAVAPAAIAGPQPQGQFYNAQLEPAAYACVPVLPLKPISNGVGTNSHQHHHHHHQQQQHHHHQRPHQNIHNHNQIQNQNQNQNQNKRKFSTFF

SEQ ID NO: 38368 - DNA, 3952 bp, DROSOPHILA
tctctttttctctttcgggcgaggagcgattctagccttgcgtttgcattggtgttagtatcggtgttagcttacgcacacatttctaatatcaattatccagggggaaaatttaagaaaaaaataagatcgctggctttctcctgattttcgtacaactattttcaatttcgtgtgcgtttgtcgttttgcctttttcgtctttccccacttttcttcgttctcttttccaccgctgcttcttcttcttctcttcctcgtcctcctatcaccctcttgctcgttcgcctggctcttcacatataccagcagacacacacattcacgcacgcacacacatacattcgcacacgcacgttgttgctgcaacgttttttttgttttttatttcggcgtcgcctgcattttcatcttaattatcgctctcgctcgcacgcactgcgagtttcaattcgcgtaaataacttcacttttcccggctttgtgcgacttttcattccattctaatgggcggcgaacgttcggttcgcattacgaaaaaataaataaaaaataagcggagcgtacgcataatttcgtcggtcggtggaaaaacatcgaaaaaccatcgagccatcgaagtgacatcgtagcattgtgatatcgatatgttgtcgatgataaagaatcgacaaatcgatactcatcgcgcatcgatatttcgcccatcactctcacgatggtacacgaaaatatactagattataccatttggcaacattggcgttgccagataatagaaaccgttggactaacagttcaaaattattatttaaaaatttaacggttgtagctgttcaaaaacaaacggctaataatttagctcagctcaaaaattaagcacttgagttacaaatcatacacgaattaataagctatcacactttagcacggacctttagccaatggtcacactgcagcccgtgaaaacaacgggcaatcattcgataacatcagttgaaaatcacgcttgctatcgattacttatttttgttgtattaaaaaatatttttgcgaattgccaaaaaaactgaactatccactggttaactggtcgagaccagccaaaatcacgagacacgatcccacttaaaagccagacggggagagttcagttgtgaagcagccagaagtagcgaaaacacttagcggcttttcgtgtgacgccgactttggctaaggaggaaaagcgattaaagcaggaagagccagaccaggcgccatcgacccacagacatgtcgcgcagcgtgcgggcggagacgcgcagccgggcgaaggatgacatcaagcgggtgatgcaggcggtggacaaggtgcgccactgggagaagaagtgggtgaccatcagcgacaccaccatgaaaatctacaaatgggtgcccatcgcctccgccagtgagaagaaggccaagctggagtcctcgccgggatcggctgctgtccggagaccgccccccggctcgggcgttacgccggtcggcggcagcaagagcgataaggagaactctcagaagggcacgcccacgccgccgcagatcacgcccagctaccagggactaaccgccgaggactctaacacctgtaaggatggctatgtgctggttctctttaaataagtagttgggttctatgtctgcaagcactgcgttaggagccaaaacaaaaaaacaggatgcagtatatggattttaggacctttacgaggtgccattagtctcataagcttgcggagctgctataaaaattgctgtctttgcattagcgatattgtttacatttggtttttggcttcaaagcgtatttcctattcagcacaatttatcactccaaagcacatgtttactctgtcttattcatgcgatctctatctgtacacaggtttctccgtcgtgtccgacagccagggcgccgacttcgtgtcgagtatgcccttctctgaggactcgaactcgcagggcagcgatggacccgtgaagcgattgaagacgagcgactagccaaacattcgcaggcacagcgtctacagcagcagcagcaactaactaagagccctagttaagttaggttagcaccgacagcaccggacgacgagagagtatctgcctcagcccaagacttaagcacttcccttacactagcagtttctttacggctgtcagactgtcccgccataagcctcatttatttgtcatcaaagcgggggtagctgatggtcgataggtcataggtccatagcattaagatcaaatgtgacaacttatttattagaaagacatgcgaatcgatttgagtacgaacgtagaatggatatgtaattttgtaatagctgcttaagatacaaaacagccagtctgaatgttgtaaaccgtgtaaagttttttgactttcgatttctagacgttttgacaacaactagtttataacttagcgtactaacataaaggctacttttttttgttcactataaaactggcttgaaaacaattgatgtactcgttcataagttgattttccttgtaaatttcgcttgtaaacgcttttctacgcattcagtgaatgcaacagacttgaaatcgaagcgtttacaagctaaagcttatagtttgttaacgaattgatcaaagcaagtcaaaccgaaaacgaatatgaacccgcgatagatgcacaaagattaaccgaaatcgaaaattgaaccagtaaacctctttatagtacacttaccaacataaatgtgacattaacatttaactgccagcagggcgcgaaaaatatgcaaatgttcgctgaagatttacttattgttttttttttacatttttttatgatttttctttattgaatgttttagttttcttcatcttacaattttccccccgtatgtataataataaaaaaaagttttattctttcaacaaatagttttttttttcatttcattcgtagttttactcttattatgttctggttttctttttcgttatccattatgtagcttgacattaaatatacaattaacttcacatatagcgttgtatatggcccgattggcgtatacagctttagtttctctcatctttcactaaaatttatgctaaaacacgcttaaatgaagggaagcacagattttgcacagagaacgaaaatgaaaaaaaaaatgcacacacatttcgactttcgaagagaaagataaatcataaatcataatacaattcataaatcgatgatataattaaaaaataaaatatttatatatttatatatggtgtgtaaaaaacacgcgcgacaagttgcaactacacacacaaaacgtaataaaatagagaaaaatagaaaagcagatcgggttgcgcgagaaccaaaaaaaaaaaaaaaataaaaaaacgggagaaaggaaaagctacgcttttctttgttgcacagtgtaggcggttggcggggggaggggattgcacgtatcttttgtttttggaatgtattgcgaattggaaatgcggaaaagcccctggtattctggattattagcactttcctgtctgtcctgtctgtgtgtgtttgaataaataattaaattataattataattataattaatagatatacatatgtgtgtgtgtgtggggaatggggaatgcttgttttctatcctggatttagcacaaaagtttttgctctttcgctcgatacatttaggttcacacatatatatatatatatacatacatatataatttgttgttgtatattttttagctcgcttttttttgtttgttattttttagaaaaatatatagaaatcctagctgggaatcgtcccctaattgccttgtgtatacatatagatattttgttttccgatttacatacatatatagttaatattgtcatttagctttcaaaaaaatatacttcttg

SEQ ID NO: 38369 - DNA, 1655 bp, DROSOPHILA
aaatcacgcttgctatcgattacttatttttgttgtattaaaaaatatttttgcgaattgccaaaaaaactgaactatccactggttaactggtcgagaccagccaaaatcacgagacacgatcccacttaaaagccagacggggagagttcagttgtgaagcagccagaagtagcgaaaacacttagcggcttttcgtgtgacgccgactttggctaaggaggaaaagcgattaaagcaggaagagccagaccaggcgccatcgacccacagacatgtcgcgcagcgtgcgggcggagacgcgcagccgggcgaaggatgacatcaagcgggtgatgcaggcggtggacaaggtgcgccactgggagaagaagtgggtgaccatcagcgacaccaccatgaaaatctacaaatgggtgcccatcgcctccgccagtgagaagaaggccaagctggagtcctcgccgggatcggctgctgtccggagaccgccccccggctcgggcgttacgccggtcggcggcagcaagagcgataaggagaactctcagaagggcacgcccacgccgccgcagatcacgcccagctaccagggactaaccgccgaggactctaacacctgtttctccgtcgtgtccgacagccagggcgccgacttcgtgtcgagtatgcccttctctgaggactcgaactcgcagggcagcgatggacccgtgaagcgattgaagacgagcgactagccaaacattcgcaggcacagcgtctacagcagcagcagcaactaactaagagccctagttaagttaggttagcaccgacagcaccggacgacgagagagtatctgcctcagcccaagacttaagcacttcccttacactagcagtttctttacggctgtcagactgtcccgccataagcctcatttatttgtcatcaaagcgggggtagctgatggtcgataggtcataggtccatagcattaagatcaaatgtgacaacttatttattagaaagacatgcgaatcgatttgagtacgaacgtagaatggatatgtaattttgtaatagctgcttaagatacaaaacagccagtctgaatgttgtaaaccgtgtaaagttttttgactttcgatttctagacgttttgacaacaactagtttataacttagcgtactaacataaaggctacttttttttgttcactataaaactggcttgaaaacaattgatgtactcgttcataagttgattttccttgtaaatttcgcttgtaaacgcttttctacgcattcagtgaatgcaacagacttgaaatcgaagcgtttacaagctaaagcttatagtttgttaacgaattgatcaaagcaagtcaaaccgaaaacgaatatgaacccgcgatagatgcacaaagattaaccgaaatcgaaaattgaaccagtaaacctctttatagtacacttaccaacataaatgtgacattaacatttaactgccagcagggcgcgaaaaatatgcaaatgttcgctgaagatttacttattgttttttttttacatttttttatgatttttctttattgaatgttttagttttcttcatcttacaattttccccccgtatgtataataataaaaaaaagttttattctttcaa

SEQ ID NO: 38370 - protein, 154 aa, DROSOPHILA
MSRSVRAETRSRAKDDIKRVMQAVDKVRHWEKKWVTISDTTMKIYKWVPIASASEKKAKLESSPGSAAVRRPPPGSGVTPVGGSKSDKENSQKGTPTPPQITPSYQGLTAEDSNTCFSVVSDSQGADFVSSMPFSEDSNSQGSDGPVKRLKTSD

SEQ ID NO: 38371 - DNA, 3813 bp, DROSOPHILA
agcaaatgataaatcatacgaaaagagcaaaggaaaagagtgtggaaacagaaaccaaaggaaaccaaaaagtaagaggtcaagaaaatcaaatggaaaactgttgtttacattgaagcgagatgggaaatgaaaacaaaatcaaaaacataaacataaacaaacaacggttaacggttacaattacagttaagtaaacacaaattacgattacaattacaacattaactaagccaaacaacagcaacaacaacaacaacaacaacaacaacaacaggtggattcagcaatcgctctaggaaaataaacattagcttatattgcaaatctaattggaatcaagcatagatattctggaaacattttgcaactattattattattttttatttttttttttgattttacatgacattagagagattgctgtttcgccacctgcggcgcactattagggtcacattagatacaatagatataggatacatagatatatgtaataggaatctgagtttcgcatagcaactgcttcgcttttctcggtgatattgcaaaatcttgttgtttacccaccttactgtaaagcgttgtgctgcccgaccgttgattataaccattgccctcggccatatatgtctttacctgaattccccgcttctcgcgactcgcgtcgtagaaggagcgtggtgagtactgcaccgcagtgccgcgcataccgccaccgctgcccactccaccgccgccaccggatacagcggcggtaccattgccgccggcaccgctcccggcgcctgtctgctggccgctccggtcattgcaaatggtgctgatcgcctggttttgcacctgagatcgacgcgatgcgtacttcttcggattgaggaggctgcaaagatgcgaatgtgcaagttggatcaatcgcgtaaaggaaaatataaaaccaaatataacttaatgtttgttgaaacatagaaaagtgtaatgaaaccctaataggtacatcaataatccccagaatacaatcccactctataataataatagtacttcaaatacatttttattatgctgatgatatgtaacatcctttgatattctataagaaaaaaaaacatacccccaggcgtagcgaaaagtcaagataattggttattagccacgacggctcgcaatctgcaatactatcatttcaatttcgtgtcgaatttcctccctttgggggccatgtaatttgaagcccataattggcagttcaatttggtcatttattatggtaatttccgcacgccccgagacaaaaggacaaaaatggtacagcgctatgctagaggagcctagccactcacctgggatactgaggtccgaactgtgtgtagcagcagttgtgccaacagccgcgcgagaacggattgtagccgcccttgaattttcccgtcacctgctcattggttgtccgaccccgcgacaccagtaccatgtggaagccggtcagtccgaagatggggatggccaaaatggtcaccaggcccatcaggataatgctatatacggatagagggttaagtcaaaccaagtgggggtataaagcagatgcctacgctcccttaaggagcattctcattaatagataagttaagagtttaagaaatagtatgatatatggtttcaaaagagtcgttgtctgttttggcaaaaggatacgctacgatgggcgccgtgtccttgatgttgggcataatcttcagcacgtagaccaggcacagcgagaagatgctcagcatgtgaatggacagtgagacgaggaagaagaaaaagaatctgtaattccgcctgccaatgcagttgttcacccacggacagtgatgatcgaaggtctgaagagatgatggtttatgttaagatcacaattttctatagattatagttcgatagcactcacctctatgcagtgattgcaaacggagcagtgggaacagcgtggcgggcgatagaacttacaggtgacgcaccacttcatcttgacggtgatgccgttgatctcggcattcttgtagagcggggcgcgcagctcctcctcgcagtcttcgtcgggcgaggctagaatgcagtcaagtttaggccgtgacgactggctttgtcccctgctcagcacgctacatacctttggggatgatgcccggatccataaacgtggccagcgtaaagttggccagcacgaagaatgtgatcacgccctggtaggccagcacccatggatgactcttcacatagaactggcagctgcaaaaatcgaatggaaaaggagtttttattagtgctatttaaagtactgcccttttttgcccgtaaatttatgagccaattattaacaattgaccatctctaaaagcctttgagcctaactgaatttttaatgaaattatgggtctggataccgacccattgctgggctgtccaattgccaaaagtgggtcgactactacatgattagtgtgctcgtctagtttcaaccctaattaaaaacgctcttcaaactggtttcaaaagtagtgcatacacacatgcagctggctaagtaaaagtggttcaaaaacactcggttgccccctccttggcattccattcataacgatactaccttctcatattcaggaggttggtttaatgccacaacccaagaacggtgtggacaaatttgatggttttgcaatcagccattttccgggaatgtggctgctgctactgctggttgctatgccgtgaagtaggccgaaaattcgttggaaaatccgaccagccacattgttgaccattaagcaagtggtggccgccagccaggtggtttgatatccagtagcccgtccgtccagaaggccaggagagccccaggctacggttatccaacgtgaaacgcccgttgtgtcgccgcaatcactttagagtctactgaaccggaactgtttgtcgtcggctgaaaccagtccagttttccccctttttgaaatcccaaactcgaccgactttccctgttctttcatacatacgagtgagtgtatatgccaccccaaagaactcgacccgcatcggaatgaaaatgagccgagcccaaacggaatgaatgtgagctgaaccttaacccgttttttttcgaccctgtttagagttcagagaacaaggaatttttaatttaaaacaaacgagagacacccatctacgcactcggcggaaactataatgcttataagttattatattttataacctgaattttatcgaactttaaatgtgctcattcatattcagatgacgtttttctgcgctttaactttcgcaataaaaatctgttattgtttgcccgcccggttttgcctttacaaatgtcacagttttgacgcaggtgctcaaggggttaagtcaaccacagagccatgaatgttgcaaagttgcaagggcgatatacacgtgtcctttagcccatttccatttccgtctgtcctcgccgccccccaaacttcacagcttttccatcctaccccccgcaccacaccccctccagattttcagcccgccttttctctccacgacctctgatgcatttgcaatgatgtgcggaactttccggcggtggtttcggtttacgagctccgtgtaacgggttacttaaggtgaatgtattactttcttccggcatttctcactgcattacgatgctctttgccttccggctcggctggctctcttttaccagattgccgttgaattctaatggataaacgtatcccaaatgcagccatcatcatcatcatcatcatc

SEQ ID NO: 38372 - DNA, 1101 bp, DROSOPHILA
atggtcaacaatgtggctggtcggattttccaacgaattttcggcctacttcacggcatagcaaccagcagtagcagcagccacattcccggaaaatggctgattgcaaaaccatcaaatttgtccacaccctgccagttctatgtgaagagtcatccatgggtgctggcctaccagggcgtgatcacattcttcgtgctggccaactttacgctggccacgtttatggatccgggcatcatccccaaagcctcgcccgacgaagactgcgaggaggagctgcgcgccccgctctacaagaatgccgagatcaacggcatcaccgtcaagatgaagtggtgcgtcacctgtaagttctatcgcccgccacgctgttcccactgctccgtttgcaatcactgcatagagaccttcgatcatcactgtccgtgggtgaacaactgcattggcaggcggaattacagattctttttcttcttcctcgtctcactgtccattcacatgctgagcatcttctcgctgtgcctggtctacgtgctgaagattatgcccaacatcaaggacacggcgcccatcgtagccattatcctgatgggcctggtgaccattttggccatccccatcttcggactgaccggcttccacatggtactggtgtcgcggggtcggacaaccaatgagcaggtgacgggaaaattcaagggcggctacaatccgttctcgcgcggctgttggcacaactgctgctacacacagttcggacctcagtatcccagcctcctcaatccgaagaagtacgcatcgcgtcgatctcaggtgcaaaaccaggcgatcagcaccatttgcaatgaccggagcggccagcagacaggcgccgggagcggtgccggcggcaatggtaccgccgctgtatccggtggcggcggtggagtgggcagcggtggcggtatgcgcggcactgcggtgcagtactcaccacgctccttctacgacgcgagtcgcgagaagcggggaattcaggtaaagacatatatggccgagggcaatggttataatcaacggtcgggcagcacaacgctttacagtaagagcgattgctga

SEQ ID NO: 38373 - protein, 366 aa, DROSOPHILA
MVNNVAGRIFQRIFGLLHGIATSSSSSHIPGKWLIAKPSNLSTPCQFYVKSHPWVLAYQGVITFFVLANFTLATFMDPGIIPKASPDEDCEEELRAPLYKNAEINGITVKMKWCVTCKFYRPPRCSHCSVCNHCIETFDHHCPWVNNCIGRRNYRFFFFFLVSLSIHMLSIFSLCLVYVLKIMPNIKDTAPIVAIILMGLVTILAIPIFGLTGFHMVLVSRGRTTNEQVTGKFKGGYNPFSRGCWHNCCYTQFGPQYPSLLNPKKYASRRSQVQNQAISTICNDRSGQQTGAGSGAGGNGTAAVSGGGGGVGSGGGMRGTAVQYSPRSFYDASREKRGIQVKTYMAEGNGYNQRSGSTTLYSKSDC

SEQ ID NO: 38374 - DNA, 3596 bp, DROSOPHILA
aaagcaattccacaccccattccagtgcccagaaagccaaggcattacataaaggcggtaaatatatatgactaaataaaccaaagtcccagaatcaaaaggggcaaggggggggggacaaaacagctgtcaaagattcctcagttgagagttaggatttgtgctgacctacggcaattaaccgtcgtcatttgccatcgcaaaggaggaagcagccatttcttccggttcggtggcgtatacgtaacgtttgctggccgtaaggatagctcaatcgccaggacactgacttatgctggctccagttagacgcacagatgactacgcatttatttctcgccatccttcgtcgtccctgcgaacttttcagaacttgttttttgcacccagtgtgcttatttttattttatttttttttttttttgtagccagagtttggagctggcgccgtctactgtctgttgattcagattcggttatagattctggattcatttacggtttctgtgtctgactttcgggcattgacttggcggcaacttggctctgtttctgaccccaagccaaaaacgtcgcatctccctgccatcttttggcattttccgctgttgcgaacattacgcattcgccctgtgggacggctaaatctcggtgagcaagctaattatgcccatgtggcactcgcttataattcctatcaatttaattttgtcgaatgtatgagaggtgttacaccagtctattcagatttcaatcgacttgacttgattaaagcatttgtaaaccatttcaaaatttggaaagcaaattaaaacaattacgaattcattttaaatggcaaaggttttaaataagttcaagctttgtcaaatttcgctacgttgcaactagtgtcacatgggcataaaattaaatttgcaactttggtgcttgaggcgagtagaatcaacaaggcgaaaaagcattgagaagcgataaagcaaagcggtattcaaactaattaaaatactatgtatttgcaggtattcttaatcgttttattcaaatcgttacaagcaagaaaatcaaacgaattgcagcaaatggcgtaaatcaaatggtaatagaagcacttgttttgccgcataattttcatagatattttgatatttgtttttttttttatcattttttgtttcgtataggtgaggcttaagagcggtgggtgcttttggatttttggtgatgggtacttctcataggggttgtccttcttcttgctggccgcaggtgtgctcttcctgggtcgattcatcattggatcgtccatggttcgcgatgattgctgtctcgtgtgcgccggcggtccaggtggcttctttttcttctttttcccagcttcaggttgcaatggattgaaggcgaactgcagatgttgctgctgctgcgtctgttgcagatgttgctgctgttgctgctgctgctgctgctgctgctgctgctcgcggcgctcgaggaaggcggcattggccgaggctaccgttgctattctctgctgctgctccagatcctctagttccttctcccgcttcttggtcatttgcaccaactgcgaactgcgccgcctgagggcggctgcatagggtgtgggcgttgccaccggcggcaccatgtctcccacaccgaatagccgcctgatgcgccgccgactgttgatgaagcccagccctagctgcacgcccaatcccaaacccgcacccgccggcgctgtcgtctggctgagggaactgctcgcgccaccctcactgccggcgcccagcatctggctgaagttactgtccagatcgcaactgctggccgagtcggcgccacagggaaagagatatgtattcagggtgcttagggttgtggatgtggacgtgccagttccggtcatggttccaatgcgactaatggcgcccgtattgctgccacccagcggattttgctgttgcgagtcgagagatgctgatcctgctgctgctcctgctgccgatggctgatgttgcaggttaagcgggagactcagtggcagtggcagcataactgccgtggaaccactcacgctgccggtggtgctgctgtcgtagctgtgcggattcacataaatgtggttgttgttggtggcggttgatgatgcagttgctccagctgtagtgcttcctcctgctgccgtgctaccagctgatgcagtgctgctcgtgttgaccaccaatgtgctgttgctgctctcatggtgattgttgttgctggcttggttagcgttgttgctgctgctgctgcagctggtggtgttgttgttgatgctgctgctgttcgtgttgctcaggttgaccctgtaaaagctggtgctgctggtggcaatattgttgttgttgctgctgctgctggagcgtgcaggcgccgttgcaggtcgcgatgcctgtgatcccgatcccgatcctgatccggatccaggtgcactagcctccggaggggcagtggttgttgctgctgcagctggtgttgcaactgatgtggcaggcgtcgcctgctgctgctgctgttgcgaatgatcgttgccattgttgctgctcattgctgtggttgtttgacgcctttttgcgttaagttctcgattttaaatatacttcattaatgtttatagctcatttttaataacccaatcattatattacatttacttcaattatatgtgctcgatagctcatttactttttaataatgatagtgaacacttattaacatttttaagggaggtacttcgtttcactagtaagctattttgagaaaagttttatgttctcgtggtgtaatatcacaaactagtgaaatctttaagatttaatgaaatataacatctttggttttctaaattaaacttaataatttatttttatttcgttagattttaagttcacttcataactttttcttcggtaaattctagttacggtgcagtggctattagtttatttgtttttaaccgtttaacagtgtttaactttacatttattgatgttattaaattgcttctaggtgtttattgtgcatagatttgtttgatttagttatatatacatttatgctagttcgtttgctatgactcctttaaagaccctccttttacatattacaattcatgtatcttcttttggatggcatccaaatggagttgaatgcactgctccgattgctggtaaatggcaaatggcgactactaaacggttatggccagacgttagctaatcgctcagttttcccggacctttcacgcacttttctctcgcggcactcgaacaaaaatcacagacagtggggtcaggaggtcaatgaagcttatcactggcacgcacatttacgcagcaccgcaggacacttgcaaaaaaaaaattacttaaaaaaatggctgtttttacgcggcattttttaaatgatttttattaatttttatttgatttagacagacagagttctgttatcagtcagagccacgtgcttaacgcgccgcgtgtcacaattgtatgaactttgtgccgcgttgttgacaatgccaaaagccaacagcagcagcagtt

SEQ ID NO: 38375 - DNA, 1596 bp, DROSOPHILA
atgagcagcaacaatggcaacgatcattcgcaacagcagcagcagcaggcgacgcctgccacatcagttgcaacaccagctgcagcagcaacaaccactgcccctccggaggctagtgcacctggatccggatcaggatcgggatcgggatcacaggcatcgcgacctgcaacggcgcctgcacgctccagcagcagcagcaacaacaacaatattgccaccagcagcaccagcttttacagggtcaacctgagcaacacgaacagcagcagcatcaacaacaacaccaccagctgcagcagcagcagcaacaacgctaaccaagccagcaacaacaatcaccatgagagcagcaacagcacattggtggtcaacacgagcagcactgcatcagctggtagcacggcagcaggaggaagcactacagctggagcaactgcatcatcaaccgccaccaacaacaaccacatttatgtgaatccgcacagctacgacagcagcaccaccggcagcgtgagtggttccacggcagttatgctgccactgccactgagtctcccgcttaacctgcaacatcagccatcggcagcaggagcagcagcaggatcagcatctctcgactcgcaacagcaaaatccgctgggtggcagcaatacgggcgccattagtcgcattggaaccatgaccggaactggcacgtccacatccacaaccctaagcaccctgaatacatatctctttccctgtggcgccgactcggccagcagttgcgatctggacagtaacttcagccagatgctgggcgccggcagtgagggtggcgcgagcagttccctcagccagacgacagcgccggcgggtgcgggtttgggattgggcgtgcagctagggctgggcttcatcaacagtcggcggcgcatcaggcggctattcggtgtgggagacatggtgccgccggtggcaacgcccacaccctatgcagccgccctcaggcggcgcagttcgcagttggtgcaaatgaccaagaagcgggagaaggaactagaggatctggagcagcagcagagaatagcaacggtagcctcggccaatgccgccttcctcgagcgccgcgagcagcagcagcagcagcagcagcagcagcaacagcagcaacatctgcaacagacgcagcagcagcaacatctgcagttcgccttcaatccattgcaacctgaagctgggaaaaagaagaaaaagaagccacctggaccgccggcgcacacgagacagcaatcatcgcgaaccatggacgatccaatgatgaatcgacccaggaagagcacacctgcggccagcaagaagaaggacaacccctatgagaagtacccatcaccaaaaatccaaaagcacccaccgctcttaagcctcacctatacgaaacaaaaaatgataaaaaaaaaaacaaatatcaaaatatctatgaaaattatgcggcaaaacaagtgcttctattaccatttgatttacgccatttgctgcaattcgtttgattttcttgcttgtaacgatttgaataaaacgattaagaatacctgcaaatacatagtattttaa

SEQ ID NO: 38376 - protein, 531 aa, DROSOPHILA
MSSNNGNDHSQQQQQQATPATSVATPAAAATTTAPPEASAPGSGSGSGSGSQASRPATAPARSSSSSNNNNIATSSTSFYRVNLSNTNSSSINNNTTSCSSSSNNANQASNNNHHESSNSTLVVNTSSTASAGSTAAGGSTTAGATASSTATNNNHIYVNPHSYDSSTTGSVSGSTAVMLPLPLSLPLNLQHQPSAAGAAAGSASLDSQQQNPLGGSNTGAISRIGTMTGTGTSTSTTLSTLNTYLFPCGADSASSCDLDSNFSQMLGAGSEGGASSSLSQTTAPAGAGLGLGVQLGLGFINSRRRIRRLFGVGDMVPPVATPTPYAAALRRRSSQLVQMTKKREKELEDLEQQQRIATVASANAAFLERREQQQQQQQQQQQQQHLQQTQQQQHLQFAFNPLQPEAGKKKKKKPPGPPAHTRQQSSRTMDDPMMNRPRKSTPAASKKKDNPYEKYPSPKIQKHPPLLSLTYTKQKMIKKKTNIKISMKIMRQNKCFYYHLIYAICCNSFDFLACNDLNKTIKNTCKYIVF

SEQ ID NO: 38377 - DNA, 6627 bp, DROSOPHILA
atttaaataggctgataattaagcgacgttgtctccttgacacctgggagattggggagaaaataaaagcccagaccatctccaacccggtaaaaaaaaaggattcaagacaaggactcgcatgggaaaaactttggcggcaagtgaaaaaaaaaataaaaattcgccgatgaaaggaagtggatactgtaaaagttggcaaagttcaatcgcaaagcggataacgcttacctcaattaactcgatataaacggattgtttgacattcatgtcaactttgcgaaacaaataaatataaaatatttcatctgcctttcttgttaacattcgataccatgattttaattgttttttttttgcatatattacagcccatttattaatgcccatgcttgattaatcgaacttttttatcgcacataaattaatagctcctacttaatctaaactcgccctgattttaaattcatactttcaaccaactatttaatccgattttccatcgatactcgctccgctgactttctgcattaagctgttggaactccccaaagtcgccgtggcatcggtgtcttctcacctcggccgtaatccgaatccggaatccagaatatggaattcccatggccatctactcaactacccagccaacaagcccatcctcgtccttggagaatccggcgtgtcacccgacatttcccaccgggggatagtttcctgccacgcgcaacttgacgggggattttcggtaaacatttttggccaacgagctaagctctccattgaatatttaattagggaaattatggcggggccaaaaaggattgccaacaaagttgcccgggcagctggcgaaagaaacaacaaggaaaacgacgctcaggttgccaggactcacttgtgttggatcaatagcgactatggcgtggcataggtatccatgtccacttccacttccaccggaggactgcacgggttaagatggtaggccacgggtcaaatgctcagcttagtgctgatgaagatgctaattaccataatgatgacgacggtgcaaatttccccaacaacagccgcccaagaagaagctctcaaagaaggagaaggctcgcctggaggccgagcaggccgagctcatgcggattgaaatggagaaggaaaagtaagtggcacaaatatgttgaaagagataaactctttcctatcaaagccatattacactgatttcaaactgctcctttaatgaataccaatccatgtcgttcacccaatcccctgcagactcaaaaagctggaggaggcgcgtcagcgcaagaaactggagatggagcaggccaagcaccgccagcaacaggaggtggcggagaaccgccagaggaggtcccagctcaaggacagcatgctcttcttcgacgccgtgcgaacggccatcgaagccatcaaggatggggagcggcacgagcgggactgggagaagtttatgcggtgcaacggactaccgaatgcggccagtcccagtgacttgaggaagtacatccaccagtggcacacggacatagccaagcggcatctggagtcccggaactggttacttcgcaccgatgagcgcacactgctgacccaggatgcccaggtgccggatctcacgaggatttcactgcgccaacagcagggcagattgggcgatgtctacgcccacaggataaaggaggttttgggggtaacactgccattcaagtaagtttcaacacaattataatgatgtcacatatcttagatcctcaacgagctcgacgaaatgctgccgttcaagcaaaaatccgcccttattgccgccgatcttgtgaagctcaaaaccgaaatgcgtgtgtttctcaaacaacatctggacgagttcacctacaagaccatgtcgcatatcgagcgggatatggagtgagtttctcctgatgattaaacaaaattccatttccttctatttgcaatcatttgaatttaaatcatcatcctgcagaattgatagacctggtgtatcaaagcacatttacagctcggatgtatttcagagtttcgtttggaccttttcgaaggatgctcaaatgtaatctataaagctgagaataaataacaattatcttgaagtagtttatatttctcagatctcttaacccaaaagcgcgaattggagaacagtcgtctcacaacgagatcgattttcccaccatcgaaatgcaaatctcacttccgcccacggttcatttgcagagttcagctttgcggggactctggttgaactacgatcactttagtgactactgcagtagttactgcttaaaacatgcccgatcagcaaatgccagtaagctatatttataatataagtcaacttaataattggtcatatgatttccaaatcatatttgcatcaccattattgccatatttaaatgcaaatcagctgcaaatctagttaagttagatagaaatatagaatttgaattacagaactccttcactataagtatattgatatcatttcatgttcattttaatgatatattatccatatatcatggatccatatttaaaagcgatctgatttgcagatatcctgcggcaaacgaagcgggagtggcgcaagcgcaaggaaatcctgcaggcgatgctggacgactgtggccgggagattccactctcggagctggaacagctcacccaggaccagcactcggccagttcgcagccgccgagggaacgcacctacgacgtggacaaactgtatgcggagtacgaggacgagctgagcaaagcgcatcgcagggccattggaccggaggcctacggaatgctggagacggacgttaatctacgcaagtaccgcatcattggcggtgtctactgcattgactttctcgaaactccgcagcaggataagcagctaaatgccagatccttcattcgcaccagttgagcattgcattattaagaatagaagatatcacagctattagcatatagcaaaagaattaaagaaagtccctttactattcagttatcctttccaccacttgcagtcacttcggccaacagcttggtgcacaaggagtactaccagacgtacaagccaccacctcccgttttgccaggagtacgccgattgcccgaggaaattgaagccgagatgcgaatgattgaagcggcattggacaaactggccctggttaccttgcagtgagtattagtgtaagccaaaaaaaaaaaataaataaatacaattccatccgaatataatcccaaagattgccggactcggtgatttggttcgagccacctgtggcctgtcgctgggaaaccaatgtggagacactggaaatggagctagccgatggcatgaagccggaggttcagaaaccacacggcgagggagatggcgaggcagacggcacgggtgcggtgagtggaacggcagctgccactacagccacgcccaccgaggccacacccctctcaacccacgcccagcccagcccactgaagagctcaccccgctgtccggcccgcatgcgttcccagaaatcggacattggaggtgaatcccggcagcaggtgcttcgtgaaatcaacgactttgatctgcgtgccatacccagcgatgtggacttgtacgggctggtcaaggactttgtggtgccacgtttgcctcagggattctgcgttcgcctggagcaatcgacgccggtcatgtccacgggcttgaggcaacgaaaggtgatgtttctggctcgacaggcgcacatacgattgggccagggcaaggatatggcagacgatcaactggagatacccaaggaactgcaaaggctgcagctcaactccaaaccgggtttgggtgctgagtttctggacactgaggagccggcagagatgtttccaccactgtgtttcgataagctcctgaagttccggcaaatggcaccacgctcccggggaccggcccacctccagggctacctattttcccagctaatcgatgacatggatcgattgtggcgtctgcagctgcccagggatcaacaggaggagatcattcagcagatatccgagcagctgtcgccgactggttcgcgaacgagtgagccaggtgatacaactgatactaactgttcgaagttctggactaagtccattgatttctgcaggtgagaaggagccccgggagacggaaaacgatggagatttggctgagaatatgcaaccacttagccaggagctggtggatgtgctgcaaccggccacagcagccgccgcctttgcctactacacgggcatctcctttgtccgggactcacagcttccggcggaaccggaaccagagtcctcagccaaacgctccaacagcatggacagcagcgaggacgacgatgacgatgtggacagcctggtggagctgctcgaaggagcctccacggcggccaacactctgcacgacctgctgggtccggcgacgaacagcgacaacagcgatagcgaaaggtaaataggtacaatatatgtatatgtagagggtatacaatatccgtgaggctgacagattgatcgatctgggcgctgttcaatgattgagcgggaaattgaaatccttggaggcagcacctgcagtgcgtaccttatttatacgatttaattttaatgtatagcaaacagaagatgagcaatgtggctgccatcacgcagggcaagtggagcacccgcgatgtccacgataccaagttcaatgaggacaagctatccatacagtttcgaacaggcagattgggtaggatatatagtatgctgactttacaaatatcataataataagccacccaaataaacaggtattttcggatttgctttgaataagtacagcaatatgccctatcaaacttgggacctgcggccagatatgaaaaagtaagtccatttagcgcaaaataactatcctaaaactaaagttcctaaaattctccagtcccggcaccatcatcttcagttttactgcctctctcataagtctcgacatgacgataactaaatcaggctatacggtgaataatttccagggtggcagtacgcagggcatcaccgatatgattggtaaaacactatcactatcggaactgaaggccacgctgattttgtccgccgtggatattttcccggacgaggatgccttctgctacacggagggatcctgcgagaagaactacgtgatggagatgcactgctatgcctgtctgtccaccttggcccagtcgcacaactttagttggtcacgttggaaccttctggccggttcccgaactgctgttctgctggtccgcgagctaatcgagggcaagaaggtgccatactactccactctattggttaccccactaaagacttcgataatcgattgcacggaagtatcggccagtttcaatgctgtgggtataccgggaatggagtattacgccgatctatatcaactatcgcaggctcatgctcagcctgggagtctggagaaacagaggaccatgaatcccgtgctcagggacaatgtggccaagattttgatggccattcgaccgctgagtctatgttaagctaagctaaatacattcaaatcgaaatccaatttaatttctcttcatctcaaaaagccgtgcaattcatacctgtaggatgccattcaccatgctaatggtcttatacaaaagctttcggacttaacgtgaaatttgttatgcagaacatacataatgctgggccatatcgataattcagctttttatccacttaggaaaagcgcttagccacaaaggcatcatcaatctccactgaaattgtctcccactcccaattataatacatttccattgtcatcagtttgtcgcttcccttatggacccttcttatatgtatgccgcccattagtccctccattcttagtcgcctcctcgcatatagactcacatatatatgtacacacatactcactcacactaccgctcaaaggcagcacaattaacatattcactgcgagcttatcctttaatgctcgcatgggcctcttgccattttttcactttgcccgtcattccttctttttggcccctggcgaaagaggaagaagcggttaaggagcagggagagagagagagagaaatagccgaaaacaaaggctatttaataccctctgaacttaaaaatttttgacattttttttttcgtaaaacgaaagaagaatataaaccaatggtacaaagcaatattacctaaattacaatttataaaaaaactataatttcggagttcttcctattaaaagaaactatatcatttcacacataaacacaaattccatattccctttagcaacactgtctgaaataagaagcaaagcgaccacactgcgtatacgcaacttgcgtgtggggcgctgttatgttttttccttcgcttttcggaggctgggggtaaacttcccgcttattgtggccgccagtgaaggtcgcacagcgcaattggcgccaagctgtctaacaactgcgtcaactgaaatgcccccctgttccaccgccgccaccacctacctctcctctt

SEQ ID NO: 38378 - DNA, 3402 bp, DROSOPHILA
atgctcagcttaccgcccaagaagaagctctcaaagaaggagaaggctcgcctggaggccgagcaggccgagctcatgcggattgaaatggagaaggaaaaactcaaaaagctggaggaggcgcgtcagcgcaagaaactggagatggagcaggccaagcaccgccagcaacaggaggtggcggagaaccgccagaggaggtcccagctcaaggacagcatgctcttcttcgacgccgtgcgaacggccatcgaagccatcaaggatggggagcggcacgagcgggactgggagaagtttatgcggtgcaacggactaccgaatgcggccagtcccagtgacttgaggaagtacatccaccagtggcacacggacatagccaagcggcatctggagtcccggaactggttacttcgcaccgatgagcgcacactgctgacccaggatgcccaggtgccggatctcacgaggatttcactgcgccaacagcagggcagattgggcgatgtctacgcccacaggataaaggaggttttggggatcctcaacgagctcgacgaaatgctgccgttcaagcaaaaatccgcccttattgccgccgatcttgtgaagctcaaaaccgaaatgcgtgtgtttctcaaacaacatctggacgagttcacctacaagaccatgtcgcatatcgagcgggatatggaatctcttaacccaaaagcgcgaattggagaacagtcgtctcacaacgagatcgattttcccaccatcgaaatgcaaatctcacttccgcccacggttcatttgcagagttcagctttgcggggactctggttgaactacgatcactttagtgactactgcagtagttactgcttaaaacatgcccgatcagcaaatgccaatatcctgcggcaaacgaagcgggagtggcgcaagcgcaaggaaatcctgcaggcgatgctggacgactgtggccgggagattccactctcggagctggaacagctcacccaggaccagcactcggccagttcgcagccgccgagggaacgcacctacgacgtggacaaactgtatgcggagtacgaggacgagctgagcaaagcgcatcgcagggccattggaccggaggcctacggaatgctggagacggacgttaatctacgcaagtaccgcatcattggcggtgtctactgcattgactttctcgaaactccgcagcaggataagcagctaaatgccagatccttcattcgcaccatcacttcggccaacagcttggtgcacaaggagtactaccagacgtacaagccaccacctcccgttttgccaggagtacgccgattgcccgaggaaattgaagccgagatgcgaatgattgaagcggcattggacaaactggccctggttaccttgcaattgccggactcggtgatttggttcgagccacctgtggcctgtcgctgggaaaccaatgtggagacactggaaatggagctagccgatggcatgaagccggaggttcagaaaccacacggcgagggagatggcgaggcagacggcacgggtgcggtgagtggaacggcagctgccactacagccacgcccaccgaggccacacccctctcaacccacgcccagcccagcccactgaagagctcaccccgctgtccggcccgcatgcgttcccagaaatcggacattggaggtgaatcccggcagcaggtgcttcgtgaaatcaacgactttgatctgcgtgccatacccagcgatgtggacttgtacgggctggtcaaggactttgtggtgccacgtttgcctcagggattctgcgttcgcctggagcaatcgacgccggtcatgtccacgggcttgaggcaacgaaaggtgatgtttctggctcgacaggcgcacatacgattgggccagggcaaggatatggcagacgatcaactggagatacccaaggaactgcaaaggctgcagctcaactccaaaccgggtttgggtgctgagtttctggacactgaggagccggcagagatgtttccaccactgtgtttcgataagctcctgaagttccggcaaatggcaccacgctcccggggaccggcccacctccagggctacctattttcccagctaatcgatgacatggatcgattgtggcgtctgcagctgcccagggatcaacaggaggagatcattcagcagatatccgagcagctgtcgccgactggttcgcgaacgagtgagccaggtgagaaggagccccgggagacggaaaacgatggagatttggctgagaatatgcaaccacttagccaggagctggtggatgtgctgcaaccggccacagcagccgccgcctttgcctactacacgggcatctcctttgtccgggactcacagcttccggcggaaccggaaccagagtcctcagccaaacgctccaacagcatggacagcagcgaggacgacgatgacgatgtggacagcctggtggagctgctcgaaggagcctccacggcggccaacactctgcacgacctgctgggtccggcgacgaacagcgacaacagcgatagcgaaagcaaacagaagatgagcaatgtggctgccatcacgcagggcaagtggagcacccgcgatgtccacgataccaagttcaatgaggacaagctatccatacagtttcgaacaggcagattgggtattttcggatttgctttgaataagtacagcaatatgccctatcaaacttgggacctgcggccagatatgaaaaatcccggcaccatcatcttcagttttactgcctctctcataagtctcgacatgacgataactaaatcaggctatacggtgaataatttccagggtggcagtacgcagggcatcaccgatatgattggtaaaacactatcactatcggaactgaaggccacgctgattttgtccgccgtggatattttcccggacgaggatgccttctgctacacggagggatcctgcgagaagaactacgtgatggagatgcactgctatgcctgtctgtccaccttggcccagtcgcacaactttagttggtcacgttggaaccttctggccggttcccgaactgctgttctgctggtccgcgagctaatcgagggcaagaaggtgccatactactccactctattggttaccccactaaagacttcgataatcgattgcacggaagtatcggccagtttcaatgctgtgggtataccgggaatggagtattacgccgatctatatcaactatcgcaggctcatgctcagcctgggagtctggagaaacagaggaccatgaatcccgtgctcagggacaatgtggccaagattttgatggccattcgaccgctgagtctatgttaa

SEQ ID NO: 38379 - protein, 1133 aa, DROSOPHILA
MLSLPPKKKLSKKEKARLEAEQAELMRIEMEKEKLKKLEEARQRKKLEMEQAKHRQQQEVAENRQRRSQLKDSMLFFDAVRTAIEAIKDGERHERDWEKFMRCNGLPNAASPSDLRKYIHQWHTDIAKRHLESRNWLLRTDERTLLTQDAQVPDLTRISLRQQQGRLGDVYAHRIKEVLGILNELDEMLPFKQKSALIAADLVKLKTEMRVFLKQHLDEFTYKTMSHIERDMESLNPKARIGEQSSHNEIDFPTIEMQISLPPTVHLQSSALRGLWLNYDHFSDYCSSYCLKHARSANANILRQTKREWRKRKEILQAMLDDCGREIPLSELEQLTQDQHSASSQPPRERTYDVDKLYAEYEDELSKAHRRAIGPEAYGMLETDVNLRKYRIIGGVYCIDFLETPQQDKQLNARSFIRTITSANSLVHKEYYQTYKPPPPVLPGVRRLPEEIEAEMRMIEAALDKLALVTLQLPDSVIWFEPPVACRWETNVETLEMELADGMKPEVQKPHGEGDGEADGTGAVSGTAAATTATPTEATPLSTHAQPSPLKSSPRCPARMRSQKSDIGGESRQQVLREINDFDLRAIPSDVDLYGLVKDFVVPRLPQGFCVRLEQSTPVMSTGLRQRKVMFLARQAHIRLGQGKDMADDQLEIPKELQRLQLNSKPGLGAEFLDTEEPAEMFPPLCFDKLLKFRQMAPRSRGPAHLQGYLFSQLIDDMDRLWRLQLPRDQQEEIIQQISEQLSPTGSRTSEPGEKEPRETENDGDLAENMQPLSQELVDVLQPATAAAAFAYYTGISFVRDSQLPAEPEPESSAKRSNSMDSSEDDDDDVDSLVELLEGASTAANTLHDLLGPATNSDNSDSESKQKMSNVAAITQGKWSTRDVHDTKFNEDKLSIQFRTGRLGIFGFALNKYSNMPYQTWDLRPDMKNPGTIIFSFTASLISLDMTITKSGYTVNNFQGGSTQGITDMIGKTLSLSELKATLILSAVDIFPDEDAFCYTEGSCEKNYVMEMHCYACLSTLAQSHNFSWSRWNLLAGSRTAVLLVRELIEGKKVPYYSTLLVTPLKTSIIDCTEVSASFNAVGIPGMEYYADLYQLSQAHAQPGSLEKQRTMNPVLRDNVAKILMAIRPLSLC

SEQ ID NO: 38380 - DNA, 2300 bp, DROSOPHILA
tccagtgctctatcagatactattagagtgggcgtcttccatgtctttggaatctgcatgcttaatctccactttctagcttttatattgtagttcctgagatctcaacgttcatacgggcggatatacggacaaagcacgaatctagaataccctataactctaagagtaacgggtataatgataataaacagattaaatatccacttttctaatataacaagtagatacgcgttcttggtttataaactaaaacatcaaattgaaaatggtctaaccagcttatcatcttaactaatcaaatttgactgaaaaatagccagaagtccagcaccaaaaaaggaaatacaatcgtgcgagtgaaagagaggtgtatagtgtgtgcgagagagacagtgccggcaattaaaaggggccaacgtgcaaggcaaaaaggccaataatcatggccaaagctgccaatcgctgatgcgataaattatttctggtgtaaatgccgtagggtgtccagtggaactttaatgaatgagcccgtcaaatggtaaatgtcactagagaagccaataacttggctcaaacagtcattaatcccgtctactaaccgtcttggcccgtattcgtggtaacaaatgtctgggtccagactttagagaaaactttttgcctcaacttgatgcacttactaattgtttgaatgcttttgtgattgagagagagccccaagactttacctctgctttataatttttaaatgtcttttaacctctttttggtactaaacgcttacctcaatagttaccactttcatatactacgttcaataaatgcatttcgttaaagttaataactacgatttctaactgctgtttattttatattttccagcagtttcatgctactccataaaccgaaatctcttttgatccggcgctcctaatgggctggccaatcaattgatggtcctgactgctttcggttatggtaagtcctcttatccaactcatgctgctatcaattcaattttgtgccggcagtcggtgctcatggtgctctcggtttgtttggcgatgggtggctgtggagaccgagtaacctgaggagcagcaggagcaggagatgcccgcacgggaatggggtatccattgtgggttaaacaatgccccgatgagacgatggccctcgccgcgtgccagagacaatggggcggatgcacaatggccgtgtgttcgggcccgacggtctcgaaaataaaccccgacaagtggcgacctctgaccccgccgccttggatctcccgcattgtacttttaaatgcgttaattgagtgctacgagttgtctttcggcacttgcacaccgccttctgttttgtttgccatcatccattgtgtgtgtgttttttatacattcctcctgttttttttccccccttgccttctgctagagaggcattcggcacttgtagtccaacgcagccaaacaacaaatcaaagtcaaatggtcaacgagacacacaagttggcaaagggaaaatacaatacaaggaaaatctttgtcccacacatacacacacacacaacttaaccagatggttaccatcccaaccggaattgcacatggacaatggggttaatgggaatgcttgagttgggattcgagtccgtatttgacatatcataaaattcaaattgaaattgaaattgatgttcatttcgttattaacactccaaacacacataaacatattattttgtgccagctaatgaagcatagatgaaagtatcgaaggcgtaatttatatagtgcgaataaattcaatttcggttgtctaaaatggcaattcggaaatttattgcatttaaaatacttgaattgcgaatgaataaatatcgaaaatattagacaaatgtactttaattgatttattctcaatttaatattaattggcggtatctttggactatacaactatttgcgcaaatactttaccaccgaaacgcttacggcttttagaccataatttaagtggctataattatgcgcagcaaatatttccattttaatatcaatatttgtataaattaatacaaagttttaaagtacaggaattacagtagttgacaattaaaaaaaaaagaatatttttccattgcacggtatcccttgatctacccatttaaatttgtagatttttgttaagattgtgcctaaaacttatgttaaattggatacaatactttcaattggagaaatcatgtgtgtgtaaccatttgtccatttaaaaaacacttgaaattcatt

SEQ ID NO: 38381 - DNA, 300 bp, DROSOPHILA
atgcgggagatccaaggcggcggggtcagaggtcgccacttgtcggggtttattttcgagaccgtcgggcccgaacacacggccattgtgcatccgccccattgtctctggcacgcggcgagggccatcgtctcatcggggcattgtttaacccacaatggataccccattcccgtgcgggcatctcctgctcctgctgctcctcaggttactcggtctccacagccacccatcgccaaacaaaccgagagcaccatgagcaccgactgccggcacaaaattgaattgatagcagcatga

SEQ ID NO: 38382 - protein, 99 aa, DROSOPHILA
MREIQGGGVRGRHLSGFIFETVGPEHTAIVHPPHCLWHAARAIVSSGHCLTHNGYPIPVRASPAPAAPQVTRSPQPPIAKQTESTMSTDCRHKIELIAA

SEQ ID NO: 38383 - DNA, 3278 bp, DROSOPHILA
gttcgttcgtcctttttttcactgcaccgcactcacacactgaggactgcatgtgttgttattgttgtttctgctgtgtcgctgcacacacacgtggacatgacgtgcacacaatgacagctgactgttggcttccaaaagcccctaggccacggcagtctacaaacgagagttcggatcatgagggggggtaaaaggccagggtcagaggtgaggcaggaggtgccgggcgggctcgtagagcaggccgtgattctttaatgactgctttaattttcgggtttaccaattaaaactacgtggccaatgaaaaatacatgcagtacggcgcttgcataatacaaaggccgaaagagagttctcctgggaggagggaatcccggagaacgggaaactttcgttgagctagacaaatgcttgggggcacccacttgaagtgtaaattggttgcccaaagatgcaattgctgagaggaaatggacgagaatttaattcagctaaatgctccgaccagacatctgaagtacacaagtacagtctgccccagtgaaatttggcaacgcagactagccatgagtgcaccaacggtgcagcgccgaattaatttgttaaatgggaattaaatgaatgaaatgcggtcacttggagagccagaggatcacggaatagtggcgaacaatgaagatgccccttgtttcattcgttccgagtgaagtgcggcaacgttctcgcgcacgctgcaatttgcaccattaacccgccatcgacaatgcccaacatcagcttccgactgcagctgaccaaacatcccatccacctgcccccgtagtccaccttgccaccttcgtccttcgttgccggctggccagctctgcccacaggcaaacatccttgcttccttcctgtcctgttgttaccggctgcccaactcgcaagcgcgagcttctgctttttttgcgagtgtgtacttcatttagcaggcgaaccttgtcctgaataaatgggggagcgagtggagggcaggagggctttcggaccacgaggggcattcccagccagacagtgcatccgtgtacacgtcagcaacgacattattgccgctgttgctgggttgttgcaacgccattataacgccatttcgacgaccccaccttgaccacctctggcaactaattttttacacatttctcatttttcaaccctccattatccgttcttctttgcagaacgacacgatgcgcctgctgtacatgtaccacgcccaggatccgccgcacggctcggtgcgtcctggcacccttccggatccggcccgcgccttccgcccctaccgccccatggtcctcatgcagcgcgcccagctgccgatgccctcacccacgcacgacgagcgcgtgcgagtcctcgagctgcgcaacgaggatgtggagctgcccgccggcgacctaccgctcttctggtgcaagatgttcaagctggaggacatcaatcgcaagcaccacctgatccgggtaagaatattcgattcaaggccccgtcttgatactctgtaatcgagggtctaattaataaattaattaataaaattaataaatattaatattaattttgaatatttaatagtctaactagtactaataatctgactagcaatttcgccatcgaactacagccatagaacgatatattaaagtcgcaactcctgcagctcctttaagcattttttgtcgagtgcagcaagactaaacgatattaaatacaatgcataattaaggccaagtgcagtgacgcgttctggcattccgcttttgtctggcagtcactgctccggctctccgccgcggcggctgtattccgcattgtgagtcgtcgttgtctcttagcctcggcataaccaaattgaaatattaaaaatttatccccagcctcgcgcgccctatctttcccacaatgcacatcacatcactaaccgttgtctcccgtcctccggttcattttcttttcatggctgcagtacgagccgatttatgattcatcgtccagcgtgcactacttgcagcacataacgctgcacgagtgccagggtgcccacgcggagctggaggagatggcacgcgagcagggccgcccgtgcctcggagcccgatccattccgctggcgtgcaacgccatcgtggcctcctggtcgcgcggcagcgaggtaagcataagcatccgagaacggaatcagaatctcccgccccgatacccccagtgcaactcatgccctcaaacctaacgcccctaaccccgatgccccgagacccaataccctcgaccattttcgtcataaccataaccatgcaatattaattcaaccttcgcaaatgcctcctttcaacacgaaaaaagcgtcagagaagccatggcaaatgagcccagacgaacactttgttaccctaagttatccgtaccatccgtgcttatcataacataaaaataagaattttcaagtctgacctctagttttgacctctagttttgaaatgcatacgccacaaggataagatcgctatacagccaataaaatctgattatacaatagtaaaatcaaatttacaaccaagacagatccgtgaaacgtgatccttacacttgctccttcggcgagtgcatattccccatgctcgcagagtatatcgaaaaatgaataccttggccctattggcccctgacccctccgcctgactggtgtttttgtttttttgagcagctcagacgacgcagggcagggtttttataattttatcagaagagcgccataatgcagtggcatgtttcggctgctgtccgccaggggcgctgtgcattgcaattgaatggcaatggacgagatggcaagtcgcggggtgcggatagctggggaggtggacgccgggcaaggactcctccgatggctgcatttaaattgcacatggccatggcatccacttccgttcagggcagcccagtccagttcctccctcaacttacatatatacatatacactcatgtgcgagtataactacaaacactcaacgtactcgtattcccccaaaccaacgcaacccaacccaatccaatcttacccaacccagcccatccattgtatcccatttttccgctgtttgctgtcatttttgggctttcttttcgcagggctttacttatccacatgaggccggctacccgatcgagtcgcggcaggcgaaatattatttaatggagacccattacaacaatttgaagcccgactttg

SEQ ID NO: 38384 - DNA, 651 bp, DROSOPHILA
atgggggagcgagtggagggcaggagggctttcggaccacgaggggcattcccagccagacagtgcatccgtgtacacgtcagcaacgacattattgccgctaacgacacgatgcgcctgctgtacatgtaccacgcccaggatccgccgcacggctcggtgcgtcctggcacccttccggatccggcccgcgccttccgcccctaccgccccatggtcctcatgcagcgcgcccagctgccgatgccctcacccacgcacgacgagcgcgtgcgagtcctcgagctgcgcaacgaggatgtggagctgcccgccggcgacctaccgctcttctggtgcaagatgttcaagctggaggacatcaatcgcaagcaccacctgatccggtacgagccgatttatgattcatcgtccagcgtgcactacttgcagcacataacgctgcacgagtgccagggtgcccacgcggagctggaggagatggcacgcgagcagggccgcccgtgcctcggagcccgatccattccgctggcgtgcaacgccatcgtggcctcctggtcgcgcggcagcgaggtaagcataagcatccgagaacggaatcagaatctcccgccccgatacccccagtgcaactcatgccctcaaacctaa

SEQ ID NO: 38385 - protein, 216 aa, DROSOPHILA
MGERVEGRRAFGPRGAFPARQCIRVHVSNDIIAANDTMRLLYMYHAQDPPHGSVRPGTLPDPARAFRPYRPMVLMQRAQLPMPSPTHDERVRVLELRNEDVELPAGDLPLFWCKMFKLEDINRKHHLIRYEPIYDSSSSVHYLQHITLHECQGAHAELEEMAREQGRPCLGARSIPLACNAIVASWSRGSEVSISIRERNQNLPPRYPQCNSCPQT

SEQ ID NO: 38386 - DNA, 2495 bp, DROSOPHILA
ggctcagctacatttgtacatgcatacatacatacattcatggatgtcggtgactcagccgaacgaaaggggcttgaaatgcactggttcggaggaggggcagataaaggtcggtcttaacttggctaatgtctgctctttaaccattttattgtagcactttccttatcgccaggctcctcagaagttcgctcttttccgcgctgtgtgtggctcacaacttaacccttgcgccgcctgcatccatagaatgccccatttgatagttggttacacgggtgaaacctggtttgaatcactcgtctatattgtacgccaattttatgcaggggcgggcgggtttacattgtcaaataaaactagaggcctctaaaatggcttttaaagtcataaaattccacgactctcgagtagtaccgtaaaaattaacgatgggtgcgtgggggtcggaaaatggaaggaactagcaaatgtctgttttgcttttattgttctgtttgcttttccctggttgggcccttttttaatagaatttcgcttaatttgagtccggggggcggggtataaaaacttttccactctttcctttttttaattaaatggttattggcaagagggtctctcttgggggcgggggcaatgtcaatagtcggcgaaagcgtaaagcgtattaatgatgaatatttatgtgcggccggagcggaagcgcaggaaaagcggcataaattaggcgaaagtgcggtcagagagttggtcgattgattcgagcggttaccgacggcgataacttatagggataaaggcactccggggttagatagttagggataattatgcgccagcgcggaagggttaaagccacgccgatcgggtagatagcgcggctgaagtgtgttcccttccatttgtttttgttttcctgggaaggctgctcagtcatcaattgttatcgcgaacattgttcttcccattgacgctgacttatgacggctagaattccatgacactttttctcactaacgatgtaaccgctacacaaacaagttcacacagggatcccgtatccagaaatccttcggatttggctggtggcaaaacctgcgttagttccgctcgccacacgttgcacgtcaagcaaattgtctcctgcttctcccccgctaccccagctccatccaaagacttacttccgctaggagaacgccagcgccaccgccaccgccgcaataatcctgcagctcagtcgaaatgtcgctggcaatctaaggaaaaggaaaaatgccagcgacagcggtggggagtgggtaggcggtggcgtgccccaccagtctgttcagctggtggagcagcagatgctgctgtcgctcaaccacccacttccacctcctcaactcctccgccgcaccacaatcttctgccccttcaaggctttgtcacattcaagatgctgggactgctgcgtggaggagtagctgaggagaagaaattcaagtaaattgattttatctatgctcttggctttgactactgggactgtcagttggaaatcgcttcgtcgacgttccatcccatcccatgccatcccattccagcatcaactccaccctactacctattcactgccccttagtggggccttgcaatttttgcttttggcgcgtaatcgacttcatgcttttgcttttaatggtatttttcctgtggttcaaactaatatccataatgcataaatattgaaaccctgcgacctaacccagcacccttctgaacttccaatcattgagctgccttggcattttttgcttgataaatattcctttcccccttctggtgattcaactccaagtcgttggaggtcgtcgtcttggcctttcgcacacatatatataattttttcctgtacatatatatttggtgcgtcgtttcgcttttatcatcatcatccgtcggtgagttttctcgtttttataaaatttatgcgcaaaaatccctactacgtctgcaatttattgcattttcgtaagtcgagcgatttgaaaaatgccaccggcatcaaaagcgaccaaaaaataaaaacatcgaagggaaacaaataacatttttgctgattttaatgttttgtcaatgtcccagcagccctcactttgaccctccgcccagcctggggccctgcctttgttattgctgttgatttgttaataaacaatttttatgtcctgccggccattggcatataaaaagctcacacgaacgacaacaatttttatggctgtggggtaggcttacagattgataccctctgttaaggttgttttgagaggcttactttttttcaaaagtcgtgagaattatttaagaaaataaataattgatgtaaaaaacatgagatggatggttactttgcttatttataccaatatttactagaagcttgccaggtcgcttttggccgcctttagatcatatccatagtctaagcctttttggggctctct

SEQ ID NO: 38387 - DNA, 495 bp, DROSOPHILA
atgacactttttctcactaacgatgtaaccgctacacaaacaagttcacacagggatcccgtatccagaaatccttcggatttggctggtggcaaaacctgcgttagttccgctcgccacacgttgcacgtcaagcaaattgtctcctgcttctcccccgctaccccagctccatccaaagacttacttccgctaggagaacgccagcgccaccgccaccgccgcaataatcctgcagctcagtcgaaatgtcgctggcaatctaaggaaaaggaaaaatgccagcgacagcggtggggagtgggtaggcggtggcgtgccccaccagtctgttcagctggtggagcagcagatgctgctgtcgctcaaccacccacttccacctcctcaactcctccgccgcaccacaatcttctgccccttcaaggctttgtcacattcaagatgctgggactgctgcgtggaggagtagctgaggagaagaaattcaagtaa

SEQ ID NO: 38388 - protein, 164 aa, DROSOPHILA
MTLFLTNDVTATQTSSHRDPVSRNPSDLAGGKTCVSSARHTLHVKQIVSCFSPATPAPSKDLLPLGERQRHRHRRNNPAAQSKCRWQSKEKEKCQRQRWGVGRRWRAPPVCSAGGAADAAVAQPPTSTSSTPPPHHNLLPLQGFVTFKMLGLLRGGVAEEKKFK

SEQ ID NO: 38389 - DNA, 3148 bp, DROSOPHILA
gccagccgacgattggacagtgtccagtttgaggccgaagccacggcgaccatcctgctgaacggcgatgatgggctccaggcgaccctggttgctctttcccaaacccttgtcattctcgtagcccatcttcttcatcatctccatggccttgtttgagtagctcttcacccattcccgcttgatcttcttgggcgtgggctccgagttctcatcgtccgaaggttcgtccatcttgaaggccgcgatggaatctgatctatgctctggaattgtaggcggcgcgatgctcgagtttgtgcagcgtattaattgattatatacaataacaattaaatcagctggatggatttataaattaatgggacttttctttctgtggcgatttttgtgtttacaaagatatgtgagcgactgtttggaattgttgtgcacaggctgtttattacactagatcagtgttattgtagtccgttcccgcacccggatcgggcatctagatggctaggccgcgttccgaaaactgtttgtcaagcgtgattcagatttaagcacatttagaataacttttaggtctaattttcagctgcagctgattcgataggtggtgcgataagtccagacaaataacgcttcgtgttatcgataacacgtagttcttttgaacctacgccgtatggcgataaataccgtagcaaaaacgtggttaaatatactacaaatatattctccgcgggaaattcaaagtttactttatacgttcgaaattattatttactatagctatagcttttattgccactgaaacttttttttaaaggttgtcactttctgtctagttcgagcataccacacttggtctagaactagatctccacagggtagtcacccatttctgtcattagctcgttattagctgtcatatctcagtccaattcacaaggtgtgctaaaattcctggtctgaaaatccagattgaatattattatatactaccaaaatggaagaacagaatgttgacgaaacgaaaaccaatccgctgtcgcgaaaactaaagttctccggtatttgtaagctaaccgatgaggaactgtcgcatctctacaagctcgacgagctgacagacgaggagctggcttccgtggacctgaagagaagctccttgatcgatgactatcgtcttctgcacgaggtttcgatgatgaggcaaatggagaacgaagccgcaaagcccccaaatcccccagaacccccaaagcccccaaatcccccagaacgccctaaagcccgtaagcttcttcatgtgggatttgtacgaaaagctagagcattgggtttacatacccaagaaggtatataaatttaatttgcttaacaagttcgtcaaggtcatgagtttcgaggaggagcctgggaccatcttcaccgaggagcagttgcggctcgattcgaactacatggagctaaacagcgatatattccgcctggagtccttctacaattacctggacagcatgtacgtcagcggcaattccaatagagcaatcgatttggtgatgtttggcatccaccgtttgaacatcaacattctgatgaatatccataagttccatacgccaaagaaagcacatcagctcccggtgcattatgattgtaacaaatttcaaataaaactttgcattcccagttcaatttgttgtttaattattaattataactgtaactttacttcttgcttataactaaactttactgccaaattctaaattttttgccaaattttcgcatttttgaaaccatcatgaaaatgtaaaaaatggtctaaacttaatggcctgtagccaaggtaccgccttatataccctcgcggaacgcctccaacccgggatttcaccaccgatttttccggagcacccggacatatcgctatgttacaatcagtgttgctagcaactatcttccagatacaattgcgggtgctggcgcccttacaaccgcgtaggttgagaaaaggaaatcacaatagcctttagtagctgttgaattagtcttccagaaggcagtcagaagttccaggcattcgaacagcagaaccttactgttcacacgtttagaagttttaaaataggtggcttaaaattccagtaaagcatcataatatcccggcttatgtgtgtccaacatggataacatgcgctttacggacgatcccactggtgaggggcgtacaattgatggattgaatcagatcccagctgaaaaaaagtttatatggaacatacccaacaaagagtacacgtttaaactgcttaagcagttggtcaattagatgcgtttccatgtggatcgccgtctgcggtcgttatacgatcgtctagagtacatgttcgtcggtagcgatctcaacttggccaagcgccgtcttgagatgttcgccagatggcagaataaataattccacgcaatgtgaagccatataaaacgcgacgttatctaggagaagtgttgaaatgcaccagaatcttgtattttaaaccaaattccaatcacattttagcacttaattcatgcgcatttgtgtttagttcaattacataattcacttagaattcactaaactatgtttttaatgtaacatgagtttacagagtaaggaacttaagatgggggcaaaaaaaaaaaagattttcagttttcgatggcttcagatccagtcagcgcttggaggaggcttgctgtgtgctctgcacatcgccctacatcttctcgtaggtctcgctgtacggacaggtaatgcaggtgtgggtgtaggtgtcctcctcttcatcgtaggtgtccggcccgaactcgtgctcgtgaacttcgtgcgtcttcttggtgtagatgctgctgcgcacctccatgcgcagctgcttcatcttcttgttgtacttgcgcgccttgccctcctctcgcttgtcctcgcgcgcctcgtgctggcgcaccagctcctcctcgctaccccagacctccagggcgcgctggtgaatctgcagatgcagatacagcttcatctcgccccaacgtacgttgtgcggattcttgcggcttatgtaccgcagcttgggctcccgcttgtcgaaatcgcagtccttcagcaagtactccg

SEQ ID NO: 38390 - DNA, 813 bp, DROSOPHILA
atggaagaacagaatgttgacgaaacgaaaaccaatccgctgtcgcgaaaactaaagttctccggtatttgtaagctaaccgatgaggaactgtcgcatctctacaagctcgacgagctgacagacgaggagctggcttccgtggacctgaagagaagctccttgatcgatgactatcgtcttctgcacgaggtttcgatgatgaggcaaatggagaacgaagccgcaaagcccccaaatcccccagaacccccaaagcccccaaatcccccagaacgccctaaagcccgtaagcttcttcatttcgtcaaggtcatgagtttcgaggaggagcctgggaccatcttcaccgaggagcagttgcggctcgattcgaactacatggagctaaacagcgatatattccgcctggagtccttctacaattacctggacagcatgtacgtcagcggcaattccaatagagcaatcgatttggtgatgtttggcatccaccgtttgaacatcaacattctgatgaatatccataagttccatacgccaaagaaagcacatcagctcccgccaaggtaccgccttatataccctcgcggaacgcctccaacccgggatttcaccaccgatttttccggagcacccggacatatcgctatgttacaatcagtgttgctagcaactatcttccagatacaattgcgggtgctggcgcccttacaaccgcaaggcagtcagaagttccaggcattcgaacagcagaaccttactgttcacacgtttagaagttttaaaataggtggcttaaaattccagtaa

SEQ ID NO: 38391 - protein, 270 aa, DROSOPHILA
MEEQNVDETKTNPLSRKLKFSGICKLTDEELSHLYKLDELTDEELASVDLKRSSLIDDYRLLHEVSMMRQMENEAAKPPNPPEPPKPPNPPERPKARKLLHFVKVMSFEEEPGTIFTEEQLRLDSNYMELNSDIFRLESFYNYLDSMYVSGNSNRAIDLVMFGIHRLNINILMNIHKFHTPKKAHQLPPRYRLIYPRGTPPTRDFTTDFSGAPGHIAMLQSVLLATIFQIQLRVLAPLQPQGSQKFQAFEQQNLTVHTFRSFKIGGLKFQ

SEQ ID NO: 38392 - DNA, 4690 bp, DROSOPHILA
cctacagaaaagcagacatatacatatacacacataccgatataatctgcatatgtacgcgtacgtcctttaccgatttcatgtatgtatgtatggcggccgcctcgcaaacccaacgatctcaactccttccgcacacttaccctttatagttttagatattcgcttgttattactattacattttaatattacagttacacaaaaaaaaattgtctcgattacatccactaagtttagtactgattatatttgcacgtgtttatatgctgtattttactgcgtctttcactttcttcactttggtgttcgactttgccactaaacttaacttagcctgcggggatatgggctagagggtcactacgtggaacttggatagggtctattacaataagtagtggcgaacatcttgcgctccgttccgtatgcaaaaaattgaccagacatcaacagcaaacaaatgccctagatttaaacatatttgggagttgttatttcatataattatatatcgatttctataatttctagttgtagtatttgatacagacaaaaaaaaattgcaatttataatcgaattacacacttatgttcggttttgcattcttgttttttttttacatcattactatcaacacacgacgaaagcgtctaggatctaggatgtggaacagttctaattactaagactggaactagcatggtcccaaccaactaattggttaggttaggtttctatccctaagaactagctttatgtatctactaatggggcagcgagtacgtacggatgaccccgacactctgtcccaatttcaatttgcatagtctgccttcaagtcaggcttatggataacatcagtttaaccacttaaatcctacctctcactgcttgtgcctaagtatttatgtacatgtttacgtgtttgagccctggacgggatgtggctctattttggggtcaccagtactactgggcttttgattctcagagttcttagatgggcgtcggcatcagtttgccgtagtcctggtgcatggtgggcttcactgagttgtagacaggccggtccgcatcttcgggcagggcataaacatcggggggcacgcatagcgactgcagtttggaaatatacgagtcgaagtgctcgtgcgggtgtggatgtgcatgcggatggccatgtggatgggcgtagctaacgggatgatgcaccgtgtagggatgatgatgcggtggcactggtggcggtccaacggctccgctagatcctagtccaccaccattgcttgagccagtgccctgatggagaccggtggcaccattagcaccaacaccgtacattccaccgacggaagcggcaccgcccgacgacggtggtggtggcggcggcaggagtgtggagtacgctgtcgcatgctccccacccatcagcgatccaccggccaccaactgaccaccggcaccacaaacattatccaatccatgaaccaccgatgatgccgacgaactgggcgtggccgcaccaggcggtggtggtggtggcggcagacgcacgtgctccagcagcgtgatcacattatttctcaggctctcatagtaattgttcaaattggcattgggtggggctcctcctacgccctcaatggcctggttgggattgctgcccgaactgggtgccaaattgctgatcgagtggttgagatcgttggcattggtggtgccaccgccagagctgctgttattgttgttgctgtttgtggtggcgccactgaccgaggagctggcaccactggtggaactgacgctggcgaatggcgattgcccgctcggcgaggccaaagccaccgaggaacgctgttgttgctgctgatgaccactcaatggagaagcctcctatagtcgccacaagagaaatgtatacatatatatatatatggttagtggttagtgtgttgcaattcagacgacggtcacgattcggttttcaatttacttgattggatggggtttcccccgggtacataaatccctgctcatgtgccacatatgtgtatgggagttccaataagaacgcgctatcagaacacacaaaagtggaataaaaatgaaatggggtggggagcagggcagaaaaaaaaacaaaaaaacaaaaaaaaaaaaacagagacgaatcctgaacgaagtcaacccgaacaccgcaggcaaaaagggacgacgacatctggcgagagcaggagagagcgagaaagagtggcgttttcggagtttttgggggcctgggggtgccccaaaagtacaaaggttaatgctgcgtcgacgtcgctgccggcgcatttgtagcacagttattgctgttgcccccgtgtcggacttgttttcgtttttgttgtacttttttcttcgtcattttttttcgccccatttcccagcttttaggagcaaatcgaatggcgtcctgcgatttgttggcgcctcgttgttgggctgcaacatcatcatggcctgcgcatgaccagcgcacacacgccagcacactcgtgcgctctagggagacatggatgtggatgtggatgtggatgttgctgtgggtgtgagcgtgggcgtgtgtgcttaggggtgtgtacctcctgcccctgacgccgccgattctgattcgccgaccgatgcagcaaggatgcaacgtcaccgattggctgacgtcagcagggggtggagtggaaatgcactgcatttcgggtggatttattacacgaagagaaaatgctgttacactgatgttcaaatgaacatatgagctgattggatatagtcaaggctattgatatcttctcgctacttgctgctcgtttgcaaatattttggtctctgcatgcaaatatgagtggttaggctttttaaaagcagaagatcccgggtaatttaacgtctgcgtcggcggctgataaaacttttcgttcgcgccctcgttttcgattcaactttaccctaagtttatttcactttacttaactttactttcgttcacttgttgttcattgtttctttttttgttttttgttttttttttttttgccgagttttagagacgtccttgaaaagtgccaagacaaaactcgctcaggtgacgacagaccgaactcaaaacaacaaaagcgatatactatgggtaaaaagaactccactcaaagtctcgtttgagtcgaaaggtttaagggcggggtaggtttggtttgggcattagtaggtggtgttatttgggaggtagtgcaaaactttcagtgtgaccatcgtctgcaaagttcgtgcgcttagcctagtgggaaatggacttggtctcataatttgttgccgtcaacgaacctgagcctacatacccgatcgctggtgctcagctgcgactccatggcattgatgtctgacttaagtcgcatcatttgcgattctacgcgtgcattctcccgctgaagttccgatatctcggcctccaacgtgtttaagtcatcgctgccattggcgcccgatgaggcgcccccaccagatggattcttatcggttacgacggtgttgctactgccgctgttgttgttattaccaccggcgctgctgctgctgctactgctgctggtgaccccgatgccaacattgagaccaagtcccacgccgacactgcttcctacgccacccatgacaatgtccagtccgctgccgcctgttccaattgaatagaagggcaatgcacaggcttgttagtggatgatacggtcctacgatctatggaatgctcattatgctgttatgtattttctctttttgatccgggggatcgtctggcattcctcggttcgtcaatgtgcgcgtgtgctagcaactcaattggcactagtgtgagttggtgtgtgatgttgtgtgtatggtgtgaagttatgtgatgatggttttgagtcacaaatattctgaaggacactggtgtttaacttctaaagctaattgtaaacggtgcagcggtttgtgccaagcatacaatctccaacagacattgacgcggaacagacaatgcatcgtttataaacaacttgcactttaaatttaacaattttaacgtttactttttttttttcaacttaatcacagtagttagatcacagcttatggcattagttaagtcacttgtgcataatagaagatcaatggatcggttaatgctaggacaaatttcgtttgactcaatgtgggtgtgtgtgcatgtgtttgctgtgtttgtgaatgagtagggcgatttggtaggtgttagtaggcggttggtttagtggcgcttttatcatcttatcttcgggcttaccttgatcgacagactccctggcaatttttgtatgtacatttttattgttaatttaattctctgatttgtgttatttgttggtatgacaatttgtggtctgttcgcattgctgtctttcggttatatatacatatacttaaaatttgtattgtatttgatttggtttttattctgctgcatttcgattttcattgcatttatttttggttgctggttgtggtttcagtttcgattcgattcgattcgattcggacagttttgactgcgattcagtggtttcgttttctatttacagtagatactcggcaccgatacaaaacgttgcgtaatctaaaagaaaacgtcaa

SEQ ID NO: 38393 - DNA, 1209 bp, DROSOPHILA
atgggtggcgtaggaagcagtgtcggcgtgggacttggtctcaatgttggcatcggggtcaccagcagcagtagcagcagcagcagcgccggtggtaataacaacaacagcggcagtagcaacaccgtcgtaaccgataagaatccatctggtgggggcgcctcatcgggcgccaatggcagcgatgacttaaacacgttggaggccgagatatcggaacttcagcgggagaatgcacgcgtagaatcgcaaatgatgcgacttaagtcagacatcaatgccatggagtcgcagctgagcaccagcgatcgggaggcttctccattgagtggtcatcagcagcaacaacagcgttcctcggtggctttggcctcgccgagcgggcaatcgccattcgccagcgtcagttccaccagtggtgccagctcctcggtcagtggcgccaccacaaacagcaacaacaataacagcagctctggcggtggcaccaccaatgccaacgatctcaaccactcgatcagcaatttggcacccagttcgggcagcaatcccaaccaggccattgagggcgtaggaggagccccacccaatgccaatttgaacaattactatgagagcctgagaaataatgtgatcacgctgctggagcacgtgcgtctgccgccaccaccaccaccgcctggtgcggccacgcccagttcgtcggcatcatcggtggttcatggattggataatgtttgtggtgccggtggtcagttggtggccggtggatcgctgatgggtggggagcatgcgacagcgtactccacactcctgccgccgccaccaccaccgtcgtcgggcggtgccgcttccgtcggtggaatgtacggtgttggtgctaatggtgccaccggtctccatcagggcactggctcaagcaatggtggtggactaggatctagcggagccgttggaccgccaccagtgccaccgcatcatcatccctacacggtgcatcatcccgttagctacgcccatccacatggccatccgcatgcacatccacacccgcacgagcacttcgactcgtatatttccaaactgcagtcgctatgcgtgccccccgatgtttatgccctgcccgaagatgcggaccggcctgtctacaactcagtgaagcccaccatgcaccaggactacggcaaactgatgccgacgcccatctaa

SEQ ID NO: 38394 - protein, 402 aa, DROSOPHILA
MGGVGSSVGVGLGLNVGIGVTSSSSSSSSAGGNNNNSGSSNTVVTDKNPSGGGASSGANGSDDLNTLEAEISELQRENARVESQMMRLKSDINAMESQLSTSDREASPLSGHQQQQQRSSVALASPSGQSPFASVSSTSGASSSVSGATTNSNNNNSSSGGGTTNANDLNHSISNLAPSSGSNPNQAIEGVGGAPPNANLNNYYESLRNNVITLLEHVRLPPPPPPPGAATPSSSASSVVHGLDNVCGAGGQLVAGGSLMGGEHATAYSTLLPPPPPPSSGGAASVGGMYGVGANGATGLHQGTGSSNGGGLGSSGAVGPPPVPPHHHPYTVHHPVSYAHPHGHPHAHPHPHEHFDSYISKLQSLCVPPDVYALPEDADRPVYNSVKPTMHQDYGKLMPTPI

SEQ ID NO: 38395 - DNA, 4779 bp, DROSOPHILA
agagtctgccgtttggagctccaaccgcaactcgtcaataagatgaatctcttctccccccgtacagctcatttaagtctctagaaggttagagtttcatgtagtcgggggaagatgtctggtgcaattacttgaaccaaagtactgttttagctgtgcataaaaaaagggaaaagagttattgaggcttacatttttttggttcggtggttcagtggtttggcgcttagttaagcgtgtaatgggtcagtctgagggcggaagtagtagtcactgcactacgttaaacaaaaggtactaactacagtttccctccattaagtataatccctttttttgttccatggattcaccatataagtgaaggctatcagcactctaagagatgtggaacgaaagagtcggggcgtgtgcccagaaatgcgaaaaaatgaagtattaccaattacttaacatacgggaataaaacatgtatgggaacaagtgaacttagttctatgacacattttataaaaaatcttacctttcaatataaaatattccccatttttatatccgttactcgtagagtaaaaggaaatactagattcgttgaaaagtatgtaacaggcagaaggaagcggatctaacgatataaagtatatatgtatactcttgaccaggttcgataggcggtcgaactgtccgtgtccgtctgtatgaacgtcgagatctctggaaatataaaagctagagggttgagatcaagcatacagattctagagacatagacgcaagtttgttgacccatgctgctacgcccaatctagcgcccacaaaccgccaaaacagtcacgctcacacttttgaaaaatgttttgatatttacattcttattggtctttttaatttctattgattggacaaacaacttttttccacggccactctaacgtgaaactcgactatagcattctctcttgtttttagatccttttaagacctaagtttttcgttttacagatcgcaatgcagtcaacccaaagtaagagtgatcgatcttcgatgcacaggggccctctacttctctgcgccgtgatggtcgtcctggtgactttgcctgaacagataaatgctcgtatggcatttgaaaagctaacggactttgattttccgggcaacacgtattacagcgtgaaaaacctttcactgtatgagtgtcaaggatggtgtcgcgaggaggcagattgccaagcggcggcctttagttttgtggttaaccctctgtcgccttcgcaagagacccactgtcaattgcagaacgactcctccgcagccaatccttcggcagctccgcaaagaagcgcaaacatgtactacatgataaaattgcagctgcgcagcgagaatgtgtgccaccgaccgtggagtttcgagagggttccaaacaaggtgatccgcggcctggacaatgcactaatatacaccagtacaaaagaggcctgcttatcagcttgcctcaacgaaagacgattcgtatgccgatctgtggagtatgattataacaacatgaagtgtgtgctcagtgattcggatagacgcagctctggacagtttgttcaactagtggatgctcagggtacggattactttgagaatttgtgtttaaagccggctcaggcctgtaagaataaccgttcgtttggcaattcccaaaaaatgggggtctccgaagagaaggttgcccaatacgttggtctgcactactatactgacaaggaactccaagtgacctcagaatccgcctgccgtttggcatgtgaaattgaatctgagttcctgtgccgctccttcctgtacctgggtcaaccccaaggatcccagtacaactgtaggctatatcatttggatcataagaccctgcccgatggtccatccacctatttgaaccatgagcgcccactgatcgatcatggagagcccattggtcagtactttgaaaaccagtgcgagaaggccgccggtttgggagctggatcaccaccgggaactctggataaaatcgatactctacccgttagcctagacaccattgaagatcccaacctgaccaacttaacccgcaatgacgttaactgtgacaagacgggaacttgctatgatggttagcttttttaaatatatattgagacatctttagctgatagtatattttcctccctaagtttctgttcactgcaaggacactagaattgccgtacaggtccgcaccaacaagccgttcaatggacgcatttatgctttgggacgctctgagacctgcaacatcgatgttattaactctgacgcttttcggttggatttgaccatggctggacaggattgtaacacgcagagtgtggtaaatgagctaataataatatgaacgatttacgattcaaccgacatttccgctttatccagaccggtgtctactccaacacagtggttttgcagcatcacagcgtggtaatgaccaaggccgacaagatctataaggttaagtgcacttacgatatgagctcaaagaatatcaccttcggtatgatgccgatccgtgacccggagatgatccatataaattcgtcaccggaagctccaccaccaaggatccgcatcctggacacacgacagcgtgaggtggagactgtgcgtattggagatcgtcttaatttccgcatcgagattcctgaagacagtaagtgttgattaatgtggcaatccctcgcccgcatttttaattaatatctataacgtatagctccctatggcatttttgctcgatcttgtgtggcaatggctaaggatgcccgcaccagctttaagatcatcgacgatgacggctgccccactgatcccaccatcttccccggcttcaccgccgacggcaatgctttgcaatctacatacgaggcgttccgattcacggagagctacggcgtgatcttccaatgcaatgtcaagtactgcttgggtccatgtgagccggctgtgtgcgaatggaacatggattcattcgaatctttggggagacggcgtcgtcgctctatcgagaggtatgtgggcacttaggaattatttgctaaattttatatgaaccaaaatttatgcaacttcacaataaaaattttctttttttgcagcaacgataccaagagcgaggacgatatgaacatctcgcaggagatcctcgttttagacttcggcgatgaaaagcgcgaattttttaaggcagatcccagcacagacttcgccaaaggtgagtgtgaaaagacgaaatcgttttatcagcgccttatgtacttcatattacatctagacaaaactgttaccatcattgagccatgccccacgaagacatcggtcctagctctcgcggtcacctgcgcgttgatgatcctactctacatttcaactttattctgctactacatgaaaaagtggatgcagccccacaagatcgtagcataagttgaaggatcaagaaaaagtaggaaaaaaaagaaagaaaacaaaaagaaagtacacaacacgattgtcaccacatacgctccctccgttctctccgacacacacacacacacacacacatatttcaatgtctttggcgcacacgcaaattactgacaaacgtataatttttgttttttttttttcgatattcatataaattattaaattaaaatacaatttattttttaatatttatttagacttaaagcataaaatataaaattcttagagagcaaagaaaagaaaaaaagtcgtagtagagacacaatcgctgaggagcacactttcgttgcgaattagtaaaaggaaaaatgaaaacaagaaggaataagctgcgagcccgtactttctataaagttgcgaaagggtaaaacaaaaacggtccttggcaagtgagacagatagaaaaatggatcatgatcccttttgtaacttctatagagactgcagccgcacacactcgcacttaaacacactcacttatacactcacccaaatccacaattatttacgtactcacacgagaccacatttatttaattttaaactgaaagcagtgaacattaaacaaaagcaaaaaagcgcaactaattttaactgatgagaaccagagataagaaaaatttcatcgatgacattagaaattgtgcttaattgtattgcatttatttaatttaaattatttatgataataaagaaaaaaaaaccatatttaaacaaatttcgtgatgctatttcaaattttgagtacaacacttcatttttataaagcgctgctacgaaaatatctgttctgctggtgttaaacttgaaatttttttttacgatatttacgatcgcacaacatcagtaaaattgatagatatttaagctttacagacttcagacaccagttaatcagaaataaataccttctgaaaactcgaagttcttttgtgcagcgttttgaaactcggaactgaaaataattgtgtacttttgggcgctgccatgctttcagctctcacagtttactgttccccataaaactgagaattgtttaagatagatcgataagatagatagataagatggatagatttcggttcaaattaccagccgcacaggagttccagaaagagacctacgatcagttggtagttggcttagcattttgtaaggaaattttgatggcaataaaaatagttgtccaacaatggaatgtcatacactcaatttttgtatccattttccagacctaaagcgtcg

SEQ ID NO: 38396 - DNA, 2446 bp, DROSOPHILA
agatcgcaatgcagtcaacccaaagtaagagtgatcgatcttcgatgcacaggggccctctacttctctgcgccgtgatggtcgtcctggtgactttgcctgaacagataaatgctcgtatggcatttgaaaagctaacggactttgattttccgggcaacacgtattacagcgtgaaaaacctttcactgtatgagtgtcaaggatggtgtcgcgaggaggcagattgccaagcggcggcctttagttttgtggttaaccctctgtcgccttcgcaagagacccactgtcaattgcagaacgactcctccgcagccaatccttcggcagctccgcaaagaagcgcaaacatgtactacatgataaaattgcagctgcgcagcgagaatgtgtgccaccgaccgtggagtttcgagagggttccaaacaaggtgatccgcggcctggacaatgcactaatatacaccagtacaaaagaggcctgcttatcagcttgcctcaacgaaagacgattcgtatgccgatctgtggagtatgattataacaacatgaagtgtgtgctcagtgattcggatagacgcagctctggacagtttgttcaactagtggatgctcagggtacggattactttgagaatttgtgtttaaagccggctcaggcctgtaagaataaccgttcgtttggcaattcccaaaaaatgggggtctccgaagagaaggttgcccaatacgttggtctgcactactatactgacaaggaactccaagtgacctcagaatccgcctgccgtttggcatgtgaaattgaatctgagttcctgtgccgctccttcctgtacctgggtcaaccccaaggatcccagtacaactgtaggctatatcatttggatcataagaccctgcccgatggtccatccacctatttgaaccatgagcgcccactgatcgatcatggagagcccattggtcagtactttgaaaaccagtgcgagaaggccgccggtttgggagctggatcaccaccgggaactctggataaaatcgatactctacccgttagcctagacaccattgaagatcccaacctgaccaacttaacccgcaatgacgttaactgtgacaagacgggaacttgctatgatgtttctgttcactgcaaggacactagaattgccgtacaggtccgcaccaacaagccgttcaatggacgcatttatgctttgggacgctctgagacctgcaacatcgatgttattaactctgacgcttttcggttggatttgaccatggctggacaggattgtaacacgcagagtgtgaccggtgtctactccaacacagtggttttgcagcatcacagcgtggtaatgaccaaggccgacaagatctataaggttaagtgcacttacgatatgagctcaaagaatatcaccttcggtatgatgccgatccgtgacccggagatgatccatataaattcgtcaccggaagctccaccaccaaggatccgcatcctggacacacgacagcgtgaggtggagactgtgcgtattggagatcgtcttaatttccgcatcgagattcctgaagacactccctatggcatttttgctcgatcttgtgtggcaatggctaaggatgcccgcaccagctttaagatcatcgacgatgacggctgccccactgatcccaccatcttccccggcttcaccgccgacggcaatgctttgcaatctacatacgaggcgttccgattcacggagagctacggcgtgatcttccaatgcaatgtcaagtactgcttgggtccatgtgagccggctgtgtgcgaatggaacatggattcattcgaatctttggggagacggcgtcgtcgctctatcgagagcaacgataccaagagcgaggacgatatgaacatctcgcaggagatcctcgttttagacttcggcgatgaaaagcgcgaattttttaaggcagatcccagcacagacttcgccaaagacaaaactgttaccatcattgagccatgccccacgaagacatcggtcctagctctcgcggtcacctgcgcgttgatgatcctactctacatttcaactttattctgctactacatgaaaaagtggatgcagccccacaagatcgtagcataagttgaaggatcaagaaaaagtaggaaaaaaaagaaagaaaacaaaaagaaagtacacaacacgattgtcaccacatacgctccctccgttctctccgacacacacacacacacacacacatatttcaatgtctttggcgcacacgcaaattactgacaaacgtataatttttgttttttttttttcgatattcatataaattattaaattaaaatacaatttattttttaatatttatttagacttaaagcataaaatataaaattcttagagagcaaagaaaagaaaaa

SEQ ID NO: 38397 - protein, 692 aa, DROSOPHILA
MVVLVTLPEQINARMAFEKLTDFDFPGNTYYSVKNLSLYECQGWCREEADCQAAAFSFVVNPLSPSQETHCQLQNDSSAANPSAAPQRSANMYYMIKLQLRSENVCHRPWSFERVPNKVIRGLDNALIYTSTKEACLSACLNERRFVCRSVEYDYNNMKCVLSDSDRRSSGQFVQLVDAQGTDYFENLCLKPAQACKNNRSFGNSQKMGVSEEKVAQYVGLHYYTDKELQVTSESACRLACEIESEFLCRSFLYLGQPQGSQYNCRLYHLDHKTLPDGPSTYLNHERPLIDHGEPIGQYFENQCEKAAGLGAGSPPGTLDKIDTLPVSLDTIEDPNLTNLTRNDVNCDKTGTCYDVSVHCKDTRIAVQVRTNKPFNGRIYALGRSETCNIDVINSDAFRLDLTMAGQDCNTQSVTGVYSNTVVLQHHSVVMTKADKIYKVKCTYDMSSKNITFGMMPIRDPEMIHINSSPEAPPPRIRILDTRQREVETVRIGDRLNFRIEIPEDTPYGIFARSCVAMAKDARTSFKIIDDDGCPTDPTIFPGFTADGNALQSTYEAFRFTESYGVIFQCNVKYCLGPCEPAVCEWNMDSFESLGRRRRRSIESNDTKSEDDMNISQEILVLDFGDEKREFFKADPSTDFAKDKTVTIIEPCPTKTSVLALAVTCALMILLYISTLFCYYMKKWMQPHKIVA

SEQ ID NO: 38398 - DNA, 3249 bp, DROSOPHILA
agaaatgcactttggcaaatggtctgcagtctgattgcttttcctctcgttttcccattttccactcgcctgacattcctcccattgtggcattgaaaaagaattatgcatcttatgcatgtcgtcgagtgcctaaaactgtgacaatgctccattttataagtccccaacaggattggcttacaataaattgcatttccgctcttccgcttcttctgagcttattttaattgtgttttggcattagcttgaaggttgctaacttcaagtaaggaaggtttataagggactgctactgtatattactgatttctattaaccatgagttttcgatatacaagtttgctcaaataaaaatagcttcggaaaagtacaaactttgtattcatatttctcttatcgagcacgtgtcaaaactcagtgtgcctttaggtcttcccagccctccattcacgaacagacttaaaaagtgataatagatcgctggtcgcaggatccccgagcgataaacaagtttcgaatggattactcaacaccactttgggccgaaaaagaagcggcagaagggctaagaaattgctggcagcatttatcccattggggccagaagccaggagccatgagcctttcccgaacatttccactccgttcgccagttgcagcaaacagcttatgggtctccggtgtccgggacaccggaaaacgtgcgaaagtcgcattaaaaactttttggggagcagtaacaattcatgcgcttataaattgccaccggagagagccgcagccgcagccacaaagcaaacaaacaaatcgggaaaaccgaatcagaacggagcggctggaaaagccagggaaaaacagcaaacagtgaaaacagggaaaaacttttaaaacagccgccgaatgcaggcgatgcgaaaagccagtggcgcgacaaactggcaaaatattaaagggggctttgatattggtaccactcctggttgcaacagttttttgattaaccccaaggatacccgccccaaaggaaggcctctgaaaaggggctcaccaacatgatgtccaggatggtcgagcagaggacgaaggcggcggacaggaaatgcattaaaacgataacggtgaactggcgtgttaggtccgtgcagaaatcgataatcgcattgtgccgctcgacaacttgggccagtctgtgccgcacctccgcgttcatctcctcggtgaacacatccactgagtctgcaagggaaaggaaagccaaggaaagtcatcgagcgagggaaaaccattgtcatcgtgccgcagcagagccagacccaccgccatgcaaatcggcaaatatcctgcgaatgtcctgctgcaccagccggaaagcgccgcagatgtagaggcacgagcaaatgaagaatccgtccacgaagctgaaggcgaaaacggtgcaggcaccggaagcggtcagcagcacgtaggtgagcggaaagactcctggctgcacggcaaacgagggcagtctgtttaaaaggaactgcgattaatggcgaatggcggatggcggatggcgtatcttaagtgcttctggcgggggcaattggaatcattacttatgtatcacctgccatcaaccaaattggttgaggaacttttcatcttaacggatacgcgatgcttacgtaagtaataaagttgcacgaaatagcgttagaaaccacaaactagcttactcacatgatattaaagggcagctcggtttgacctggcagctgcacaatccagcggtagagacccataatcagcggttgcaaggtgaaggcggcatttgtcgccgtgccagagctgagcaacaacaggctgagcctgttggccgtggtggccagtccgaccagcatcctctgggcctcctgccgccgcgattcccacaaaatagcccgcaggcgctggaccaactccgcccaccggcgattggagcggaagaagacccacagcttcaaaacgcagaccgccttggtggttccggggcagaaggcctccagcgccaccaccaggttgtccaggtggacacagccgtacgacacctcgcccaccgcacccaccaccaccatggcgaaggcgaacacgaagagcagatgggcgtgccaaggacgaccgcccccgccccttatcctttgcggccagaggccgacaatgaggccggagatgcggggaatccgataaaagtggtcggcaatggcaggctgcccgctgtcagtcatttctgggatgaactcaagtggatactatcgatgctcctaccgcaactccagtggtcagctgctccgggcaagtgtcagacgcaatgttggccaccgcttttataggcactcgatggaactatttgccataatttgggcactgcaaaaaaaaacgctagtttaggggcttttacctattacgattcgccaagaacttaaatatatgcatctttttatctttaacttacaagtacacattttgcattgggggactttccgttctgcaacaaatatgtattagtttagacttaaaacttaaaactaatttcagtgcagcgttagcaagttgtgcctttggcaaaagttttaattgtttttatgcttacgtctacgcttacacttcctgccgcccactcggttacaccacccactccaccgactccgcccatcagtcaaggtccttccaactcacctgagctcgcccccgcccgtcctgctctaattatacaggactcagttacagttggaatattccactcagtgcaaacaactgccattgtttgacattcaatattttgtgtgtgttgcacaacaaacaacacaaacgacacaaaggcaggaaggcagggagtacaaatttaattaattgttatgcggcaaaactttcaatttcttcggctaccttacctccacttccgcttctttgtcttgtgttgtttttaattgaggttaccccactgctccccgagactcgttcatttgcctaaaagttgttaattgagggttcttggccaaaatgaaaagcaatcggagcgcacgaatggagttcgactaaaaatgtttatcagcttcgaaaatcaatttacatcgaagggaaaaatggaatttccacatcaatcgaatttcgcaagcaatctactgcttttagttgaatttagaagccaatccttttcgtatgctcaataatccgactgcgagactttccatttgcatggccaagtgagcctggccatacagtcag

SEQ ID NO: 38399 - DNA, 954 bp, DROSOPHILA
atgactgacagcgggcagcctgccattgccgaccacttttatcggattccccgcatctccggcctcattgtcggcctctggccgcaaaggataaggggcgggggcggtcgtccttggcacgcccatctgctcttcgtgttcgccttcgccatggtggtggtgggtgcggtgggcgaggtgtcgtacggctgtgtccacctggacaacctggtggtggcgctggaggccttctgccccggaaccaccaaggcggtctgcgttttgaagctgtgggtcttcttccgctccaatcgccggtgggcggagttggtccagcgcctgcgggctattttgtgggaatcgcggcggcaggaggcccagaggatgctggtcggactggccaccacggccaacaggctcagcctgttgttgctcagctctggcacggcgacaaatgccgccttcaccttgcaaccgctgattatgggtctctaccgctggattgtgcagctgccaggtcaaaccgagctgccctttaatatcatactgccctcgtttgccgtgcagccaggagtctttccgctcacctacgtgctgctgaccgcttccggtgcctgcaccgttttcgccttcagcttcgtggacggattcttcatttgctcgtgcctctacatctgcggcgctttccggctggtgcagcaggacattcgcaggatatttgccgatttgcatggcgactcagtggatgtgttcaccgaggagatgaacgcggaggtgcggcacagactggcccaagttgtcgagcggcacaatgcgattatcgatttctgcacggacctaacacgccagttcaccgttatcgttttaatgcatttcctgtccgccgccttcgtcctctgctcgaccatcctggacatcatgttggtgagccccttttcagaggccttcctttggggcgggtatccttggggttaa

SEQ ID NO: 38400 - protein, 317 aa, DROSOPHILA
MTDSGQPAIADHFYRIPRISGLIVGLWPQRIRGGGGRPWHAHLLFVFAFAMVVVGAVGEVSYGCVHLDNLVVALEAFCPGTTKAVCVLKLWVFFRSNRRWAELVQRLRAILWESRRQEAQRMLVGLATTANRLSLLLLSSGTATNAAFTLQPLIMGLYRWIVQLPGQTELPFNIILPSFAVQPGVFPLTYVLLTASGACTVFAFSFVDGFFICSCLYICGAFRLVQQDIRRIFADLHGDSVDVFTEEMNAEVRHRLAQVVERHNAIIDFCTDLTRQFTVIVLMHFLSAAFVLCSTILDIMLVSPFSEAFLWGGYPWG

SEQ ID NO: 38401 - DNA, 6613 bp, DROSOPHILA
cacgccagaaagaaggtaactacctctcccactcccactccttctgtgggtgggcgtgtgtgtgtttgtgtgtgtgcgcttgtaattgaggcaaaggtcgcgacttccgtcccgctcgcactcgctgccgccgctctaccgctggcgaattccaatgcaagaggcgttcctttttgtttttagcaatttctgggggtttctcctcctccgttttcctttcctttctacctgtgtcttaccttctgctgcttcttcttctgcctctggtgctcctacaacttgcgcctgtgtgtgtggttgttgtctcctgtgtgcggctgcatgtgcgagtgtgtgtgcgggattcttaactgggtttcccgggccccaaaattgatggctggattattgcactagttggcgctgccgccctcgctttggtccacgtaatcgcgagcagttgatatcgctgcactaattgtttatttgttattttgcttcgcttgcaagcagcaatttctagagctgcaactttggacgatgtttttcgatacaactgatgtggccactcagtgcgcgaatcgataggttgaattcaattggcgaggcttgttatgcacgctagactgggttggcgtactcgctatattgccaacttacatgttcaaccagagttgccgtacaagctcaaaatggagtagccaaccagatttgaaaatgaccgcgaataggaattaggaataaaaataagaacgtattgcccgtagtcacaacaaaacaaaggtaaataattagccaaaaagttatgcaccagctagtacttctggcccctctgattttattggaatctaagcttattactccatataaattagaagccccctgaatattcattactcagttgcgttgctcattgaatttctttaaatgttatttaattttgtggtgctattgaataaatataaaagcgcggattcagttcatcgaataacatagtgtttggcagtaaaaagtgcttacaatgctaaaatccgcaagtgctttgctatgtggtcttcttgctttaaatttgtatggagcttgggcagaatccgatgtgatttgtcctttaaaggaccctcctagtcaatgtggaggattctgtctgggtgtacttacgcccgtgttaaatcacctgaccatttcccaaaatctggcgaattccaataattcaagcaaggctaacgaggtcctggtgagacagtacacgatggaaggccaactgactgctctgcagaataagcaactaagcattgaagtcgcactggatgcccaaggcagaaaactgaatgttaacgaacagaactttactgaacgactgaattgcatggaaggcatactgtcggccctggagaaaacagtccttgaagtaaaaaccaaaataaaatacctcggattcgagcaaatcggctcaaagtactattacatagagaaagtatccgagaagaactggtccactgcttcaaaaacttgtcgcaatatgggagggcacctggccgacattaaggacgaggcagatctagccgccatcaaggcgaatctcaaggaggacacgcattactggctgggaatcaatgacttggaccacgagggaaaattcttgtccatgcccacgggcaagcagactacctttttgaaatgggcctcggggagaccctctcagttggacaccctcaactgcgtgttcctatacaacggggaaatgtacgattacccatgccactatactttccggttcatttgccagaccgaggaggaagatttaaatgtatgatttaaatagaaaccacatgagaataataaaacctttgctgatgccgtaacacctgtgattttttattcaatccctcaagccttcattagcttatctctattactcactttatggttactaaatttaccagtttcacgttatattgcacttttagacaaacaaactgcgcacaaaaagtgaaatttccttgattctccgatctttccagtagcacaaaaactatttgtttaaacaattattagcactcgttttaaatacgagcactgagagcggagagtccaagaaaattcgtcgtataccatgttgtttgttcgctttcggactttttcacacattgtcaagagtttcagagaacgcggctcaaagtgaaaattatcaaaatttaatgtgccgaccgctccgcatccgcagtcattcgtatcgcgggcttcgaacggagcagatcggaacttacggctacggacttcgcactacggtcgggaaggattacgcgaagaggatacgcgaaaaggatacgcgatgaggcagctgctggtttacgcgttggtcgcgggcttgttttacttttccgaaggtaaactccaccagcaagtgtattgtgccagatttaaatcagttttggttttcctactttcaaaggaaagtgttcatgaattcataaacgtaattcactgaagtatcctaaaaaataaaaaatgccttgaaatgaatagttacaattattacaagaaagtgaatagcaccttccattgctttaaaaatatgtacaaaatgaaaccatgtaggaaaaccaaaacttattattcggaaatctccgctaaagtcgaagtgcttttcccatgttaatgtgaacattactccttttcccatttccgcactggcttaacgcaggcaagccgtgccccgaaaagacacgcccccacaaaacccgctgcgacgccttctacaagtgccgggaactgccctccaactcgcacgtttggattccggtgaagtgcaacgagggattggtgttcgagtccagtttgggcagctgcgttctgcctggcgaggattgggagtgcatcaccccgagtgagatgagctccacgcagtcgccacctgggaggccggacgcggacatactgatagtcaacgacatggacgaggcgggtctgcttttgagcgactccagtcacaaggacgatggcaccgtggaaataattctagactccacactgagcagtgaggagaatgaggttaatgaggaggcggccaagagcaagccgcagccggaggaggacttctcttccaatcacaacttcgactcgagcggcgatggggagctggtggaactggattcccccgctggtctgaagcccgagaaccgcgaggaggtgacttccagcagcatggagcacagaacagaggtggaaaagctaagaacggaacttaaacaggtggctggtatcagcgaaatagccaagccgggatcgcccatcgatcccagcctgactgctcacctgcagagattgtcccaactgattgatggactgcagcagacctaccagaagacagataaacctcagacggaaatgcgaccagaccagttgaatgcttttctggcgcactttgacatcaagaaccggtatgagatgatgaaccccatggagcagacctcttccacaatcaccaccaccaccagtaccacagaagcacccaaaataaagccaaggctaccggaacccacctcgaataagacccgcctgcaggagcacctgagccaccatcgcctggaaccggagacgaaactaatgctcagcaatgccgtgccctactcctcgcatggaaccaccgggcagggatatgccaactctcagatagtggtgaatcgccccgaaggctctgtgatgtttgccctgccgcccaattacggaatgagccaggaacagggttcgtatgtaagccaccagagtcacgagtacagcgatcatgagcccaagatatcggaggacaccttgaagacggttctggagctgtccaagcaaatgatcgccgcacaaaacctgcccaaagtgctgcccaatccgggcttcaatggtgcctattaccaacccattctgcagcctgttttcatgtcgccccagggcaatcccttccagcagtactacggcatgccgcctcccttaaatccacactacatgcagcacaagaagcactccgctggaggcggttcctctagcaatggctataacaagcccagcaccaccattattcacaacaatgtgatacctgttcacctatccagcacgagttcgggggaaaaagaggtgctggacacctatggcaatagtttgggggtatatcccagcatggataaacatgtgaccgccagccaggccagtggcatggagtacatgaccacagctcggcccgttacgatcgcaactactgccagcacctactccgcacagtacggatcccagtccccgttcgccagtgactacaccctgaccactccgcgaccctttgagcagcaaccttcagccgccacagtggccacgtactatactccaagtccgcatttgggcgagcacaacgcgaatagggtataccaacccaccgaatcgtatcccacgatgaatatacccagacccatggacatgtttccaggacaaatcgatgcggacagggtgagcattcgacccaactcgcagaaaatcgaaagcatggagatggacgaagatatgattaaggccaactatcaaagtggctctggtattgggaatgggaatgggaacactcttcctcacgtactgacctacagcagcgacatgagccagcaattagcaccttcgaatggctatctggagcagagctatagcctccagcagccgcagcaccaccaccatccatatatgcccaggcccagacccacgatgagcagcagtatctatagtgactcggatggcaatatggagatgagcatgttcaccagcagtccgaatcttaacccattcaagggcggcaacgtgaagtacccaggaagcacttcgcccaatggccagctggttaacttcaatggcaacttcatcagcctggatgtcttccagaaatccatacttccccttatgaccaagtcgccatccgctttaaatgagctgggaaacgtggaggtcatcacatgccaggcgggcgtaagacagccaaatcaaactgactgcacgcgatatttcgtttgcagcaagaaggatggcaaggtcctgtcctactcctgtccgccttacacggccttcaataagcagaccaggatttgcgatgcccccacctatgcacagtgcagcaatgttatacctgccttcaatggctacaccatcgatagcaataggaggctccagatggaggccatcaagatgctgagtgaggccaagaggagacaggaggctgccttaaaggcccagagcatagccagtctgatccagcaatacggaagcgcgcaaaaggcgcaacctggcatatcgtccaacgtagagaatgatcccctggactcgtatgtggtcagcttgccagaagtcagtctgtccaccaccaccagcagacccaccatcatccagagcagcagtggtgtgagtagtggtggatcgtcgactcccgcaaagaagagaaagtactactgcaaggagggcgataagatcccggatcagacctccatttccagctactttgtgtgctacaagaacgcccagggtcaaatgaagggccacaagatgagctgctccaagagcctgctcttctgtcccaagaccctcatgtgcaccctcgcctccaagtgcaccgactaatccgttccaaattgttgagaatttttccacatttgccaccttaagttacttgcctagacgctaagttatttattctagttttagttgtgaccgaaacgagacctattaaacttctgaaaacccaaaaatgtatatgtgtatttgttttcttttttgggaaagtttctcggcttgttctagagcaaataagaccttgcccttccggtttctgggcaccagctggaaaaactgaccttcttgaatggccctccgaacgtgatatatgccaggcggtcactaaaacccaggggcggaactgtttcgaaagggggtaatattatgagccactaataggaccaaaatatctatgaagtaattaaatcattttacttgtaatacacattcccatggaaaaacctgttagaaaagagtcatgcgagaaatatgtagcaacactcgaataatataatatttatcacactaatgatggattataaaataatctacagttcccataccaaataatttaagcaacatgctttccttactctttgagttgactccgttcctgtttgtggacactgaccaaagcagcaaaaatgattttcacttttttaatgtctccatgaagattttacttgtttgtttttagtgcgctgcccaaatggtcattattacatgaaacacttgacatttacgctcgtactctagtttagttatgaactcaaaagagtagcattaaaaatgagagcaaatgtaccgagttcacactggttaacagtgctacaaatttgcaagtattaataaatgtgatttacgcgaaccttataaaaataacatgaaaatttaatattgttgttaggtatttagttaattgtaaaaaaaaaaaacgttgcatcggccgggaatcgaacccgggccgcccgcgtggcaggcgagcattctaccactgaaccaccgatgcttatccattgcgtgtcaaatcgtatgtatgtggtatgttggtgaactgatcactttt

SEQ ID NO: 38402 - DNA, 3879 bp, DROSOPHILA
atgctaaaatccgcaagtgctttgctatgtggtcttcttgctttaaatttgtatggagcttgggcagaatccgatgtgatttgtcctttaaaggaccctcctagtcaatgtggaggattctgtctgggtgtacttacgcccgtgttaaatcacctgaccatttcccaaaatctggcgaattccaataattcaagcaaggctaacgaggtcctggtgagacagtacacgatggaaggccaactgactgctctgcagaataagcaactaagcattgaagtcgcactggatgcccaaggcagaaaactgaatgttaacgaacagaactttactgaacgactgaattgcatggaaggcatactgtcggccctggagaaaacagtccttgaagtaaaaaccaaaataaaatacctcggattcgagcaaatcggctcaaagtactattacatagagaaagtatccgagaagaactggtccactgcttcaaaaacttgtcgcaatatgggagggcacctggccgacattaaggacgaggcagatctagccgccatcaaggcgaatctcaaggaggacacgcattactggctgggaatcaatgacttggaccacgagggaaaattcttgtccatgcccacgggcaagcagactacctttttgaaatgggcctcggggagaccctctcagttggacaccctcaactgcgtgttcctatacaacggggaaatgtacgattacccatgccactatactttccggttcatttgccagaccgaggaggaagatttaaattcattcgtatcgcgggcttcgaacggagcagatcggaacttacggctacggacttcgcactacggtcgggaaggattacgcgaagaggatacgcgaaaaggatacgcgatgaggcagctgctggtttacgcgttggtcgcgggcttgttttacttttccgaaggcaagccgtgccccgaaaagacacgcccccacaaaacccgctgcgacgccttctacaagtgccgggaactgccctccaactcgcacgtttggattccggtgaagtgcaacgagggattggtgttcgagtccagtttgggcagctgcgttctgcctggcgaggattgggagtgcatcaccccgagtgagatgagctccacgcagtcgccacctgggaggccggacgcggacatactgatagtcaacgacatggacgaggcgggtctgcttttgagcgactccagtcacaaggacgatggcaccgtggaaataattctagactccacactgagcagtgaggagaatgaggttaatgaggaggcggccaagagcaagccgcagccggaggaggacttctcttccaatcacaacttcgactcgagcggcgatggggagctggtggaactggattcccccgctggtctgaagcccgagaaccgcgaggaggtgacttccagcagcatggagcacagaacagaggtggaaaagctaagaacggaacttaaacaggtggctggtatcagcgaaatagccaagccgggatcgcccatcgatcccagcctgactgctcacctgcagagattgtcccaactgattgatggactgcagcagacctaccagaagacagataaacctcagacggaaatgcgaccagaccagttgaatgcttttctggcgcactttgacatcaagaaccggtatgagatgatgaaccccatggagcagacctcttccacaatcaccaccaccaccagtaccacagaagcacccaaaataaagccaaggctaccggaacccacctcgaataagacccgcctgcaggagcacctgagccaccatcgcctggaaccggagacgaaactaatgctcagcaatgccgtgccctactcctcgcatggaaccaccgggcagggatatgccaactctcagatagtggtgaatcgccccgaaggctctgtgatgtttgccctgccgcccaattacggaatgagccaggaacagggttcgtatgtaagccaccagagtcacgagtacagcgatcatgagcccaagatatcggaggacaccttgaagacggttctggagctgtccaagcaaatgatcgccgcacaaaacctgcccaaagtgctgcccaatccgggcttcaatggtgcctattaccaacccattctgcagcctgttttcatgtcgccccagggcaatcccttccagcagtactacggcatgccgcctcccttaaatccacactacatgcagcacaagaagcactccgctggaggcggttcctctagcaatggctataacaagcccagcaccaccattattcacaacaatgtgatacctgttcacctatccagcacgagttcgggggaaaaagaggtgctggacacctatggcaatagtttgggggtatatcccagcatggataaacatgtgaccgccagccaggccagtggcatggagtacatgaccacagctcggcccgttacgatcgcaactactgccagcacctactccgcacagtacggatcccagtccccgttcgccagtgactacaccctgaccactccgcgaccctttgagcagcaaccttcagccgccacagtggccacgtactatactccaagtccgcatttgggcgagcacaacgcgaatagggtataccaacccaccgaatcgtatcccacgatgaatatacccagacccatggacatgtttccaggacaaatcgatgcggacagggtgagcattcgacccaactcgcagaaaatcgaaagcatggagatggacgaagatatgattaaggccaactatcaaagtggctctggtattgggaatgggaatgggaacactcttcctcacgtactgacctacagcagcgacatgagccagcaattagcaccttcgaatggctatctggagcagagctatagcctccagcagccgcagcaccaccaccatccatatatgcccaggcccagacccacgatgagcagcagtatctatagtgactcggatggcaatatggagatgagcatgttcaccagcagtccgaatcttaacccattcaagggcggcaacgtgaagtacccaggaagcacttcgcccaatggccagctggttaacttcaatggcaacttcatcagcctggatgtcttccagaaatccatacttccccttatgaccaagtcgccatccgctttaaatgagctgggaaacgtggaggtcatcacatgccaggcgggcgtaagacagccaaatcaaactgactgcacgcgatatttcgtttgcagcaagaaggatggcaaggtcctgtcctactcctgtccgccttacacggccttcaataagcagaccaggatttgcgatgcccccacctatgcacagtgcagcaatgttatacctgccttcaatggctacaccatcgatagcaataggaggctccagatggaggccatcaagatgctgagtgaggccaagaggagacaggaggctgccttaaaggcccagagcatagccagtctgatccagcaatacggaagcgcgcaaaaggcgcaacctggcatatcgtccaacgtagagaatgatcccctggactcgtatgtggtcagcttgccagaagtcagtctgtccaccaccaccagcagacccaccatcatccagagcagcagtggtgtgagtagtggtggatcgtcgactcccgcaaagaagagaaagtactactgcaaggagggcgataagatcccggatcagacctccatttccagctactttgtgtgctacaagaacgcccagggtcaaatgaagggccacaagatgagctgctccaagagcctgctcttctgtcccaagaccctcatgtgcaccctcgcctccaagtgcaccgactaa

SEQ ID NO: 38403 - protein, 1292 aa, DROSOPHILA
MLKSASALLCGLLALNLYGAWAESDVICPLKDPPSQCGGFCLGVLTPVLNHLTISQNLANSNNSSKANEVLVRQYTMEGQLTALQNKQLSIEVALDAQGRKLNVNEQNFTERLNCMEGILSALEKTVLEVKTKIKYLGFEQIGSKYYYIEKVSEKNWSTASKTCRNMGGHLADIKDEADLAAIKANLKEDTHYWLGINDLDHEGKFLSMPTGKQTTFLKWASGRPSQLDTLNCVFLYNGEMYDYPCHYTFRFICQTEEEDLNSFVSRASNGADRNLRLRTSHYGREGLREEDTRKGYAMRQLLVYALVAGLFYFSEGKPCPEKTRPHKTRCDAFYKCRELPSNSHVWIPVKCNEGLVFESSLGSCVLPGEDWECITPSEMSSTQSPPGRPDADILIVNDMDEAGLLLSDSSHKDDGTVEIILDSTLSSEENEVNEEAAKSKPQPEEDFSSNHNFDSSGDGELVELDSPAGLKPENREEVTSSSMEHRTEVEKLRTELKQVAGISEIAKPGSPIDPSLTAHLQRLSQLIDGLQQTYQKTDKPQTEMRPDQLNAFLAHFDIKNRYEMMNPMEQTSSTITTTTSTTEAPKIKPRLPEPTSNKTRLQEHLSHHRLEPETKLMLSNAVPYSSHGTTGQGYANSQIVVNRPEGSVMFALPPNYGMSQEQGSYVSHQSHEYSDHEPKISEDTLKTVLELSKQMIAAQNLPKVLPNPGFNGAYYQPILQPVFMSPQGNPFQQYYGMPPPLNPHYMQHKKHSAGGGSSSNGYNKPSTTIIHNNVIPVHLSSTSSGEKEVLDTYGNSLGVYPSMDKHVTASQASGMEYMTTARPVTIATTASTYSAQYGSQSPFASDYTLTTPRPFEQQPSAATVATYYTPSPHLGEHNANRVYQPTESYPTMNIPRPMDMFPGQIDADRVSIRPNSQKIESMEMDEDMIKANYQSGSGIGNGNGNTLPHVLTYSSDMSQQLAPSNGYLEQSYSLQQPQHHHHPYMPRPRPTMSSSIYSDSDGNMEMSMFTSSPNLNPFKGGNVKYPGSTSPNGQLVNFNGNFISLDVFQKSILPLMTKSPSALNELGNVEVITCQAGVRQPNQTDCTRYFVCSKKDGKVLSYSCPPYTAFNKQTRICDAPTYAQCSNVIPAFNGYTIDSNRRLQMEAIKMLSEAKRRQEAALKAQSIASLIQQYGSAQKAQPGISSNVENDPLDSYVVSLPEVSLSTTTSRPTIIQSSSGVSSGGSSTPAKKRKYYCKEGDKIPDQTSISSYFVCYKNAQGQMKGHKMSCSKSLLFCPKTLMCTLASKCTD

SEQ ID NO: 38404 - DNA, 2541 bp, DROSOPHILA
gcagctgcctgtcgccgtctctttccgcatttgccctctccctcgctccgtccctccctcccatcgggtgttaattgcctttaacgcagtgacactgcacaaacactctggcaaagggggcgtggccgaggggagtcgatgggggccgaggcagatacaaatacacacgcacttaatggtgcaatgggattttttaactcctcacactcggcacatatgccacagacgcaaacaaacagctggaaaagccagcgagaaaagagagtgagccgtggaatgaagccagatctccggcagacactttaaccccaggaaccccccaccaccaccaacccaccgcgcttggggaaacccctgagcatcctgcgacccatgtaatcatcatcatatgcacttttatgagctgctccgtacgctgcgctggtcacagtgggtcaaagtggtcataagatgaaattcaaactttattgcgatgaaacggaaaggaaatgcattctgtcaaattcaaattcaaataggttacttaaatctttttactttttagcacgttttgatatgcccatatacccgttcattgaaaatccaattccacggtgcggcgacagagtttttatttcgtttcggccacgcatgtctcctgttttcgggtatattttttaattattattatttgcacagtccaatgcataataaatattattattaacccagtttcgctggagcagcgagtgtgactttccacatgagtatgtgtgcggcacccacacacacacacacactcgcagccagccatataagtttattcacgtgtctggtgtgattttcccccaccaagggcccacttcagcctcgcatttcgtgggcttacttaaatttagtgcaattgaaaagttattccataaagttttatgattaaaagtttttatgttcattcagttggttgcgaattcgttttacgagcgattgccccaaattgatttcggtttcccacctacgatgcatgttttcaattcgtttgtggcctgtttttgcagaaatctccccggatgccaaggcggttatcagtgggccacccgatctgcacttcaaggcgggcagtgccataatcctcaactgcctggtgcagcagccgtcggtgaaggacattgggccgatttactggtatcgcggcgagcacatgatcacccccttcgatgccgatgatggacagccggagattccggccggcaggggcgaacatccccaagggatccccgaggacacgtccccgaatgacataatgagcgaggtggacctgcagatggagttcgccacacgcatcgccatggaatcgcagcttggcgataccctcaagtccaggtgggtgttcctctgcgccccactccctaattgagttgttcttagtgcgctgcttaatcctccgcaggcttcgcatctcgaatgcccagaccacggacaccggcaactacacgtgtcagccaacgacggccagcagcgccagtgtcctggtccatgtgattaatggtgagtcctgggaatgagtgagcgagtgtggcctacactgggagcaatacctgactagctttggtattacttacgtttatgcattccctcgaagtttataaaagggaaaataggatccaagacctcaagctcctcttatataacaccgtatttataatattttctttgagtgcatcaaagcctctgactgtcgtctcaggtgctggccaggtcgacataagcctatccgttacactgtcaacctgaagttggtgtacgaaagccaaaggagcaactaactcccaaaagctaactatcatttagtagcacagcccttcttcgcttggcagacgggtgaataattttatgaccagcactgtagccaacgccattcatattcacccggacacggcctaaaaactaaaagttttcgccccactccatcatttggacgactgtttgctcgggagtcttttgggctggcctccttggcgtatgagtaatgcggatggaggagcacaactcagtgacttggctttgcatattttacacataaattagacgggaattaagacattttaagctgcgaaatgaggggcataaacttgacgcgtcttttgtccggcaatttccactgttttttacgaccttttatggcaggacattcgcagcaaattgaaggcctggcccagtcattttgctcgtagtcttagtttttatgcagcatcaaatgttaagcgaaatgtccagcacttaagttgttaagttgtttattcaaatgaaattgttgtacggactggaatttgcattttaaagagccgccatccgttgctcccacttcatccttcgctgcaaagccgtaataaatatgattaaatgtcagaagtaagttgcaaaaaggcacttaatcatgccccacatgtggcacaaaggccgcgagttgggatcgggctggaaagggggaaggggagtccagatagcagacacggcgtagaagagaagctgctgccacaaccactgtgactgtaacggtgactg

SEQ ID NO: 38405 - DNA, 474 bp, DROSOPHILA
atgttttcaattcgtttgtggcctgtttttgcagaaatctccccggatgccaaggcggttatcagtgggccacccgatctgcacttcaaggcgggcagtgccataatcctcaactgcctggtgcagcagccgtcggtgaaggacattgggccgatttactggtatcgcggcgagcacatgatcacccccttcgatgccgatgatggacagccggagattccggccggcaggggcgaacatccccaagggatccccgaggacacgtccccgaatgacataatgagcgaggtggacctgcagatggagttcgccacacgcatcgccatggaatcgcagcttggcgataccctcaagtccaggcttcgcatctcgaatgcccagaccacggacaccggcaactacacgtgtcagccaacgacggccagcagcgccagtgtcctggtccatgtgattaatggtgagtcctgggaatga

SEQ ID NO: 38406 - protein, 157 aa, DROSOPHILA
MFSIRLWPVFAEISPDAKAVISGPPDLHFKAGSAIILNCLVQQPSVKDIGPIYWYRGEHMITPFDADDGQPEIPAGRGEHPQGIPEDTSPNDIMSEVDLQMEFATRIAMESQLGDTLKSRLRISNAQTTDTGNYTCQPTTASSASVLVHVINGESWE

SEQ ID NO: 38407 - DNA, 3094 bp, DROSOPHILA
gtcgtccaggcgtctttgatttgttgcgggctcaatgcacttgaatttgtttgcctttgatgttggcacattagtttcgggttgatttgaaagcaccacaacatgctcgtttcattttttttttaattttgaaatgaactcttttgcgcggtggatttgccctgctgctgctgcagagcaacagttccgcaagccacaggaaatgcatcggctaatctatttaagccatcgttccatgtgacgctgccccttacccttcaccctcctcgtggaagtttctggccaacaaaattgcggcaggttgtccgttcccccagcgacatctgctgcatgcgacatcacggaaagtggggaatggaatggcatggcatggggtttcctgccaaatcgctgccacaacaaattccgagcgtctggccaaatgaaataggattccgcagtgaaccacagtggcggggaaagtaaagtacaaatcgtggctcgaaggaaacgtcataaaaattgtctatttctcgccggcaaacgtatacttgagtacgagtatattcttgcttgtgtgggcaggtccctagaaatgccttggaatcgtcatgacagctcttgccaggattgccccaaagatgctgcatcacttgacgtggatggagaagtggaaggggaggtggtgccgggtggtggccagggcggagtcacttcttcagtttgagcctgttgcctggcaacttttgctcgactttcgcaaccaacgcagaaatcaactgacatttcggattaactttcgatgctaaaattcaatttaagtagatgttttcaataattatttttaacgaaagcgaacaacactgtggaaaccagttaagacatttatggagcattcgaaatttgtttttattattttaatggtcatcagatggaaaatttccaccaagcattttgatatttttattttcataacataagcttctgaagtacatccaattaaatgttcttatattgttctttaatcggtagttgtattcattcccacacgctggaccttctagaaaagcaatgttatatacaaacgcattgtcataaatttgagagtgcttttccgagactcaccagcagaaacttgttagccgaaacgtgtgggcgtggacgttcccgccttaatttgatgtatttgtcgacaccaacgtaaaagatggcgtcattctcctcgcggagtatgtaaccctcaccgcgctccaagctatcgtcggctttttcctctctgtagcgatggtcggatacgtaaaccttttcggtagagtccgcaatgtcctggacgaaactgaagttgatcagacagcttccgcagtccctgattagtccctggttgctattttggggtggattatcaaaactcatctggacgaagctatatttctgcaaatccgtatcgggaaagactggcaagacctgcacagggtaggcattgctacccggattggtgggatgtcggtagaggggtttgccaatatccttgaagctcgcatcaatcatcgccttttgttgctccaggctgaccggctgcaggtcttttggggccttgggcaccgccacagaacgctgtagtcctgggagaggtggatgcactcgctccttggcgaacatcttggcgcattcctgagcgcgacttggttcgagtctggcgaagtcccagtctagggctcttatgtccttaagtagatcagcttctctgggattcattggctgcacattctcggaaagcttatcgtaagccgactgatccatcaaattaacggagaatagctcatgaagtcctttgaaatttagcgaaaaacaagtgtccagtttgggaatcgaaaccggctccttgcagtactcctggatattctggccacagggcagaaacttgcaatcctttggataagtgggcaactcatttgtgtagacaatgggacagatgaactgattgctgagaagtgtgtgtgtttttttttttttagttgaaattgggtcctcgagtttgaattgacaggaagagattccccatacttactgcgcttcatcccgcttgcgcttattgttcacgaacccagatgccataatggaggagttttctgattttttcttggctcttcgtgcacttccctgctctgcctgctttcacgttccaaatgctcgacaagttttccgatttgtgcttcgtcagtcacttttcactctgacagacccgtcagcggcaagttgacagctcggcgtggaaaaactaggtgccgatagcgtctcctggtggaagtggatagattatcgcctgtggctagagagtggaaaacgatgaaaactaaactttaattacatttacacaaccgtggaaaaatttaaaaatatatttcattcatttcattcatcataaactatcgataactagttgtgcaatagaagctcactaaggagttgataaactaaaaggatttcgatagaccgaagcgtgtccttaataagttttagttcgtcgatgtgcccacctcaaattgactggctcattgacatttacccccatttacccccacttgcccctcgttaacccccacgaacatccgcaagatgcgggccactcggccataatggactctgacttggccaccttaggttttggccagggctaagctcattacgtgccacgcctccaaatacaattgcaaactgttgttgtggtggccgaaaatggaaattctgcactcggagaaatgggaaaggatttgaggcgatactacaagtatgagtgatattacttcttaaagtttgattggtatatacatatatatcatggtagggatatataataactgcccccttccaactgaaatacatatgaataatccggactaatttgcagtgtagatgatggagggtggctcatggtgttgataagagtggttggagtccttctcgtggctcgtgccgaaattaattgatgcgacaatggctgagcaacgactaacttgggcctccaactcaattccggccgccacatcacgagctcatcatcatcatgggttgcgagggggcaggcaaattaagaggatgagcaggaggtcgagca

SEQ ID NO: 38408 - DNA, 945 bp, DROSOPHILA
atggcatctgggttcgtgaacaataagcgcaagcgggatgaagcgcacaatcagttcatctgtcccattgtctacacaaatgagttgcccacttatccaaaggattgcaagtttctgccctgtggccagaatatccaggagtactgcaaggagccggtttcgattcccaaactggacacttgtttttcgctaaatttcaaaggacttcatgagctattctccgttaatttgatggatcagtcggcttacgataagctttccgagaatgtgcagccaatgaatcccagagaagctgatctacttaaggacataagagccctagactgggacttcgccagactcgaaccaagtcgcgctcaggaatgcgccaagatgttcgccaaggagcgagtgcatccacctctcccaggactacagcgttctgtggcggtgcccaaggccccaaaagacctgcagccggtcagcctggagcaacaaaaggcgatgattgatgcgagcttcaaggatattggcaaacccctctaccgacatcccaccaatccgggtagcaatgcctaccctgtgcaggtcttgccagtctttcccgatacggatttgcagaaatatagcttcgtccagatgagttttgataatccaccccaaaatagcaaccagggactaatcagggactgcggaagctgtctgatcaacttcagtttcgtccaggacattgcggactctaccgaaaaggtttacgtatccgaccatcgctacagagaggaaaaagccgacgatagcttggagcgcggtgagggttacatactccgcgaggagaatgacgccatcttttacgttggtgtcgacaaatacatcaaattaaggcgggaacgtccacgcccacacgtttcggctaacaagtttctgctgaaggtccagcgtgtgggaatgaatacaactaccgattaa

SEQ ID NO: 38409 - protein, 314 aa, DROSOPHILA
MASGFVNNKRKRDEAHNQFICPIVYTNELPTYPKDCKFLPCGQNIQEYCKEPVSIPKLDTCFSLNFKGLHELFSVNLMDQSAYDKLSENVQPMNPREADLLKDIRALDWDFARLEPSRAQECAKMFAKERVHPPLPGLQRSVAVPKAPKDLQPVSLEQQKAMIDASFKDIGKPLYRHPTNPGSNAYPVQVLPVFPDTDLQKYSFVQMSFDNPPQNSNQGLIRDCGSCLINFSFVQDIADSTEKVYVSDHRYREEKADDSLERGEGYILREENDAIFYVGVDKYIKLRRERPRPHVSANKFLLKVQRVGMNTTTD

SEQ ID NO: 38410 - DNA, 2941 bp, DROSOPHILA
acaggattaaagcagctgcatgcggctcaaaagtctctttacaaatgttatgggaatgtgcgtgaataagagaaaacattttacgacagtcctatacctatatatagtaaagatacagatacttaaagacatgcatttcctagataggctacatcctttaaaaaaccatgattatttccattaataataaactgcttccgataacttcactttggctgatcccaagctgttgtagtctaaaatcccctggcagcccagaaaaattctatttcaactttattgtcaacttcgaactcaatccaatatccccaatttcccagctctcagctgggcattttcccgttcccccaccaacctccccgcccccctgactgtcactcgtccacatcaaattccctgttgatttgaatttaaaagtaattttttatatttcgctttttttttttttttgctttacttgtgtagttggcatatttgcagctgtcgctgctgtcgagacaacgtggcggatgcttaatatttcgttttgactttatttgtagcttgttgcatattatttccaccatttctgttccgtttattgttttggcgcgcacaaattgaatttgtcactttggctctgtggattcgcttaaattgttgccgcgcagaaacgggttgccgaattgatatgcaaaatatttgtgcacatatgcagtggcggataaaaatgcgaaacgctcgctaataaattaaatgcaaattgtgcgcggcccgcacttttaagccaaaacggaatttatttgcttaaattgtgcgagtggcgggcggaaagcaaggatgaaagtgaattgaattgaagttactttgtggtcgctcctgcgggggaaagcaaaaagttgtggccaaagtggttacaaatcaaatcaaaagacccggcaagatgaatggttggcaggaggggcaggaagggcaggcggggcagtcgaccgagttataaattcatttggccaacaaggagatggagaaaaacagcaagcaggcgagcaccttacacagtggcaaaaacaaaaaattctatttgaatttttgaaaataaaagcagaacatagatattaaaatccttaactttataagttttaaaaatgtatgcagtaaattctatcttttatatcgtagtatttttcatcccataaggaagtgatgcatcactttttttcttagtgtccctcatccttgtttccgtggcgcctgctcacccctttcctttgtcttcttgcaggactcgctgcggcggccgcctccactgggcaaccggatgactccggtgatggcccaaccctgtcgacattcctgtcatcatcgcagtcgcagtcgccgtcgcccccagcagcatcagcttcagcatcatccccatccagtttctcatcgtttgcggtggcgcacgggccacaaacggaagccacgaatcacactttcaagagtttagccttcctggacgcgtcctttggctccgatctgtttgcgcagacggacgcgaagagggagcgaagtggcgcagcggatgaggagtcgcaggatgcggacacttcacagtcgctgccaattttcgactttggcatgccgcgcaacatcaccggacgcactggccacacggaggccataattaaatgccgcgtggacagtctgcatgataaatcggtgagtcttggcatgccactcccctcgggtcctgcgggcgcaaagtgatgaagatgcgtgccaaggacatcgagtatatcatatggatgtccactcgttaatcaatttttctgtctccctttcgctcctccttccgctcaacaggtatcctggatacggaaacgtgatctgcatatcctgactgtaggcactgccacctacacgtcggacaagcgcttccaggtgggtccatgtcgcaggaatcctacattcgctggctaattgaatgcgatgcttaacttgggtctcaaagtcagcggacacagtggcttactgcggatacaatctgatggtgaacgaaggggggagtgctactctgaaggactctcaactcttaacgaattttctttccgacagagttgagctgatagtgatatcctcacgtccttttcgattggcagcacatatatatatatatatatatatgagcagggacattaagttaccatctgtcagctttagtttgcattatccttacagcgagctaaatacctgtgcatttatgtattccaaaggaccagtttagctggcatcacaacaaatcctgataaacttttagccacaatgtaaaagttaactccgactctcaggggaattatggccatagggccactttcattatgcatgcataaacgatatttcaatggctaatccaactcataactcaggacaagtccgcaaccacctctcagcctcttaacactgtgttttttttttattttgccactgtgctgcagctgcaaaacaagccgtaaacaaacaaacattcaattgtataattgcttaatttccatgaaaaaatgagagacccgattgcatggaaacacaaatttgcagccttgcaaattgttgcctcgaaagcgaataattattccgccgagactggcacgaattgaattgaattgaaatctgtaaactgcaaactgtggtgtttaaactgatattgtgtcctgtgacaggtgactgaatcgaaggactcacgggagtggacgctgcatgtgaaggcgccactggccaaggatagcggcatctacgagtgccaggtgaacacggagcccaagatgtccatggcctttcagctgaacatcatcggtgagtggcatttgacgagatgtgaaatgaattttgttttatttgaaagtgatttgctgtggcccaactgtttaccttgtcgccgccgggcttattaaaaatgttaattcagttttcgggcggcagctcc

SEQ ID NO: 38411 - DNA, 573 bp, DROSOPHILA
atggagaaaaacagcaagcaggcgagcaccttacacagactcgctgcggcggccgcctccactgggcaaccggatgactccggtgatggcccaaccctgtcgacattcctgtcatcatcgcagtcgcagtcgccgtcgcccccagcagcatcagcttcagcatcatccccatccagtttctcatcgtttgcggtggcgcacgggccacaaacggaagccacgaatcacactttcaagagtttagccttcctggacgcgtcctttggctccgatctgtttgcgcagacggacgcgaagagggagcgaagtggcgcagcggatgaggagtcgcaggatgcggacacttcacagtcgctgccaattttcgactttggcatgccgcgcaacatcaccggacgcactggccacacggaggccataattaaatgccgcgtggacagtctgcatgataaatcggtatcctggatacggaaacgtgatctgcatatcctgactgtaggcactgccacctacacgtcggacaagcgcttccaggtgggtccatgtcgcaggaatcctacattcgctggctaa

SEQ ID NO: 38412 - protein, 190 aa, DROSOPHILA
MEKNSKQASTLHRLAAAAASTGQPDDSGDGPTLSTFLSSSQSQSPSPPAASASASSPSSFSSFAVAHGPQTEATNHTFKSLAFLDASFGSDLFAQTDAKRERSGAADEESQDADTSQSLPIFDFGMPRNITGRTGHTEAIIKCRVDSLHDKSVSWIRKRDLHILTVGTATYTSDKRFQVGPCRRNPTFAG

SEQ ID NO: 38413 - DNA, 2123 bp, DROSOPHILA
gctttatttgcttagaaaaccatttctaatgttttaaaacaccatgtgtgcttctaaagacccaagcctgaagtttttaagcctaagtcgaaacaataacgaaagctggcaattaaaactgagagaagctgctgaaatcaacaaaaactaacatttcctttgccacttgcaacgtgctacttgcaaatgaaaacattttgccgggggccatttcaattcacacaaggggcagatatctttattacggcagtgctgcccattaaacggcagagcgttttacactctaactctatttcgcaaccccccttttaaatccgagcaattcgcccagatccccccgcccatctattctgccaccatctcggtcatgttgctgcggggtttgaacaacagaaagtgattgcttcattgctgatttttgcagtgcagtgaagcaaaccggaggtgggtgtagccaaagtgaaccgagataaaaccgaaagcagcagctgagccataaaaacactaccagcaatgttgctcttgtccgcttagcgcaaatatttcattgacggccagctaaagtaaaagtaaaagtaaaagtttaagccagcataaaacaaaaatataatagcggcagcagcgaatggcgcactatgctgctccagtcgacaacgacggcagcagcagcagcagcagcaacatcagcagcaacaacagcaacattagcagcagcatcagcacttaaatgcagcaagaagaaaaatcagctgaaaactggcaaataaaactcaacgacaggcaaaaactattaaatctcgctggatgcctgcggcaatagttattgttaaacaacacaaggagcagcagcaccaacagcaccaacaacagcaccgacaggaccaacaggaccaaaaggacccacgggcggcgaaacaaatttgcaatataaatttatgcggatttttgcgtcgcagcggcgccgacgacgtcgacgtcatcgaaccgcgtagcccaggccatgctgctgacgtcgacgtcgcagcagcagcagcaggagcaacaacatcagtggcagcaacagcagcagcagcagcagcagcaacaacaagggcagcggcgacgacgcgagcagttattataataatggcgttagttgttagcataatgcagcagcaacaacaatcgctactctggccattctgtaacggtaagtgctctagccctctcagcagatctgccacttttttggcctttgacctggctgcattttggttggccaaaattggtaaaattggccgaaaaactaacgaatttattcagaattaaggttgtagtaaggtaaacattattgatttcttgtttattggacttaattataaaagtagttaagctatattattgataagaacggtcatccatttagctagacaaagttcaggggtcatctctgtggcattttctgtgccatcctatctgtttgcgctgctacttgaactttttgccatcggttttgcagccagggtagcgggaaagcggcggaaaagcgggaaaatgctgtgctgcatagttttagctgctgccataatatttcagagcaatgcaaattatgtttacgtgcgtggaaaatagctgaaatggccgccgtccatttagcaacgggccacgcccccgagcggcgaacgcccagtgcaaagtgtgcactaaaagtatgctttaatagttcaaattgcatttaatgcataatgcagaaaattgctcacaacaccgaagggcagcagcagcatgtgccacatctgcatctgcatctgcagcagcagccataattgcaataacacgagccattcgttcgttcatttgtttcgctttcatgctgagcaatttgttaataattaattttctagcatgaaaatcccccggcgagtgatgggttttcccgttttcggcgccatatgagttgagtttttccgcgatctgcgtttgagttgcattacaccggacattttctatttgctgccgcggacgtgaaagttgtttcctgttttgcggtggacaatagtaataataattattattattattatttattgtaagcaactaatgaattgtttcgctgaattggtctaagtgttcaataaatattt

SEQ ID NO: 38414 - DNA, 123 bp, DROSOPHILA
atgctgctgacgtcgacgtcgcagcagcagcagcaggagcaacaacatcagtggcagcaacagcagcagcagcagcagcagcaacaacaagggcagcggcgacgacgcgagcagttattataa

SEQ ID NO: 38415 - protein, 40 aa, DROSOPHILA
MLLTSTSQQQQQEQQHQWQQQQQQQQQQQQGQRRRREQLL

SEQ ID NO: 38416 - DNA, 2474 bp, DROSOPHILA
tctttgattcacattggctgaatgctaacgaaaccagagcagttccaaaaagccatcctgcaacagtttggcgatccttcgtgcgaggatgggtctgctcttgcttcaagatcagcctggaaaaagagctttcaaaattcaatttcaattgagcccctagccctagatacactgcaacaagaaacacggatagaaaaacattggcttccattttaatatagcaatgatgatacacacaagcatatatgtatacacattagttttctattgctcttaattttatttttattatttgtacgctagtttaagtggctgcaatcgctgtggcagcaaatgaaggtgttcatttaagcattaacaactttagtttgtaaaacgcttacgatcttaccaccacacttccacaacccaccaccacccacaacgcactcacccgctaaaaacacaatgaaacaatagaaaatgtacatttgaagcactttattaattacattaaacggaatgaacagagttaggagaagatatcatcgctgcacgttcatacaattagcctgtagtgcaactgtaattattaattattgtgtagatctacgctaaagttaattttctatttgtttttcgtacgccttaagtttaaacaccgccaatagctaataattagcactctagtgtcgccacaatacctgttcttccattgaaaacgttatctttcgatcaatacataatttatatatgtataaaaaaggaaacaaatttatatgcaataaataaattgaaaactgaaatccaagatcccaaggatcgatcgccttcatctttctcgggactgttatatactgggctacatttgtttaaggatttcgtttcgatcttttctgcaatcgtgcaattcactgtggcgttttttgcgaagatttctaaaatcttgatttgtgtaaaattacaaatgtagaattggtttcaggcggttatcctaggatacatagttaaacttttttttttagataaactcctgattgtccaaaaactctcgaatcatatttctgcaggacttaagcaaggtcctgttgcagtttcgctccttactgggaattggagtcctcgtcttggccttgactatcgacttgttgctcactgaagtctcggatttggccggagtcagggatctgcggaggatgtgcgatggtatggagcgcttcttcagcggctggctggcgactggcggacgaacagtctgatcttttggcgtcgtgttgtcagcaactgccggcggtggagtcggggaacaggactccgtgtaggttataatgttattgcacacttgtcgatcgtattggtagcggagcaacaagagagccgcagccgcctccagttccagagcactgtggttggccatggctacgtcggctgcgtcggaatctcttactggcgagggagtcgcctgtttgcgtttattcaacatgcggtacttcatgattagactgtcgagaaggaactgatgtcctgcttgtctcagggcaaagtttatatatcccaaggatgtacctgcttatgggccacccgttctcgggctctacctaccaattggtcggtaatccgagtggccctaataagtaaccacctttggcacaagaagtcaggtaggatcctacttcagcgaaaataatatttcgcgaattttattgatcctcgctatattcagctaatccagcctaaaaccctaaaccaggtgctcgtcttttataaggcagatggtttagtcaaattctgggaaaattccaaaaaaatatgtacatttaaattctgtgccgttgtgagacaactcggacaataaacaaatgggttatatgattgaagtaaaaaaaataagttccaaagttcctacgatttatttaaataagaatcaaagcaaaatctcttaggattagttaaataacgggtgcctcaggatcaaaaagcggatttttcaacaccgaaaatgaataatttgaacagtttagttggtacggtgaattttttgtcaacaactttctggtgcttggtttattacgaaagttacacacaattcaacagagacccgcttgtctacgacttttcaatatttacacggagatatgcactttgctgctacataaccgaatcaatgtcgttgactacaaaataaggtttattccaaaaataataaaactaaaatttctgttgcattgcgtcattgccgttcgtatctagttgcagttgcaaatgtacacagtaaacacagttaaaggcattcgggttggataggttctgttcggtgcgtgctgataagcatatcagggtagccagatcttctccatggtccctcgggactcgctgttctctacgcgtgaatctcgaacagtttggccacctcattgaggtcatcgtacttcttattctgattgattattgtcctagctaagcctatccgattgaagaggttccacagcaggatg

SEQ ID NO: 38417 - DNA, 474 bp, DROSOPHILA
atgaagtaccgcatgttgaataaacgcaaacaggcgactccctcgccagtaagagattccgacgcagccgacgtagccatggccaaccacagtgctctggaactggaggcggctgcggctctcttgttgctccgctaccaatacgatcgacaagtgtgcaataacattataacctacacggagtcctgttccccgactccaccgccggcagttgctgacaacacgacgccaaaagatcagactgttcgtccgccagtcgccagccagccgctgaagaagcgctccataccatcgcacatcctccgcagatccctgactccggccaaatccgagacttcagtgagcaacaagtcgatagtcaaggccaagacgaggactccaattcccagtaaggagcgaaactgcaacaggaccttgcttaagtcctgcagaaatatgattcgagagtttttggacaatcaggagtttatctaa

SEQ ID NO: 38418 - protein, 157 aa, DROSOPHILA
MKYRMLNKRKQATPSPVRDSDAADVAMANHSALELEAAAALLLLRYQYDRQVCNNIITYTESCSPTPPPAVADNTTPKDQTVRPPVASQPLKKRSIPSHILRRSLTPAKSETSVSNKSIVKAKTRTPIPSKERNCNRTLLKSCRNMIREFLDNQEFI

SEQ ID NO: 38419 - DNA, 2483 bp, DROSOPHILA
atctgggctggtgaagtagttccatttccgcaaaacgagtgggttgagcgatttatggttggggcatagatatgggaaaagtttacaaatcaaggaaactttgtcatgtgcggctcaagtattaaactgatatgagtttatggatatggatatggattgatgggttaaaggtgatgttgacctgcctgtgaagaactgatcctactactacagtgccaataaatgccatagccatatgtttagctgtcgcaatgaccgacttccttgagacgcaattagaaagaaaagtacatcctgcctgggattgccatttcccaaagattccacttacccaaatcgaggctgcagctcctctttcttcgcactgcgccagaatcggagtatcggcggaatgtgaggatgtggggtgtgtaatttacctcaatgattgccaggcccctccgatccaccgatccgccgatccgcaatctatggccaaagtaccgctagatgatgcgctgcctggtccataaacagacatcccaaatgcgaatgcgaggagcggcgcactgtaattgagttcctccaactggaaatggtcaattggcaaatagcagcgacaataaatgaatctccagcggatccgccgagctgcgaaagcctggcccaaacagatttgttcggcttcgccagattacgtgaaaggtgaaagttgtcgagaaccgcaaagcaggggctaaaaggcgagccaggaggatgaggagaaggaggagcggcgggaggagcagcaggtgatcagatacacgtgcagaaaagaggcagtcaaaagtgtaactggataatcgaagatagtatgatatggtatgatatatggttcccaagaatgtgaactcaagaaaacttaaaaagaaaaagttagtttaataatgataaaatattgtattcattttagtacatctatctacattgctctagtttttcttgagtaattttacaaacttattttttgatcatgtacgaactactgacccatagatttttcctggtgcacccatggcgatagcaggtcatgctgaatcggtgagaaaagcgatccgatcccatccagccgcggcgaaccggaccccacctgtcggcgacctgttggcggtggcgatgtttccgtaatccgaatgtggaacagtggcacagtagccagcagcagcggcagtctcctccatttctccacagccgcatcttcatcgctctctgcccctttttgcgacttttcgccatttatggcgcatgcgcgcagtgcagaaggcgcacaaactgacagcaagacatccacatccacatccacatcccaagacttggacgacccactggctgactgctggtgctggaccagctcctccgctctccagatcgcgggacaggttaccattaccattaccatcttgtgcgccgtcttctttagcggcgcattaccgcattgcaaacctgaattcttctcgtctttcattaataatgatgctctttgctttgcacgggggttatgcaaaaataatagggagcccccttaaaagttaataagttaataaatagttataataggtaataggtaattctttgaattggtatataaaccaaatgaacttctccaatttcagttataatccagttataattccttaaactacatctttgttttcagtgcactcaccgacttcatcgtttcttttcatttttggcattccgattccggatgctgtctccctctttctccaagctcccaacttcacattggagcccagtcttctgtgcagcgagcggtgtggcaaaatactagattatgaatgtaaggcagtgggtgtcggagtctccaggtcggaaagcgatgttgcggtgtgtgggtacccacatcggattcggtatcgctgtcgtttcgacggtagcgtgtctgcaacacttttgccagacttttgagtctttggggctcgatcgaggaagttatataatcgagacaacatcgcgatatgtcggcaatatgcctcaatcaatttagcatttatgctgcacttggagaaaatcctgagtatctggtgtagagtctcataactatataagctgactggaaatgaagatatattttaagtttcttatatgcatgatatgcatatgcaactaaagtttctttcggtgtctctctttctgcctgaaagctaataaccaaaaatgcgaaactccccgggcttcgtacctggattatgtgggtggccaatcaggttgggacgatcggctgaagtgccggaggaggaggcggtggagaaggagtcggggaatggatacccatgtaactgatccgtttgactgcctaccgagtgttttttcgagcttcctcattaaactttgccgggagttgctgagattcccattaggtgaccgatatgatgatcaggtgatcgtttagcacacatcgaggaccgatcaacctgttcgacgtcttgggaatttatgggagt

SEQ ID NO: 38420 - DNA, 483 bp, DROSOPHILA
atgaaagacgagaagaattcaggtttgcaatgcggtaatgcgccgctaaagaagacggcgcacaagatggtaatggtaatggtaacctgtcccgcgatctggagagcggaggagctggtccagcaccagcagtcagccagtgggtcgtccaagtcttgggatgtggatgtggatgtggatgtcttgctgtcagtttgtgcgccttctgcactgcgcgcatgcgccataaatggcgaaaagtcgcaaaaaggggcagagagcgatgaagatgcggctgtggagaaatggaggagactgccgctgctgctggctactgtgccactgttccacattcggattacggaaacatcgccaccgccaacaggtcgccgacaggtggggtccggttcgccgcggctggatgggatcggatcgcttttctcaccgattcagcatgacctgctatcgccatgggtgcaccaggaaaaatctatgggtcagtag

SEQ ID NO: 38421 - protein, 160 aa, DROSOPHILA
MKDEKNSGLQCGNAPLKKTAHKMVMVMVTCPAIWRAEELVQHQQSASGSSKSWDVDVDVDVLLSVCAPSALRACAINGEKSQKGAESDEDAAVEKWRRLPLLLATVPLFHIRITETSPPPTGRRQVGSGSPRLDGIGSLFSPIQHDLLSPWVHQEKSMGQ

SEQ ID NO: 38422 - DNA, 4127 bp, DROSOPHILA
atcgtatctctttatatatcacaaaatgtaatctttccccagagtggacattgaccgcggagtactgaaggacttcctggagaagacagcttccttgtccccggaggaacgcggacgggccctcgaaaaagacgagaagttcaccgccgatcatgaggccttggctcaagagggccagacgaatgccgccaatcatgagaaggtgatccaccacttcatcgcactggtgaacaaggagggtactctgtacgagctggatggccgcaagtccttcccgatcaagcacggaccgacttcggaggagacttttgtgaaggatgcggccaaggtctgcaaggagttcatggctcgcgatcccaacgaagtgcgcttcaccgttttggccttgaccgcggcacaacaatagggtggaactaatcccataactgagaaccaccaagatcccggatctgccagactatatatttatatatccaacatattttaaaccaggctgcaaaggcgaacgaagccccgcctttcagccggtcaatagtttacgcatatttattccgcattgagccaaagccgcatatgtattgggaacaccatgattgttattaaagagtgcactctagcttgatgctaagcttattctgaacaccacacggcttttacttattaatatacatatataaaaatataggcttggctgttcaaactccccctttgtccaccacctctgtgccaacagctgataacgatgtggcctccattgcgcatgccctgccaattagtcgtgctccacgtaaacgcttgaaccttgttttttctacacttagcattaaaaaagcaatccccgtgcagcggagctctagcctgaaatttaagcactggataggagtatatcagagctatcgtatcgacagaaaccctccaggagtgccgcccaacgagttgatgccgaggagcagcagtggagctagcgggcagcagttaagagccggactttctggccaggatgaggctgctcaaggaactgatgcgagtggccacccaacacagagccttctactgctatgtgctgctcagcgtctggatattccttcttatagcgggtaagtggaaaagtagcggattaatggcaatcgtgggaaaacattcaatatatactcaatataaatctaagaaaagatttcttaagttgacccaattagttaatatggttgtcaacactcgaataggacgtgctttgttatattcataggcaaatagctaatccttgcctttgataatcctttttaggaatgtatcgctacatgggcaatgttgagtcgactccaagcggtggctcagttttcggacccagttcgtctggcaccgtcagttccttgggcggcgatagttcgccatcttccactgcccagcgattcgccaagtacagagaacgctgtgctccgttggctcagctgcagcgtttggatgatggcggcatcttggagggttggaagcttcagggcgtgctcctggtcatcaggcacggggatcggggacccatatcccacgttcgcagtgctggcatcaactgcggcgtgagtggtggctcagataacttggtcaacaggtgggctatcacatttccggaaatatttattcattgatacgtggttttgctttaggtatcgcagttttctgtataactcgagcagctccgcttcgggatcaaatcacatgtactggaacaaggtggggccgttccatgggtttccactgctgccggccacagaacgtggttgtccactggggcagctcacctacaagtgagtgaatgcactaccggcattcaatgccgctattaatcatacgcctgacttttcattcaccaggggaatctcgcagctgctacacgtgggcgacatcatgcaccaggtctatgctcatccactgggtctcctgctcaaaccgaatccgaaccgagcctctgtggaaacgacgccccacacgcttcttaattcggatgaagtggtggtcttcaccactcgctatcgtcgcaccttccagtccgcattggccatgctgttcaccttgcttccggcggacaagtggctggctttgaatgtccgggaatcgcatagcatggctttctgcttcggcgagtgcagctgtcctcagtcggctctgctgcgaaaacgtctggaggccatgggtgataagcagctcctgaaacgtggcgatgtcctggatgtgatgcagtggatcggaggcaccatactgcagcacacgccgaatggcattagcaatcccttcgaggtggtggatgcccttttgacagttctatgccatgacgccaccttgccatgtcgcaggaaaaaagcgctttccactccaaagcccctcagaaagaactccaatcaggaactggtggatgtgatcaatatagatcaggatgaaacagctgccaacttgatgcaggtaactattgaagagctcctgcaatgttgaaggtttcatgttaccttgtccccaggaggcacaaacacaggtggaacccgactcccctgaggtggaaaatgggaatccctcagtgcaggcggatgaagctcaagagggctgcgtcgagcccagccacgtggataccctgatgtcctttgcggacgaactatcgcaacgctccgctggtcactcgtactacaagctatccggattgctgcgatcctacggaatgatccgtcacatagtcagctacatgctgaagatgatctctggcgacaggacgaagtttgtcctgtactctggacacgactgcaccatgcagtatcttacagctgccctgggaatcatcaccaaccagggccaaaccatagcctatgcctccagactagcattcgaagtttaccggagcgacgctcacacggattactacttccgggtggtgtacaatggaaaggatgtcacgcagcagatcgatttctgcgagggaggcaaaagcctacgggtcaccagggattccaggggcaacaaagccgatctctgtcccatcgagaacatcattcgcttcctgcacgaagattacttcagtccgctgaatgccaccaattttaaggaagcctgtggctctgtgaatcccccaaaaactggcgaattttagcagcccgcccaggtgatgagtaggagatcccttttataaaactgtgataagtagtttagatgccacacatgaaaagaagagcactatgtccagtcttatcccgaactggaaacgaccgcttattagcgatgttatctaattagttggaatttagttaatgcattcaacttgttgatccacaaatcgaaaacgatacatatcaatggagcacttgttagactataagaacctctttctaaaaatctagcaatacggaaatgaaacttgatgtcgcaaacatatcagctttttgaagtttattataaaaaaaatcttaggaaaacccttccacaaattttagcatttataacatatttttatgaacatatcaaagcaaagagtaaaagaactctaggaagatgcgaatttttagttcttgattaaataccgtaaaataacaattttttaatatacatataaataattagcaaataaaaaatttcaaaatttccacgaattcgttaaatctaaattgagatcttataagcatactattaatattattaatatccatctggaaacaacacaaaaaaccgaaacgcaaacatatcatgcccaaagtaatatttttaagagataaattgtaaatgtggatactacagaagttttaaattgaaataaatgttctcgaattttaatattattggcaaatctttaatataatatgttttttatggtgtcaaggggttaaagtattgaaaggatgggaaacatattcatacgtcattattttcacgattttttccgtcaagtttgtatatattttcgtgaccacgggccagcaaatattcacgatatattttcttttgagtttattttatgtgactgcggattttttcattgccagaatttgggcgtttttaaaatttatggcaatcaccaatatagatttatttatggaactacaactaagtggtacacttagagcttctattgctgtgacatttttgaactagtatta

SEQ ID NO: 38423 - DNA, 1764 bp, DROSOPHILA
atgaggctgctcaaggaactgatgcgagtggccacccaacacagagccttctactgctatgtgctgctcagcgtctggatattccttcttatagcgggaatgtatcgctacatgggcaatgttgagtcgactccaagcggtggctcagttttcggacccagttcgtctggcaccgtcagttccttgggcggcgatagttcgccatcttccactgcccagcgattcgccaagtacagagaacgctgtgctccgttggctcagctgcagcgtttggatgatggcggcatcttggagggttggaagcttcagggcgtgctcctggtcatcaggcacggggatcggggacccatatcccacgttcgcagtgctggcatcaactgcggcgtgagtggtggctcagataacttggtcaacaggtatcgcagttttctgtataactcgagcagctccgcttcgggatcaaatcacatgtactggaacaaggtggggccgttccatgggtttccactgctgccggccacagaacgtggttgtccactggggcagctcacctacaagggaatctcgcagctgctacacgtgggcgacatcatgcaccaggtctatgctcatccactgggtctcctgctcaaaccgaatccgaaccgagcctctgtggaaacgacgccccacacgcttcttaattcggatgaagtggtggtcttcaccactcgctatcgtcgcaccttccagtccgcattggccatgctgttcaccttgcttccggcggacaagtggctggctttgaatgtccgggaatcgcatagcatggctttctgcttcggcgagtgcagctgtcctcagtcggctctgctgcgaaaacgtctggaggccatgggtgataagcagctcctgaaacgtggcgatgtcctggatgtgatgcagtggatcggaggcaccatactgcagcacacgccgaatggcattagcaatcccttcgaggtggtggatgcccttttgacagttctatgccatgacgccaccttgccatgtcgcaggaaaaaagcgctttccactccaaagcccctcagaaagaactccaatcaggaactggtggatgtgatcaatatagatcaggatgaaacagctgccaacttgatgcaggaggcacaaacacaggtggaacccgactcccctgaggtggaaaatgggaatccctcagtgcaggcggatgaagctcaagagggctgcgtcgagcccagccacgtggataccctgatgtcctttgcggacgaactatcgcaacgctccgctggtcactcgtactacaagctatccggattgctgcgatcctacggaatgatccgtcacatagtcagctacatgctgaagatgatctctggcgacaggacgaagtttgtcctgtactctggacacgactgcaccatgcagtatcttacagctgccctgggaatcatcaccaaccagggccaaaccatagcctatgcctccagactagcattcgaagtttaccggagcgacgctcacacggattactacttccgggtggtgtacaatggaaaggatgtcacgcagcagatcgatttctgcgagggaggcaaaagcctacgggtcaccagggattccaggggcaacaaagccgatctctgtcccatcgagaacatcattcgcttcctgcacgaagattacttcagtccgctgaatgccaccaattttaaggaagcctgtggctctgtgaatcccccaaaaactggcgaattttag

SEQ ID NO: 38424 - protein, 587 aa, DROSOPHILA
MRLLKELMRVATQHRAFYCYVLLSVWIFLLIAGMYRYMGNVESTPSGGSVFGPSSSGTVSSLGGDSSPSSTAQRFAKYRERCAPLAQLQRLDDGGILEGWKLQGVLLVIRHGDRGPISHVRSAGINCGVSGGSDNLVNRYRSFLYNSSSSASGSNHMYWNKVGPFHGFPLLPATERGCPLGQLTYKGISQLLHVGDIMHQVYAHPLGLLLKPNPNRASVETTPHTLLNSDEVVVFTTRYRRTFQSALAMLFTLLPADKWLALNVRESHSMAFCFGECSCPQSALLRKRLEAMGDKQLLKRGDVLDVMQWIGGTILQHTPNGISNPFEVVDALLTVLCHDATLPCRRKKALSTPKPLRKNSNQELVDVINIDQDETAANLMQEAQTQVEPDSPEVENGNPSVQADEAQEGCVEPSHVDTLMSFADELSQRSAGHSYYKLSGLLRSYGMIRHIVSYMLKMISGDRTKFVLYSGHDCTMQYLTAALGIITNQGQTIAYASRLAFEVYRSDAHTDYYFRVVYNGKDVTQQIDFCEGGKSLRVTRDSRGNKADLCPIENIIRFLHEDYFSPLNATNFKEACGSVNPPKTGEF

SEQ ID NO: 38425 - DNA, 2234 bp, DROSOPHILA
tagatgcagctaagaatcggcgttgtcgtccacccactgtactcccagctgctgtcgtaggtgtcccggaagttgcaaatcccgactttgccatccgccagacccactgcaattatgggctggtcactgtggtaggaggcggccacgcagcgggcatattgatagcgcgactcgttggcgaggtagttcacggatatataaggcaggcgacctgcaaggggggcggttaagtaaagtggcataatcccttggggaaaaccctacttttttggctgtgatcatctttgcggcgcacttcgtataaatggatttcctggccccaggatacgaatttgtcgggaaaatgtggaaaccagctgagtccgtgtgtattgccgctcatcgtggccgattttccatcgatgtaaaaaaaaacaattttcactacagactaaattgcgtcgcgttatcagtttgcaaaaacaaaaacgtgagataaacactgcactacatggcaagaagaagaggcgcacacacactagccggtcgaccagctgttggccgcatgttagccagcactggcccagttcgataattcgttttatcgataagctggtaggtgattttgttttccttttttttttgtaagaaagcaaacgtgtttaatatttacaactcccacttaaaatgctgcgcaaaacaccaaaacctgcaatttggaaattcatcaaaggaagtgccaaaacactgtttgtcctcgaggcagtctgcttcgcagccagctacggcgtttattatcgcatgaacacgaatcgaggtgggaggatatttatataattattttgatcgttaataacaatccgctcctagagtttcgtcagcatattcacgagaactatcccttcgttttggactattactacaaaattggtgaaatcgtcggagacagcacagtgcgacaggcggatgcgagttattggagtgctttgaagaaaagcgactagaggagaccgcttccaaaatgcttagtaatccctactttaagtccgttttgtggctgattggcttcggaggaatggggtacggcctaatggtgttaaccgagccgaacgtcgacaagttagagcgcatcaaagcctccgtttcaagtaccaaactgagtgcggatgagcagcgaaaggctctgtttatgaagaagctccaggaggcgtccaccaccagtgccccaatctacaggtcatcgtccgagaaataggatagttaggaagcttaatcgtcatcaatttatcaatttgttatactttttaaatacaaatgttaagcatttaatcttaattggttgggtagggtgattcattagaagaaaattcgattcgtacaagaatgcgaaataggaaaaaggaaataaaattactaaattgttaatattcacgttttaaatgtttacagagcccttactacttctgttacttttaacataatctgttaggaatcttgaccacccctactcgcagtgctcgtaaacgtccgattcttaacagcgaatctaatctaagcgcaattgcattttaatggtaatttaattgccattattgacagagtttatggcaacgaagacgcacacaatgtccgcgggggatgtccccttggtggcgatggccaaggttccgccgaccattcagtttgaggccacaaagaactttcactcgcacaccgagcagaaggaattggacagtgctttcctgggctacaatcgacgtccttgggttcgccaaaaggctcacagggacacacgccgggagagggagatcctcaacggtctactgtgctctaccagcgtggaaacggactacgccagcacctgtgtggacaaacttattgccgagaacattaactatctggatttggcctctctcaccgacgaagatttggaactcttcgggttcaagtgtcgaaagcaacggcaacagctcctggagatgttcgaaaagattcccaaccagaatcccagttacgaatacatttgcaaccatcctgaagccgaaaactacaacaatcagattctgggcaatgctggcaaccactttatgtccctgcgcgcttctttagcggccaccaactacaagctgcaggtctccactcccgaggacgtcgtggtgggcgacaaacgatatgccagctgctttgcccaggaaactctaaaaagcgtgaatcagatcaccgaagagattgccaaggatctcgcgaaaatcgaa

SEQ ID NO: 38426 - DNA, 234 bp, DROSOPHILA
atgcttagtaatccctactttaagtccgttttgtggctgattggcttcggaggaatggggtacggcctaatggtgttaaccgagccgaacgtcgacaagttagagcgcatcaaagcctccgtttcaagtaccaaactgagtgcggatgagcagcgaaaggctctgtttatgaagaagctccaggaggcgtccaccaccagtgccccaatctacaggtcatcgtccgagaaatag

SEQ ID NO: 38427 - protein, 77 aa, DROSOPHILA
MLSNPYFKSVLWLIGFGGMGYGLMVLTEPNVDKLERIKASVSSTKLSADEQRKALFMKKLQEASTTSAPIYRSSSEK

SEQ ID NO: 38428 - DNA, 3043 bp, DROSOPHILA
acataaaataaacctattatatactatatataaatatatcatcacttatttgggaagtacatcaaagtattacaaagggcaagtaatgggttctatagattagaatgaacggctgattagaccttaacagatggagcacactattaattaatgcaaaaacaaaagtggttaagaaaatggtgttggcagtctcactgattgcgcattagtcagcaggctggtcaaaagatttcatagtgcattgcttaacaaactggaaaagctaagagaagtggctaagacatggcataaaatgtttatctgtaggacagataaacattgttgcccccataactgaagtgataagttacccccctgtatccaattttcactacgcccctgctggaagatggactgcgttgcacttggggccaagcaagaggttgcgaaagagagaaatcgtgagagcgacagagagagagagacgtcggttaacaggtgaagaagaagcacttatgttgcgaaagaaaccaattaattagtgcatcccaagcagataagagataaggagcacacccacctccttgtccttgagtcccagcagcagaacctcctccatgagcgttagtcgtgtttccttggagtcgccatcgtcgatattgtcctcctggtcctttaggttgtccagtgcatcctggttgtcgtccggcgtgttggcattcaacccaccctccgccccaccgttttcgcggggtttcaccgagcgacgcaccaatccgtcggagcgattcattccggagagttgggttgggtagtcgggaagttcggatcgatggagttttggagatgtgggatgcgagcggagcacctatgtttttctgctgctgctcttcttcctctttcctcgttttgtgtgtgtggcacaatttgctgactcgacgttgggagtttcacagtgtgtgtgtgtgtctgtttgcgcgagtgcgggtgtttgcgtttttctctgtgtacttgtgtcttgtgtttttgtgtgttgttgttttcactgactcttttgcgccccctttattttgtattcttttgcacacacgcacttttcacactatcgcaaaaatgcaggccctaaactgcgtttcgttgttgctgctttgctcggcgtttttgcgctgggaactcgacggtttgatttacaatttggtggcccgtactaatggtgcatttgcattggccttgcatttactgggaatatgcgagtgcctgcgcgaaataagctttttcctattatttgtgtcttttgtcgacgttccgacgtgacatgatttccgcacttttcagtactggcaattttccagaccttaagtgttggataacgttttgcttctagaggtgctgttaaaacgaaattaatttaacttttactcttaattttttgtaattcagcttaatttatttaatcgtaaagtttttgtttgaatgatattacagttccttgtccatactaagggtttggtaatgttatgaatccgaaccgatagtttgtccgatagttgtaatcgctgtatgactcatctctaacggaaacacaaaataaaacctactacaatttgttgcattttgcctaaattcgtcacaaacactgccgttaaaacgtttataatgtcctacttgaccaatttcaacagtgatactgccaagcaaattcttatggacataatacgctgtgtaaatcagccggaaaactcgaagaaactctcagaggcaaaggcttccgctggaaaagagatgattctcatgatgcagcacgtaaataccaagcaaatcaaaacaaataaccaaatagtttaacataatacattgcaggtttttccattggtgatgcaactccaactggaggtcattaagggtcatgggtttcctggaaaccgcgagggattagtccagttctcccagctcatcagagaaatggaaagggacgacatggaaatcgtacgcctgcgcagtcagatccgcgccatatacctgccccccatagctataaacaccaccaacgacatcctaatctaagcgtggggtaaatcccccaaacaagactgcaattctgccccccggtgggttttttaatatactttaagcgacttttaatatttgtagcccttttcatttgaagaaactatattcattttcaattatgccttaacgtcatctagaaaatcttattttcaaagaatattgaaatacttctctaatacagatttctgaaacaggccaccaaaatagacttaagcttgatattcttataaaatgcatttcttttgataagtttgtgatcttttttgtgtattttttgttgatgtacaaatgtttttcttgttcttgctaacaataagtaacatggcaaaggttgctataaacaattaaggatctgtgccgttccatcgtcagcttttaggatctaggatatgtcgatcagtcacggcgataaattaaacagttttctttcgtacctatacaataagttccttaagagctatacttttatgtacacgtcaagtagtgagctgctcgtccagccttcatcttataaacaattaggcgaggataattagtaacaatgtgaaatcctaatgcgcgctagcaccatttgtggtgctggcattattgttattcccgttttcgaggtctgtagccgtcagtttagccggattaatgttttttatgtcgtttccgttcagtttatgctgcaaatgctgcagctgctgggcgaggtgctcgttctccgcctgcgtaatgctgtcaacatcaatggacatcgacataggtgagtggggcgtaagcggagtcactggattgctgacgcacaactcctcaatggtggagtcgctgttacttgagggcgtcgaggagcgtgaccgcactggatacgaatcgtccaggggcagagcaaagccctgggtgatcatcagatcggcaatatttagttcagagttgtcggctggatcgaatagttccactccgggcagcggggttccctccttggcagcagcacttacagcggtggttgccc

SEQ ID NO: 38429 - DNA, 690 bp, DROSOPHILA
tgtttttgtgtgttgttgttttcactgactcttttgcgccccctttattttgtattcttttgcacacacgcacttttcacactatcgcaaaaatgcaggccctaaactgcgtttcgttgttgctgctttgctcggcgtttttgcgctgggaactcgacggtttgatttacaatttggtggcccgtactaatggtgcatttgcattggccttgcatttactgggaatatgcgagtgcctgcgcgaaataagctttttcctattatttgtgtcttttgtcgacgttccgacgtgacatgatttccgcacttttcagtactggcaattttccagaccttaagtgttggataacgttttgcttctagagtgatactgccaagcaaattcttatggacataatacgctgtgtaaatcagccggaaaactcgaagaaactctcagaggcaaaggcttccgctggaaaagagatgattctcatgatgcagcacgtttttccattggtgatgcaactccaactggaggtcattaagggtcatgggtttcctggaaaccgcgagggattagtccagttctcccagctcatcagagaaatggaaagggacgacatggaaatcgtacgcctgcgcagtcagatccgcgccatatacctgccccccatagctataaacaccaccaacgacatcctaatctaa

SEQ ID NO: 38430 - protein, 100 aa, DROSOPHILA
MDIIRCVNQPENSKKLSEAKASAGKEMILMMQHVFPLVMQLQLEVIKGHGFPGNREGLVQFSQLIREMERDDMEIVRLRSQIRAIYLPPIAINTTNDILI

SEQ ID NO: 38431 - DNA, 2579 bp, DROSOPHILA
tagcattcagttgcaaattatttgcattgggaatcgcaattgaattggaatgtcacttgcgtgcggagcactcttattcgatatgcatcctttggcccgcatgcatacatatacgatatgcatggatcctttaccccacgaaacccggcatcctgtccgggcaaactcatttacaataaatgaagactgactgaggcagccacgaaacaaataaacttttttgcggcctcgccaggatgcgagcatgtagggatacggatgccacggccaccgaagtggaggttcctcctctgggctttgctatttttcatttaattaaatattttacatgcaaagtgcattatgagcagtgggcgaggcaaaaaccaagcagataacttggtaaagtcacacgggcgcctctcgggaggccaggacatcgatgccaatccatctatccaccggtgcaggacgaaactattcactcgagataacttcatgaacagttgtggcaggatatagagcactactgtcgcagccatcaattcgagacaccgcaaaaggggggcagaaaagtggataagttatttttcacctcgatcctagagccttaacttcattagcctaatgactaaatgcactttaccatgatctacatcgatgtagctattttctgcagctgcttttcctgtttccttactgttagagatgttaattgattttttttataaacctgttcttatttatagttgtattaccttggattggatcctaggatcatgttttctttataaaatttccttttgacaattgtaaattaaatccgaatcaagccagtcgtctttcacctgtcagcatgtccggcgtaatcatatttctgtgtcttccaatcattgttttccattttcccgaaagcatgtgtgtcacttaacagcaaacataacatagattgttggctgcacacgtccatcccgaaatccgtaatccataaaccgtgaacgttactcgtacaaccgatccaatgatgtccaggaaaggcaatcaactccacccgtcatcaatccgtccatcatcgaccacaccggactgcaatcagaagcggcgaggcgacatgacagctcctcctccgaacccaaagccagagaaaagccgcatcatggagatgcatgcgatttttctggggcacgacactcgcggcgacaataagatatccatccggcacctgggccactgtctgcgtgcgatgggcgccactcccacggaggcgatggtcagcaaacatgtccgccagtacgaggcctccaccatgcagcgcatatgcttcgatgaggtcatgggcatctactccagtcttggcaagcacggcggcatgttgtctcccaagaaaaaacagatcgaggcggaccagttcgtatccagtctaagggtctttgatacggataagtccggttggattcccgccatcagactccggcgcattctaaccaagaccggggagtgcatgggcagcatggaagtggacgagctgctccagggtaggatcaacaaagacggcttggtcgactacaagaagctggttcaagacattatctatgggtaacttgggggaaatcaaaaggaaaggagagtcattcagaggagctggaaatggaagaatagcccggaaaacaaaccatatttagacaggtgaaaaatgtgtttcaaataaatgtttgtttaaaaacccaaagagagcaaccttaatgtttccaaagctatgcagtccaaagaaggattgcatattttcaggcggtctgaaaaaataagcagcaaggtacatacatatatacatatatatatgataaggggtaatcatcagattaggtagatttctttcctattctgctggtattatttcataaaatgtaactggagagtggcatctgtgaatcaatcgaaactgccctcagtgccattatttatacagagtgccccacatatggcatcattaattgttcaccacacccagtactctgcagggaaatgaatgacccaaaaaggcagctggacagctgagttcatcatccatttggtagtgggattcggaatcggaaacgctggccgcccagaacaagtgcaatggattgcaaataatttcaaagcgctgccccaaaacatggaaagtgcctaatgctaatgcgtgatgatgcctccagctgtggtcagcgattcggtggggaagattggaaataggagcactagtattcgggtgcggctggtggtggcaataaatgcgaaaacatgaactgcacccggatcgatgggtggcatatgcaaatgctgtcaaacacactccaattcctggcatatttccgacacattttggtagccttcgaaatagaaagaaatagaaaaagggaacgaggcgctagtacaaatcaattggaggacagaatggagttgcttagtgtgggccctcaaatactgactttctatgccccctatgatgaccgtcaaagaaggatggtgactttgctgaatcccaacgataggcatgttcttttcaaagtgagatgaacaatccatcgtgtatatgtccatccatctactgtttgcagcta

SEQ ID NO: 38432 - DNA, 579 bp, DROSOPHILA
atgatgtccaggaaaggcaatcaactccacccgtcatcaatccgtccatcatcgaccacaccggactgcaatcagaagcggcgaggcgacatgacagctcctcctccgaacccaaagccagagaaaagccgcatcatggagatgcatgcgatttttctggggcacgacactcgcggcgacaataagatatccatccggcacctgggccactgtctgcgtgcgatgggcgccactcccacggaggcgatggtcagcaaacatgtccgccagtacgaggcctccaccatgcagcgcatatgcttcgatgaggtcatgggcatctactccagtcttggcaagcacggcggcatgttgtctcccaagaaaaaacagatcgaggcggaccagttcgtatccagtctaagggtctttgatacggataagtccggttggattcccgccatcagactccggcgcattctaaccaagaccggggagtgcatgggcagcatggaagtggacgagctgctccagggtaggatcaacaaagacggcttggtcgactacaagaagctggttcaagacattatctatgggtaa

SEQ ID NO: 38433 - protein, 192 aa, DROSOPHILA
MMSRKGNQLHPSSIRPSSTTPDCNQKRRGDMTAPPPNPKPEKSRIMEMHAIFLGHDTRGDNKISIRHLGHCLRAMGATPTEAMVSKHVRQYEASTMQRICFDEVMGIYSSLGKHGGMLSPKKKQIEADQFVSSLRVFDTDKSGWIPAIRLRRILTKTGECMGSMEVDELLQGRINKDGLVDYKKLVQDIIYG

SEQ ID NO: 38434 - DNA, 5146 bp, DROSOPHILA
tgccagcttcacctctggcccaccaaatacgtgattatttatgtataagtggagcacatctgaggacccgtatctgcatctccatctgaacgtaggcagttgtgaggtcctttcaggttgtcaatttgcaaatttagttggcgcccagtgcatcgcccgtgggtgtggcagttgagtacgtacgtaatgctaatgccctcgtttgccgagtatcctattaaagggttaaagcttctctcgattgcacgaactgtaaattgtatttacagtggggctcagttgggaccaggcgacaaagttgttataattcacacagtgattataatagatattacgttgcactaatgttcaagtagttgcgtaattatttctatttgctaaagaaaaatagtttgaacttttagcggctccccaacttaaaaagtacatttcaataactgaacatatctatgaaaagtttgtaaccttattacggtcttaagggcattggtttatttcgttttcaaatacctatccaattacttggtctatttacctattgcctaggcaattgcagctctggctggcatatttaatgacttattaatggtcggtaggtggaattggaacccggaggcgctcaactccaacacggccaattagcaactcaatggggttgaaaattgtgaagttgactgctcacacattccgctccgtaggatgcctcgtttcgcctagtttttggttgttttggcatcgaacaaacaactcgatttagtaaaggtgccaaagagctggggtgcctatcgattgacctactgagtctggctacagttcggaaaaattcgtattaagaatactccaattgatgaaaagatgagggaggagaaaactctcagataccataaaataatggataagagtatgtagaaaacaaagtatcttagatcgaatctaatgtactatattgttgtatccctccaaagttacatttgggaaaaatttcttatagtgttcttattcaattgccacttacccgcgatccttcggatgtggttacgcaggtgccaccgttgtagcagcccagcttgatgcaatcgacatcgcctgccttctcctcgggcactccgccggatccccttccgccggtggagaccgtatttgtgccctccacttcctcgctgctctccgtgaccgatggcttcgtttgggaagccgtgggtggtccatcgggagtggtgtaaacatttatggccgacgtcggtggcggtaaagtttgtgcggattgtgtggatggaggagtgggtggtatcgtgggcggcggctgggttaccggtggcagggtaacaggaggtaaagtgggtggcagtgtaggtgtctctgtagccaaggaaggaggcgaaggaggaggagtggtagtcgctggaggaacaggagctggtgtggctggtggtgctgcagttccaagtggtgcaatcgtagcgggcaccaccacaggaaccacagttgtctcagctggagcaaagggcgactctgtggtcaccacggcaggttcctgcactccaataaggtcctctgtttgcaaaggatgtcccgtagttatttccactggctgtggagtggtgaactcgtcatgatgatgatgatggtggtgctcgtcttcttcgagaggctgaagagtggttccttcggcttcatggtgaggatgatgatggtggtgatggtgtgttgtcggggatccagtggttgtgatcagcgaaggtataacttcatttgaatccaaaatggtgaccacaatttggggcgtgtgcggagtgggtaactcaacggatgagtcctcagtgggtgaggtggtggtgacacctgcaggtggttgaactgtggtgaatctgccagcactcgttcgatgtgtagtgatcagcacttccgccggatactccgtgaagaagggagccgccgtggtgggcacctctgtccaaaggtggtgagttgaggcagtcgtttccaccacatccagtggtggctctggggcaaaggtaggcctgggcaccgggaccacccgtggggtggtggtttccggcagaggagtgggtgtgacatagtctatggagatgctagtttcgatcgtagtcactctctgcacgaaaacgggagctggtgtggtgaatacctccactgattccgaactactactgctacttccggatgaggtgatgtccactgaaatggtgatactcggtgctgcagtgggtcgcacagtggtgacctcttcactaccactttcacttttgctgccactcacttcgaagtgcggcacagtggtgtattcctcggaggtaaccacttctccggaactttccgacgacgcagacgtttgaggctttcccggcaacggaggcaaagtggtgaagatgctgggagattcctccgaagaactggaggatctgcttgttggtggtcgcgctgtagttcccggaattatttcctcctccgtttccgtttccgattccgacgccgattccgattcgggatgtggcttagattctggttcttgttcggattcgggttcgggttgtgctggaacggccgttgtttgctccacggatatgctatggctaccgctttctgggggcgccacagtcggtgttttaatctcgacggaaacgccttcctccgacgatgaagaagaggatgatggggatagcacagaggtgaccacttccgcaggagcagatgtggtaactactataatctccacctcttctgaagctctggatggcgataccgttgtctccggcggagtgacgggcctcactgtgggtggagccattgtggatgtggtggtagttctccgtggcggagattgcgtggccggtgctgtgtagttgcagtccagggactcctcacccaccatcaggcactcgcagagcataccggtcaataggggaggacatgagcaggagaaggtatcgacaccgtcgatgcaaacaccaccattcatgcaccgcggtcccaattggcattcgtcgtactggaactcacacttctcgccatgatagtcgggtacacaatagcacgtgggtacaccctcctccatcaagcacaaggcattattctgacacggattgtccgcacagatgaggatctcctcctcgcagttgatgcccgtatatcccatgggacaggcgcaggcataggccgccagcttgtccacgcagacgcctccattttggcagggcgacgaggcgcactcgttaatctcctcctggcaaatccgaccatgccagcccgccggacagtcgcaggtgaactccagtccaggaccctcgatgcactcaccaccgtgctggcaacgagcaccagttcctagaaagcatatgatatgcagagatatgcaaaattaaagaagtgaataattgctggttgctgaaatattatttaaataaatttaatttaatagtgggagcactgaaagtaccacgtattagtacactaaattccatttaataccttctgtatttgctaaataaatctcagcctgtgacagctcgacgcattcaccattttctggccattcatcatcccgaatcgcactcacctgtctcgcagacagcgacatccagttcgcagtgagatcccaggtaacctggttggcaggtgcatatgtagccattggttctgtcccggcagagtccgccgttctggcagggattcgacatgcattcgtcgacgttctcctcgcagttggatcctggaacgaagtcgaataaaaatacgatatgaatacgagtaacaaggcgacttgtctgaaggtcaaaagccaaccacagtaatgtttgatttcaattatagaaatatgaattatgcaggccaaagtttttcgcagatggaattcatttatttatgcctgatattgatattgatattgttttgaggtttaattattttttgccagccgcaatgagcttttaacctatttcaccgaggactaattgtttcaactttgcggttttatgcatgcattttaattgaaatatgttttgaaggaaaaagttagacaaatactttagaaattttaattaatcaccgaggtagaaaggaatttatttcaattatttctatatatttccctacggcactcaaataaccctttatttcattcagcatcagtttctctttgcacttacgtttgaaacaagtgcgcacaattgaagtgcaattgaatgacctttcattgtatttgccaacggatatttttctttttttccgcctcgatcctattcccttcaatctatttctctgctttctattcccaaaatgaaaaataagaaagtgaaaagttttcaatacaagcgcatcaatggcaatcaaaagaaaccctacaagtgctgatttggttgcaagcagtataaacaattcaaaaggatatttacacgcacactcacaactgtatccacccacccacactggatatagaacacacatggcaaaaatttggagctgtccttcaaactctgtgcgaaatggttgtaaactagtggactacagggaactcaaaggcaatactctttttaaatttgttatattttatttattgtacgttattaaggttttttcttataaaactaatattatcttgattttatagtacaatcaattattccagcgggccgtattcgttttaaagctgctcaggaaatgatagagaaaaaacaatcagctcagttctattcaaacagcagggaattcccacagttctaagcaaaatgcttcgttttttggatagagcaatctgcactgctgggggtatctagtttgacagccaacaatggcaacaaatgcctggaaatacttttcaattttctgctcaacaacttgcagcgacgttgacttggtctcagtgttttgccaaaaggcagcaactgtcagacagacagacaatcttttgccacgggcgatgggtaaaatcggtgggagggaatcccccattcgtttccggctgagcttgcgccagtgcaacgctgcgtatgagtgatattattgggtgtgtgtgtgtgcttggaagcgcttttctttgccaaatttatagccagcgaaatattttgtatgtctgaagtttgagaatttatttgcccggcatagaaacgccttttagagtttgggcctt

SEQ ID NO: 38435 - DNA, 2517 bp, DROSOPHILA
atgctgaatgaaataaagggatccaactgcgaggagaacgtcgacgaatgcatgtcgaatccctgccagaacggcggactctgccgggacagaaccaatggctacatatgcacctgccaaccaggttacctgggatctcactgcgaactggatgtcgctgtctgcgagacaggaactggtgctcgttgccagcacggtggtgagtgcatcgagggtcctggactggagttcacctgcgactgtccggcgggctggcatggtcggatttgccaggaggagattaacgagtgcgcctcgtcgccctgccaaaatggaggcgtctgcgtggacaagctggcggcctatgcctgcgcctgtcccatgggatatacgggcatcaactgcgaggaggagatcctcatctgtgcggacaatccgtgtcagaataatgccttgtgcttgatggaggagggtgtacccacgtgctattgtgtacccgactatcatggcgagaagtgtgagttccagtacgacgaatgccaattgggaccgcggtgcatgaatggtggtgtttgcatcgacggtgtcgataccttctcctgctcatgtcctcccctattgaccggtatgctctgcgagtgcctgatggtgggtgaggagtccctggactgcaactacacagcaccggccacgcaatctccgccacggagaactaccaccacatccacaatggctccacccacagtgaggcccgtcactccgccggagacaacggtatcgccatccagagcttcagaagaggtggagattatagtagttaccacatctgctcctgcggaagtggtcacctctgtgctatccccatcatcctcttcttcatcgtcggaggaaggcgtttccgtcgagattaaaacaccgactgtggcgcccccagaaagcggtagccatagcatatccgtggagcaaacaacggccgttccagcacaacccgaacccgaatccgaacaagaaccagaatctaagccacatcccgaatcggaatcggcgtcggaatcggaaacggaaacggaggaggaaataattccgggaactacagcgcgaccaccaacaagcagatcctccagttcttcggaggaatctcccagcatcttcaccactttgcctccgttgccgggaaagcctcaaacgtctgcgtcgtcggaaagttccggagaagtggttacctccgaggaatacaccactgtgccgcacttcgaagtgagtggcagcaaaagtgaaagtggtagtgaagaggtcaccactgtgcgacccactgcagcaccgagtatcaccatttcagtggacatcacctcatccggaagtagcagtagtagttcggaatcagtggaggtattcaccacaccagctcccgttttcgtgcagagagtgactacgatcgaaactagcatctccatagactatgtcacacccactcctctgccggaaaccaccaccccacgggtggtcccggtgcccaggcctacctttgccccagagccaccactggatgtggtggaaacgactgcctcaactcaccacctttggacagaggtgcccaccacggcggctcccttcttcacggagtatccggcggaagtgctgatcactacacatcgaacgagtgctggcagattcaccacagttcaaccacctgcaggtgtcaccaccacctcacccactgaggactcatccgttgagttacccactccgcacacgccccaaattgtggtcaccattttggattcaaatgaagttataccttcgctgatcacaaccactggatccccgacaacacaccatcaccaccatcatcatcctcaccatgaagccgaaggaaccactcttcagcctctcgaagaagacgagcaccaccatcatcatcatcatgacgagttcaccactccacagccagtggaaataactacgggacatcctttgcaaacagaggaccttattggagtgcaggaacctgccgtggtgaccacagagtcgccctttgctccagctgagacaactgtggttcctgtggtggtgcccgctacgattgcaccacttggaactgcagcaccaccagccacaccagctcctgttcctccagcgactaccactcctcctccttcgcctccttccttggctacagagacacctacactgccacccactttacctcctgttaccctgccaccggtaacccagccgccgcccacgataccacccactcctccatccacacaatccgcacaaactttaccgccaccgacgtcggccataaatgtttacaccactcccgatggaccacccacggcttcccaaacgaagccatcggtcacggagagcagcgaggaagtggagggcacaaatacggtctccaccggcggaaggggatccggcggagtgcccgaggagaaggcaggcgatgtcgattgcatcaagctgggctgctacaacggtggcacctgcgtaaccacatccgaaggatcgcgggtaagtggcaattga

SEQ ID NO: 38436 - protein, 838 aa, DROSOPHILA
MLNEIKGSNCEENVDECMSNPCQNGGLCRDRTNGYICTCQPGYLGSHCELDVAVCETGTGARCQHGGECIEGPGLEFTCDCPAGWHGRICQEEINECASSPCQNGGVCVDKLAAYACACPMGYTGINCEEEILICADNPCQNNALCLMEEGVPTCYCVPDYHGEKCEFQYDECQLGPRCMNGGVCIDGVDTFSCSCPPLLTGMLCECLMVGEESLDCNYTAPATQSPPRRTTTTSTMAPPTVRPVTPPETTVSPSRASEEVEIIVVTTSAPAEVVTSVLSPSSSSSSSEEGVSVEIKTPTVAPPESGSHSISVEQTTAVPAQPEPESEQEPESKPHPESESASESETETEEEIIPGTTARPPTSRSSSSSEESPSIFTTLPPLPGKPQTSASSESSGEVVTSEEYTTVPHFEVSGSKSESGSEEVTTVRPTAAPSITISVDITSSGSSSSSSESVEVFTTPAPVFVQRVTTIETSISIDYVTPTPLPETTTPRVVPVPRPTFAPEPPLDVVETTASTHHLWTEVPTTAAPFFTEYPAEVLITTHRTSAGRFTTVQPPAGVTTTSPTEDSSVELPTPHTPQIVVTILDSNEVIPSLITTTGSPTTHHHHHHHPHHEAEGTTLQPLEEDEHHHHHHHDEFTTPQPVEITTGHPLQTEDLIGVQEPAVVTTESPFAPAETTVVPVVVPATIAPLGTAAPPATPAPVPPATTTPPPSPPSLATETPTLPPTLPPVTLPPVTQPPPTIPPTPPSTQSAQTLPPPTSAINVYTTPDGPPTASQTKPSVTESSEEVEGTNTVSTGGRGSGGVPEEKAGDVDCIKLGCYNGGTCVTTSEGSRVSGN

SEQ ID NO: 38437 - DNA, 2776 bp, DROSOPHILA
cattttcacgatggacaattgagtgattatggctcctattccaatgacgactctaagtggcggtcatttgaatattgcagcactttttgatgagcacacaaagtcaacaggtcgaaagcaaggattgattgatttttaagtggcttccaaggacttggaatagaattgttgctttgcaatcattgaaagttttaaaaagttattgttgcttagctatttgcgctcaaaatgctctctaaattacaactaatgcgagccgaaattcattaaaactttgttttccattgcgaatgtaatgcgctgcgatagtggaaacatttgaataactttttaagtcgctgcctttttttctcctgcttggccaggaaatgttagtttaacgattaattacgcacgagtccgtccgctcatcccgttagcaaatgcggcaaattaaatttttcaaccgagcaaaaataaaagaagagtcagccagaaaaaatctccaactaattacgcatggatggcagaagtggaagccccgcaggatttaatgttcgagcaaatggccgagcggaaatggggcgggaagtggagggttcgcgcagaagaggatctaaaaaaaaaaaagtgcaatttattctacacttgaagcattataatttgtggcctctgcggacgaacggaggatgaaatgggattcgacggggccgcgtttaatggccaatgtcctgacccaaccgcctgctccctgacactgacccatatgctgacctccaccttgccgcgtgcgcagtttaaaaagttaattaacatgccgccccccttaatcatccgcaagttgggggagtgacccacttttacataccttcgcacctgcactgagcaaaaggttgggattgttgaagcccaaagttgattccaaatctcaaggaaaagggatcaagatttcgaatagttcacagcttttctctcagtgcatgtacacgcgtaattgcattccgcggtcgacacttttcacttactcagctcgaatggtgatttcgtggccggtgttgaccggcgtttccagttcactcagcagcatcgtctgcagtccgcaggagaactggaactgcatgagtcccttctgcaggaaaagggccatgtagtggccacccttggtgccctgcgccgccgccagcatgatcagcccgttggtggcccgggttcgcaccttcagctggatgtgcatcggcaggacggcgtccaaggactcgtggcccccgatgtccttgtagatgcggtgcgacacataggagtcgccggagaaggcggcattccggatgataatgggcagctcgcaaagaggtccttggcggtcgaaacgacaaacacactgaaagaaatagtaaggaaagttataaatagagtcaatggggattttctttaaatttattcactgataatagctcacgctacgctcctatttttatagtgatatcaactcattaaaaaaatccctatttaaatagctaaccaagtatttctctaaacccacgcacatacttttgagtagttacaaaatatttacagcccaaactttgcactacaacttatgggaaagaaccaccggaaaacgcgaagcgaaacttgaacaattttaatttaatttggggccacactccttcggaaatgcgacgacttctggtcgcttttcaataagaaaagcacgttccaaaaatgccaataaattgaaaagtaatatgaattaactttttgcctctgcgcggcatcgacttcgccctcgtcgtccattgttctggctttcataatttatgccgcaccaagggacgcctgcaagtggaaagtgagccagaaaactgcaacaagcgggccaagaaaaacaggagtcgtgaaaaggggagaaccgaatggagccaccgaaagttttccccgatttttccacaccgcccctcaaattgagcaaattaagtgccgggaaatcggagggaacgagggaaagcagcgcaacagtcacgttggtggacaatgcccttggtggggggtgataaaatgacaacctcttaatgggaagttatccatatggtggcggagtattctcaaaaagttgcgtacacacctgcaccataaaaaaaaaaatatacgccatcaaaagcagaagttttaaattaccgttgataacgtcaatttggtggctttatatgtaaaaactactagtctcttaattggatatgcatagacaggttatgacataggaattactgttatttggccacttaaagttctaattttattttgtgtgttagtaactaattgtttatacaactggaatagctttatatttatcctgcctgcctgtcgtttatctttcaatatgtaaggacattatccaggctttaatagcgcgacacggaaatgaaaaccctttcgcaacttccctgctgttcagcggaaaaaccaaatcccaaagcagtgttaaatgctctggcttacaatggctcaaatgattttttaccaacgaattttcgctgttcctgtttttattcccatacttcgtttgtcggtggaaaacattaaaattgcctcctgctgcgatgatgttttccatcccacgccaagtggaagttcgtttttggggccacgatgccagtccatatcacattttcatagcatacttttgagccaattctgaccttgaaaagatatattaaaaagttttcttttgcagcaaaggcgcaggcagccttcataacaattatttgaagtgtttgctggcagtttattcgcgaacttt

SEQ ID NO: 38438 - DNA, 399 bp, DROSOPHILA
atggacgacgagggcgaagtcgatgccgcgcagaggcaaaaatgtgtttgtcgtttcgaccgccaaggacctctttgcgagctgcccattatcatccggaatgccgccttctccggcgactcctatgtgtcgcaccgcatctacaaggacatcgggggccacgagtccttggacgccgtcctgccgatgcacatccagctgaaggtgcgaacccgggccaccaacgggctgatcatgctggcggcggcgcagggcaccaagggtggccactacatggcccttttcctgcagaagggactcatgcagttccagttctcctgcggactgcagacgatgctgctgagtgaactggaaacgccggtcaacaccggccacgaaatcaccattcgagctgagtaa

SEQ ID NO: 38439 - protein, 132 aa, DROSOPHILA
MDDEGEVDAAQRQKCVCRFDRQGPLCELPIIIRNAAFSGDSYVSHRIYKDIGGHESLDAVLPMHIQLKVRTRATNGLIMLAAAQGTKGGHYMALFLQKGLMQFQFSCGLQTMLLSELETPVNTGHEITIRAE

SEQ ID NO: 38440 - DNA, 3003 bp, DROSOPHILA
caggaccctgaccctgaatacatacatacatacatatatagattttattagcaacggaaaagtattggacactgcacaaaccacttgtggagggtgtgaagactgtacgtcttggagtatttctatgcgtatattgccatttttgaatgaatctcgaaatttaacaaactgttgtttttgatatcgtaaattttcagcgaaagcttacaggtgagtgctgcccccgcccccgcgagcgccaacccctcggtacccgcaccccttggtctggatcagctgtttttgacaaccgctactcgagtggcgccgtctcgctcgcactgccgcacacatgcgcagccactcacaccgacgcacagcacactcacgcacttacccacaccaatgcaacacaaacaaagcacacgattgaaaatcacaaaataaaaatcacttaaaatgctcgcaggcaattttagtcgaatgccgaatgatatcggcattaaatgacacttacgtcgttaacacacttccatgttttgttgttttttttgtgggtttaggttaccgttctaccctacccgtggataaatcggatttttggccggcctccgtggaggaaaatgccaggtcaactcgaaaaagacgagttggttgtatagcctaattgattctgtaacgaaatcaattaaagctttctagtttgtctcgctttttcgagtttaaagattgatattatgaatatcgttgtatttgcttagggatggcaattcgcgtctcgttacgttacgttgtatttgttgcagctgcagattaagtgcgatatgttatcgatagtcgcacaggtattcgttgcatacgtagccgatatattaattacatgcatttccgctgaaaagtcagttgaatatatttatgaattaaaatctttttaaaggcgatagaaaactatacttaacatttcctatttttacaagcgtttatttgctggcacaaactataaccataattaaacgtaacattagtcatcttcatcactaagctcatcctcctcctttcttctggacttttgctccagttccttggcgtagagatccttgaaggcttcgtattccggcagggtgacgtggcaaatctttgtggcgaaactcttctcggaagtgtctgtaatctgatagagtttggggttcgtagtcggctcatttggatcggctttcggaggtcgtggcttaaagaggcccaaacgaagcaggaactggtggcgacaacgcagctcctcgaatgacaaggtaagggctgccgatttaaccaactccggcacttctatgcgcatcacgtctgtgatgaagttcagtttctcctcaatagatacctcggattgtgctatcaaatccggactgttcatcaaacacttccacacatttttgctggtggagacgcgactttgaaggaagccgatgtgggaaagtaactggtgggagtcgctaacgtccagtaactcggggtacttcgtaaggagcaggtgcagtagattctcgccgaattgacaggccctccagatttccaggcagcttattattttgtccggcgttcttttcaaaatcgcggggttaccggtaactattctaaggaaattcacggtttccaagccgtggttttgaaaagtttgatgggcccttcgccagatttcaggtgagaatacagctaacgtgggttctattttgatggcttcatcgatgtgaatttgttcaagctgcaatatcttgggcgttgccaagtgccttatgtgatgtaactggaaagtaacaatttgtatctaatttctatctaatgcattcatgattaactcacgtttgactgttgttttaatacagcttgtgtgttaaataatagtttccgcaacatttttggcgatgtcctcttaaatcggcgagcaaaacaatgaacagctgatctcttcttctttgcaatgacagttaccgagaagcgtgaacaacggcatgtttagctggtacacccaccatattcgtctatagcttaattgtctattaaatcgcacgcatcgaactgttattctcgtcgggtgcacagcaaattgtttataaatagaactgtcgcgcataaaaaacaacagtggaaagttttatcgtttagttctgctacaagctcagcgtaagttttttttctttattttgtacatatgtgtgtatacatgtgtgtgagagttcaactatagcataattataatcaaactctgaaagagatatagcttaatgttataaactaagtactacccggcttatttaaccaaagaattcaaattatttgtcgccatttggaaccgtacaagtaaatacatacatatgtatgtagaaaacgacatgtaaactgatcgatacactgataaaaatttatattcaagtgaaaaagcttaaatcaaatttataaatggatgtgaaatgtatttttatatttcttttaaatatacataaatccatacacaaaaacccaactaataaattgttgatattgaaaaggaaatcatccagaaattaatcaagagaattaaaatgttatttttgtaataatcttaaaagctctgtgtatcagagcgaacgtgacaagtgtttttacttaatgaggaaactattggccaggagaggagggctcgttcgatcagtgataactttgaattcccgtacaggtggcatccagaataactcaagtaatgctcaaacaaggtcaaactcaataacattgtgaaatagcacaactacttctggtcgattttcattcaaacaattggaatgggataaactgccggtggggagtgagataaagcgttcaattctctcgcattatttctgataaggagggctctctgtggattccacccatatttaactaacaatccactcggcttgccactcattcgcagcccgctccacaatccagcaacatgtcgaaactcatccgttggggaatcgcttccgccggcaagatcagcgaggactttgtcatcgc

SEQ ID NO: 38441 - DNA, 615 bp, DROSOPHILA
atggtgggtgtaccagctaaacatgccgttgttcacgcttctcgaacgccggacaaaataataagctgcctggaaatctggagggcctgtcaattcggcgagaatctactgcacctgctccttacgaagtaccccgagttactggacgttagcgactcccaccagttactttcccacatcggcttccttcaaagtcgcgtctccaccagcaaaaatgtgtggaagtgtttgatgaacagtccggatttgatagcacaatccgaggtatctattgaggagaaactgaacttcatcacagacgtgatgcgcatagaagtgccggagttggttaaatcggcagcccttaccttgtcattcgaggagctgcgttgtcgccaccagttcctgcttcgtttgggcctctttaagccacgacctccgaaagccgatccaaatgagccgactacgaaccccaaactctatcagattacagacacttccgagaagagtttcgccacaaagatttgccacgtcaccctgccggaatacgaagccttcaaggatctctacgccaaggaactggagcaaaagtccagaagaaaggaggaggatgagcttagtgatgaagatgactaa

SEQ ID NO: 38442 - protein, 204 aa, DROSOPHILA
MVGVPAKHAVVHASRTPDKIISCLEIWRACQFGENLLHLLLTKYPELLDVSDSHQLLSHIGFLQSRVSTSKNVWKCLMNSPDLIAQSEVSIEEKLNFITDVMRIEVPELVKSAALTLSFEELRCRHQFLLRLGLFKPRPPKADPNEPTTNPKLYQITDTSEKSFATKICHVTLPEYEAFKDLYAKELEQKSRRKEEDELSDEDD

SEQ ID NO: 38443 - DNA, 2270 bp, DROSOPHILA
ttaattatttctgttttaaaattcatactctgttctaggatacggttctgtcgacgtctttctccggcacatgcagcgatactcgtcacagacccggtcgtccttgccatcgcacacatatggggtgcgttcggccatcagcatcgtgatggggatccctaggagcagaaacgacatccagcgcatctttgtcaaggatctctggcaagcaatagtcttgaagagtcaatctcagtccacattttttatttagacggtagcgtatctaaaatgttaagtacgtctaattgctatccaaagcgtgaaaaatttaaatttatactagcttttaagctataacctttctaaattttatattcaaacaaaagtattgtgttttaaatgaagttctagatgaagggatgggaagggaaaatgaaaattcggcaatcgtcttcggagtaaccagtgtcaagttcattgccacataagttcgttgcgcccccaaaatctgtcccaagttggcgccacacatctggttcaaattaagagattccatccgaaagtttgaaaagtgattcacatgagcgtagccaagactatagtccaacagaatgcatgtgccttccgttccttttctggaatttgtgtccatttgcccccaactaaggcagctgacaagagcgccaattgaactttgcctatattatatttgttcggagtgaactttgccattgtctagacaaattaagagcagcggcgaccgaatgaaatttatgtatgtcgcccgcaggcgacatgcggtgaatagtgtttaattgttggctttggggccatgcggcgtatacgcaatgttgcccagtgccacttgtttggagcgctttttgtacattgtgtgataagcgtcgtcagtttgtctggcaatgagatcgctggcagctggtgttgcgctattcggggtgtgatgtcataagtcaacacaagaggaatctatgctatatggcgatcggatcggagatcgttaattaaaatttccagcgagtacttcattagcatcgtcgtcagctgccacgcgttgctcagctgccgcgctccaatgcttaattaataaatcaacgcgacacttgtactccatcttggcgatggccgtatctgctgctccgatgctgatggcgatgctgatgctcatgatgatgatgatgaagatgatgatcatggtgatggtgaggatgagatgcccgccgagattgttgccatgccgggccagacaaattgacgcgacattccacatctgtgggaggggagttgctggtggtcagtggttaataaaaatgttaaatatagctgccgccgatgatgatgacatctgtgccatcgaagcggaaacggaaacgtttctaatcgccagccacggatctccgagtgggcccttcgtgtccaccagtgggcagctgagctcttaattggaggctggcacttcctggtagcctcttatctcagaagcgagctcttgaaatcttatatataagtacaaatttgttacaattgaaatgatttagcacacttattagacacttatatccttttggaattactccacaaatttaaagtgggagcattcattgtgcagcagaacatatcaattgtatcttagaacaatcacaatcacagagacaattgactgttgtgcgcagtaggtagatatcttagattagtcatagtataagttacaaaggaatcagaacttagtcatctctgaaggcgtgcactgcgaaatgcagttaataacaaacctaatcgagcaaaaatagctcaagagagtgactggcgaatgtgattatttaataattgtggcatatgcgcggcaaaataataatactacttatatgtatgtgctggtgttccacgcgaagtaaacaataagaagcgttgatagaagcgggcaaaacaatcacaattagagaaatatgcactcaagtgttagctatagtaaaaatcgctaaattgcaactgggcgcgcgtcgcgttttagtttttcagtatgtctaaaaataaagcgaagcaaataaatttacatttttaattgcaattatcgctggctattgttgtagttgctcgttggctactgtttgcctttggcgtttcgaacaattaagatgatttattagcagcgcatttttatgagacgcagtacaaaagaaatggaaattaaatggaaattactcagatatatttatgctccgtggtgatcgcatatacaaattgatttatcacatctgtcgttcggtttg

SEQ ID NO: 38444 - DNA, 270 bp, DROSOPHILA
atgtggaatgtcgcgtcaatttgtctggcccggcatggcaacaatctcggcgggcatctcatcctcaccatcaccatgatcatcatcttcatcatcatcatcatgagcatcagcatcgccatcagcatcggagcagcagatacggccatcgccaagatggagtacaagtgtcgcgttgatttattaattaagcattggagcgcggcagctgagcaacgcgtggcagctgacgacgatgctaatgaagtactcgctggaaattttaattaa

SEQ ID NO: 38445 - protein, 89 aa, DROSOPHILA
MWNVASICLARHGNNLGGHLILTITMIIIFIIIIMSISIAISIGAADTAIAKMEYKCRVDLLIKHWSAAAEQRVAADDDANEVLAGNFN

SEQ ID NO: 38446 - DNA, 2255 bp, DROSOPHILA
gagattggagactcggcactgaagactcaagactgaagactggggagcgtggagcttttgtcatggcagacatgttggcaacgccaaatgcttttgtgtttcttcatgccctcgaggcggaagaccataaaaacgagggcagttcctgtactccttgtatgaaattaatattcccatctcatatgctgacttgcaaaaccttagttacaagaaaaaacttagaatttaatttatattatttatatttatatttaaatttaaatattttaatgcctatattttgttcgatctcccttcgccaatagacggcacatattcgtgtgctggcctcatcatcatttggcccgctcggtgcgggtgttactggcctctttcgaccggccaagaacttgacctgcccagccccatccttttgccattcccaataccgagtccaaatgcaacttgcaccggggtggtccaattgtacttggacttgaacgattggctggctcacgaattgcattaaaatcgcaatttcagcagcgcgcaaagttcatgtcagacattatgtttgctttggagttgtgggagtggagtggaatggagtggaatgggctgagatggatgcaccgagcctggccaaccaacaaaacaactgcggggccacactggctggcgatttgagggaacggccattttcccgccgcgttctgtactctgcactccgtattgctgtattgctgtatctgtatgtttgtttactctgttcctgttcggacaaaagccacgacgatttcaacgctttgtcgtgttctttgtgagcctgtgagctggtgagctgaagagtcggtgagtctgtatctgtggttcccccggcctggacaagagttcttgagcttggacttggggcccaaagtaatttatttctttattgttttacgaatttacaatgcaactgtggactgaagctggggctggggcaacaagggagctgggccgagcaacacggccataacaatcacgccgcagttgttgttgcgtgttgcatttggggtgaccaccttggcggccagatgatgctggcccggctcttggtcctcgtctcagattcagattcagatccccagacctgaatgcagcctctggcaacgacattcgaggttgctggtccgccggactcatcagtgtcaatgttggatggtggatgctgatgctggatgctggatgcagggtccatgctccaggtccatggtccttggtgtgtggtacgcatgcgcccagcagcgccccaaggaatgcgttgcacgaaatgcaaaatgtcagcggtggcggcccaatcgcatggcggtgcgagcgggacacttactgcgcaagcgagaggcacattccgcaggcccaactggaatttcctttgttttctgtgagaaatttcgagccaacacataaattgtcgtaggcgcaagcgggcaagaggttcctgaccgccacgcagttcccaaagtgtcctaagtcggcactgagtggcgattttcgactacactagccagaaagttacttttcttaggaaaataaaattattaaagaaagtatagatattagagcggatatgcttctcttagctttaaactttccagaatatgaaacttaaaattattacctttaaattattttcttagaattttttaagaacctttgataaatttattttccatggacccctcttttgttgcaaggtgtgcctttaagtagccgagcaattgcttggtggctttcggtttcggttcggttttgtagtcggcgatgggagctgatcatcagcgctggcatttagacaattaaaatacttcaagtgcttgtctttcgctcaacgtcacattttgtttatttatgtgcattaattcgccgggtagcttataaattttcgatttccccttcccaatgcacccacctcacttctgttccagccgaaaacaatgagttctgctcgggaggctacaagttcattgcctaagtctttcgattgcacggaattgcaggccaggaatttgacgagtcagtcggtaagtctgctatgccagtggctatttttagcgcggcacttacacaattcgtttacatattaaatacgaaaatcaagccattcgattgcttattcaactcaatcaaaattcctaggaaaaattcctcggtcgtatcatttacaacgtgcgcgcttgattcccagtccaatcattcaataaattggcactgtcagtcccctccccccagtcacc

SEQ ID NO: 38447 - DNA, 255 bp, DROSOPHILA
atgcgtaccacacaccaaggaccatggacctggagcatggaccctgcatccagcatccagcatcagcatccaccatccaacattgacactgatgagtccggcggaccagcaacctcgaatgtcgttgccagaggctgcattcaggtctggggatctgaatctgaatctgagacgaggaccaagagccgggccagcatcatctggccgccaaggtggtcaccccaaatgcaacacgcaacaacaactgcggcgtga

SEQ ID NO: 38448 - protein, 84 aa, DROSOPHILA
MRTTHQGPWTWSMDPASSIQHQHPPSNIDTDESGGPATSNVVARGCIQVWGSESESETRTKSRASIIWPPRWSPQMQHATTTAA

SEQ ID NO: 38449 - DNA, 2366 bp, DROSOPHILA
cgactggattcgttttttgagatcgaggagaaggtcatgtcgaagcagacactggacagaccgctgctggacctactgcgagatggagagtttggtcaggcggaggacaagctgcgcctgtatatcatctactttatctgcgcccagcagttacccgaatcggagcaggagcggctcaaggaggcgctgcaggctgccggttgtgacctaactgcccttgcgtacgtgcaacgatggaagggaatcatgaaccgctcgccgagcattagccaagccacacagtacgagggtggcggcaccaagactgtgtccatgttcactaaactcgtctcacagggcagctccttcgtgatggagggcgtcaagaatctggtggtcaagcgacatgtgagtttctctttccaaattcaaattcaagttctatatcaaaattgtttgcagaatcttccggtgaccaagatcaccgagcaggtgatggagtgccgcagcaatgcggagacggatgactacctttatctggatccaaagctgctcaaaggtggcgaggtcctgcccaaaaatcgtgctccattccaggacgccgtggtgttcatggtcggcggaggcaactacatcgagtaccagaacctggtggacttcatcaaacagaagcaaacgtccaatgtgcaacggcgcatcatttatggcgcttccacgctgaccaacgcgaggcagttcctcaaggagctctccgccctgggcggcgagatccagtcgccgacggcgacgagttaggagcggctgctccgattccattgctgctgagcggagtggaccgggttttggttgcatgtgcatgggtgtctgtgtggcttctttcgtttactttaagcatatccaaaaataaattaaatgccaggcaaaaaagagaagcaagcgaacgcaacggcagagccagagctcagcactcggcaattactccaacctgacgcttaatccccgaaggacaacaagcaaaaacatgcgtagcctcgtgtacaacaagcccagggagctggtgccagagctgctggaatgggagcttggcggcgggcaggggtactcgcattctaggcacccattaacaccaacttggcaacgctttgatggacagctgacagacaaccagtcaacggctgaggcgatgatggcccagccatcccgatgcccgctgccttcggcggcggtgccacaattatggggcgacaactatgcgcggcacttggggacaggcgcagaagctggcagggacagcacccagcaattagcactatccctggccaactatgaatggatcgaggcgaggcaagtcgctgtcgatggcatagccagcgcactggagcactaggcgcattttttcgaagcactgcagctctgattgaatgtcgcttccttgggagacgggcaggcagcctggcagccaggcaggccaagtccatcaaagaagagcgttaaattatccctgaaagcccatctttggtttgaattggtgttgcaagaaaagatgatgtaaatgaaaattctaacaagtaggaaaaagaagtggcaggaaaaggaatgttttaagaaccttattaaccgataccaaattatagaaatcaattgtaaaaacaacgatagagaatgtttatagaattgattctacagattggccaatgtagtaaagtaataaaatctctaagattttcctcaatttaatggcatttgaccagcgaaatgctgaaattttccccatgaaatgaaaaagctcgaactgaaaatatttccaatgacattcaggccactgtaggaagtttcccgagataagcggcaaacaaataccacaaaaaatgagtaaaatatggtggagaaaaaagcgatccgtgggctaattaacacttttggtaaatcagaattgatggccctgatgaaaggccgaagaagagatgatgacgatgacgatgattattcatggagcgttgagtttaaatattggttttggttgggcagccgggcaggggttgggttactatccagactacccgtggccacaatttaaatgttaacataaacaagagcaatttaacaaaagcccaagacccaaaaaaaaatccaagagactcgaaaaaaaaaataaataaataaaagtacaggggaaacgaaaagtcgaactcccagccagaaactggtaacccaaagtgatttcacgggtggtccgaaaagatgcggctcaaacaaatcataaggaaaaaatgagagggaaaaacgactacagaaactaacaacgagaacgcaacatgaaagaaattcttaacttgccacatgcatgaatcgattatgtggtaaatgcaactgtcgctgtatgcgtg

SEQ ID NO: 38450 - DNA, 366 bp, DROSOPHILA
atgcgtagcctcgtgtacaacaagcccagggagctggtgccagagctgctggaatgggagcttggcggcgggcaggggtactcgcattctaggcacccattaacaccaacttggcaacgctttgatggacagctgacagacaaccagtcaacggctgaggcgatgatggcccagccatcccgatgcccgctgccttcggcggcggtgccacaattatggggcgacaactatgcgcggcacttggggacaggcgcagaagctggcagggacagcacccagcaattagcactatccctggccaactatgaatggatcgaggcgaggcaagtcgctgtcgatggcatagccagcgcactggagcactag

SEQ ID NO: 38451 - protein, 121 aa, DROSOPHILA
MRSLVYNKPRELVPELLEWELGGGQGYSHSRHPLTPTWQRFDGQLTDNQSTAEAMMAQPSRCPLPSAAVPQLWGDNYARHLGTGAEAGRDSTQQLALSLANYEWIEARQVAVDGIASALEH

SEQ ID NO: 38452 - DNA, 2723 bp, DROSOPHILA
ataatgacctggcccacgtccttgctgccgccagccagcctcgttggctgcgttcattaattcgctgccataaaagccggccaggggcatattttgcctagcctgaatttgcatacttcgtgcactcggcgaaaaactaaccaaatagctgatagttatggatttgcagctctcgaaggagtgggaaccacttggcattgctttttttttttttgcagtgcacgtggaggcaatgaagtcacaggaggcacctgttaccgcgtcgcaaggctcgaggcagcagcaggatcctggatccaaaacgcctacaacacatgtctgctcataattaatgtgtaaattgtaaagctcagctcgcccatttccccattccccccccattacccttgcgcctctgtacccctttgcaccgcagctatcctggtatcctgtagtgctcattccattgtggtcatgttcaacagcgagggcaaccagcgcgacaacaaccaggactctggcttccgtgggaaggataccctcccaggccggttaatacaaaaacagcgacgtcaataaacaagccgcccccatcaaatgcgttatgccctcgccgccgccgcgaacaaacttaattgcattcgtgtacgtagtccaggtggccctttcacctgacgaccatcgtccaagccgaatcacatccacttatttatgggctccactggtttgactaagcctaacaatagttggcctcggtttttagaaacgtggtttctcgctaatgattcccactggggaaaacccgtgcgaagattgctgttggccaaaacaaaactgtatttgattttcgaatgagtcacatgtattagtaggcacgttacactgataacgatttatgcataaaacaacgctcgacgtgagcagaatatttaaagctattgttattgtttgaaaatcatctcattctcttactttattaaccaatatatgttacaatactaagtcaagtctaattacttaatcacttctgaacgctgatgatttcataggtgagatcgtgacgatcgcgataccgattgcagaaactattcagagtgaagagggcatccagagcacttggcagctcaaaaactaagcggtttttcccactcctcaccacttttaggctgaccacaagttccggaagattcagctcctcaagtagtgccttttttaggctctgtagaggatcatccactttcttgtagctgatgaagatcagacgagcattgccagaagcgttgtccagctggaagtcagtgcatttggccagtttcaagtctctggactgcgatgagtgttcatttgagtactgctgccaggggcgaatgacttgctcatcttcggtggggaatacaaagtcatttacgtacgaggtctttgccctgggatctgtaattcagaacaagttttatttaatcagcaattatgcttattatgtatcaacttacaggcgaaacaactgccaaggcaaataagagcccacatgaacagaaatcccaatatttgcattttcctcattgcgagagcaacctgtttgctagccgagattccaaatgctactgatgttatctagttttgttctcaagtttttaaggcagcctttgttgctaaacactccataaattagtgagttctcttatgagttctctgatcgattgattcactcactcttacttaaaggtgccaattgacttattgacatacacatactgctatattaaacgaaaagagtaactttttctaatatcactttgtgttttaaggccgacttaacttttgaaaacacaacccctgccatctggatgagtgtatctcgcattgtgcatggaatgtgtattcttttcggtaaagggggcgaaattgaattgtcgtgtgcagcaaaggacctttgtgacacgagcagcaggtcctgttctgtgttgccatcgacttgaaatcctgccagccattagtgagattaaaactatgactaaagccgaggccgagcaaaaggctcaggagggcaggctttgaatttggcttggctcggcttggcattgtttcggctcgaacaatgggcgtatctctcgcagtgacgcaatgcgtacattgtccttcgaaggacaattgctgggcaaaaggggaaaaagatatggcgctcagtaatgcaaacatgcataacaatccagttgacacaaatgcagcccgtccatggaaactattcgttctaatccagagtcgccgccattgttcgcttgccagccattcacaactcattcctgcccagaatggcctgcagagcaatttgtttattgccgatggcgcatcgaataaaggattcttcggccatcgctgaatcccctgacagcgctgtaattgacagctgattatgcaattcatttgacgggcactcattgcactcgccaatgcattccagcaaactgcaattaatcatttccacgggcgcggacagcaaattttaagctccaagctgccaggtaccacatctgtctgtggataattaacccattaagctgatgccagtttgcagtggaacactaaagttaagccgccaggataatgttaaaggctatcaataatgcattaaagtcgctttcaactagcactcaatgtaacatattgaactcgaatagcacattcaaatttaaacggaaaatatttcataaattttgaaatacttcacatttatttgtctctgtttc

SEQ ID NO: 38453 - DNA, 444 bp, DROSOPHILA
atgtcaataagtcaattggcacctttaagtaagaatcccagggcaaagacctcgtacgtaaatgactttgtattccccaccgaagatgagcaagtcattcgcccctggcagcagtactcaaatgaacactcatcgcagtccagagacttgaaactggccaaatgcactgacttccagctggacaacgcttctggcaatgctcgtctgatcttcatcagctacaagaaagtggatgatcctctacagagcctaaaaaaggcactacttgaggagctgaatcttccggaacttgtggtcagcctaaaagtggtgaggagtgggaaaaaccgcttagtttttgagctgccaagtgctctggatgccctcttcactctgaatagtttctgcaatcggtatcgcgatcgtcacgatctcacctatgaaatcatcagcgttcagaagtga

SEQ ID NO: 38454 - protein, 147 aa, DROSOPHILA
MSISQLAPLSKNPRAKTSYVNDFVFPTEDEQVIRPWQQYSNEHSSQSRDLKLAKCTDFQLDNASGNARLIFISYKKVDDPLQSLKKALLEELNLPELVVSLKVVRSGKNRLVFELPSALDALFTLNSFCNRYRDRHDLTYEIISVQK

SEQ ID NO: 38455 - DNA, 2884 bp, DROSOPHILA
caagcttatgtaagaccaacgcacatacgcacattctgttacaatttaatcacattcaatttccattcaaatcgagagcaggtgatggatgcccaccttttagcctgctcggcaaatttgcaataaatacctgttccagtgtagctcgataaacacatgcaatgcaattcatcattcaggcaaacacacacacgcacacacgtgaatgatctgccggtgaaagagggattcgcgagcggttttcaagggaccgggaaatgggagatggaatcttttgaaaggacgaggccgccgccaaaacgtcccattaacaggagctcaatgcgcaaaaagtcagatcctatggctgatggctggagccaaaaagcaaatgtcaacactatcaatcatcgctttgacagtttgagtgcttgttttagtatttgtgcttttgattatgtgactcacacactcgcacacccatacatacacccgccacacaaccactctcacacacatgcaggcgcatcaattgatacacttacaacaaattgtttgtagtggaacacgtgggcgtggccctgggattgcatcggttcgctatactatgtatatgtagtatatctggtgggtgggggttggggcaggagcacttgattgatggagccagcgacctaagccattttaaatgaacaaattgaatgtgcggcagcacacatgcacacctacagcaggggccattggcatagcaacgagtgattaattaggaaattcaactcatctcacttccgattgaagcattcttattgcccagtgtcatgatttcttaatgcaagtttatacagttaggaggtactattcatttagcccgcacagtgagtttgcggttgcctgctggtgattatagtaattaaatttcttcgaacaaaacaaatttgcaacgaaaatccaaacgaaatgaaagcccgaaaggaaatgaaaaaaagaaaagcaaaaccagaatagagggaaatcccccaggtcaacgtgcggtctgcgaaaatggattgggtctggcgcggaacgtggttcgttggcgcagcttttggtaggcctcccgttccgcccgttggcgctgatcctccagctcgcggcgccgcgcctcctgcgccttggacgtctggatgttgaaaatgcgccgctgctggacgcgcgattcggcggacaagttgaagggctcgaccttcacccttgccgctggaactgcggaggaaggtcggttcgaggacttcaagggctgacggctgctctgcggaatcggtttggccctaggagcctgcattttgtgaagttgggactccagctcgcgctccctctgcagctgctccacccgcaagcggcgcttttcctccatttcacgcgaattcttgagcacattgggggtcgtggggcaggtgatccgatgcacaacgaccctggaggactgacgtgagtgcgcctgacgaaagtcgggcatcggtcggctgtggaactcgcgctgcttgcgctcctgctccctgcattcgcggatcagctgatccttgcgactggaatagatgtccttgaagcgataggcctagtgcatgcaaaatacaaacaataatttacggctttcttagtagtaagcattacctttggagccgacacctgcggtggaaatgtgggcttctcgcacgagatcttcatattcttgaacagattggagaccaaaacctgagaatgctgctgggcctggctgacaatctgcctgccgcgtcgctgcagctgctccacctgctcacgatgctgttggagtctgggaaactcctcacttattgcggatgcaaagctctccatcgactccacacccaaatcgccccagttgtactccgctttcgaatcagacattattatcatatacgacctattgtatgtaattcctggatgtgctcggtgctttgggctttgagctctcgttgatgacagctaatgcggagtggctggaattttagttacattcaattatcggcctactctgagctcaggtttcaaatgaaaatgttttgggcattagtgaaaatttcatttggacgtgctgctatgaataatgtaaagtattccggctgacacttgcttccgaatggtcggtcgttgcctgccacttccgctccccaactggatgcacttccaagcgaaggcggtggcgctggtggtgcagagggcatggcagtgactccccgccccgctggcgagctgtcattttcctgtccaactgtctgtccccgtcagtccgggacgtctatgtggtgtcaatttgattgcaaaggtaattcaaataatctcatcatacacaatctagctgtgtatcctgccctactcattcatccccagtccggagtcctcattccggagtggtgtatcccagtcctcgttggaatcagagttccgcccttcatttcaacgacaacttcaaagcgagcactgcaaataaatcaaattaaatttaacattttctttttatttggccttgctgtgtgggagaaatttaattttcagcaaccgatttcgttggatttcattaaaaaggttctatataattgaattgattaagagatggaatataaaagtgcgaaatgtacacgcacatatttatattttaatcgggcccagctaatgaatgcgaaatatcagctcaaaagcgctcgaaaatagtttgataattaattttgtttgtttgatgcagagaaaaatatgcaattcaatggaacaaattatatgaaaacaaaggaataaatatttcaaaggaaatcgtaaatggaaatagatagaaactataaatcaacataacattggatacaaacaaacaaacagtgccgtgataatcagtggaaagtgtcgcagctaatgg

SEQ ID NO: 38456 - DNA, 828 bp, DROSOPHILA
atgtctgattcgaaagcggagtacaactggggcgatttgggtgtggagtcgatggagagctttgcatccgcaataagtgaggagtttcccagactccaacagcatcgtgagcaggtggagcagctgcagcgacgcggcaggcagattgtcagccaggcccagcagcattctcaggttttggtctccaatctgttcaagaatatgaagatctcgtgcgagaagcccacatttccaccgcaggtgtcggctccaaaggcctatcgcttcaaggacatctattccagtcgcaaggatcagctgatccgcgaatgcagggagcaggagcgcaagcagcgcgagttccacagccgaccgatgcccgactttcgtcaggcgcactcacgtcagtcctccagggtcgttgtgcatcggatcacctgccccacgacccccaatgtgctcaagaattcgcgtgaaatggaggaaaagcgccgcttgcgggtggagcagctgcagagggagcgcgagctggagtcccaacttcacaaaatgcaggctcctagggccaaaccgattccgcagagcagccgtcagcccttgaagtcctcgaaccgaccttcctccgcagttccagcggcaagggtgaaggtcgagcccttcaacttgtccgccgaatcgcgcgtccagcagcggcgcattttcaacatccagacgtccaaggcgcaggaggcgcggcgccgcgagctggaggatcagcgccaacgggcggaacgggaggcctaccaaaagctgcgccaacgaaccacgttccgcgccagacccaatccattttcgcagaccgcacgttga

SEQ ID NO: 38457 - protein, 275 aa, DROSOPHILA
MSDSKAEYNWGDLGVESMESFASAISEEFPRLQQHREQVEQLQRRGRQIVSQAQQHSQVLVSNLFKNMKISCEKPTFPPQVSAPKAYRFKDIYSSRKDQLIRECREQERKQREFHSRPMPDFRQAHSRQSSRVVVHRITCPTTPNVLKNSREMEEKRRLRVEQLQRERELESQLHKMQAPRAKPIPQSSRQPLKSSNRPSSAVPAARVKVEPFNLSAESRVQQRRIFNIQTSKAQEARRRELEDQRQRAEREAYQKLRQRTTFRARPNPFSQTAR

SEQ ID NO: 38458 - DNA, 4337 bp, DROSOPHILA
gggctatgacaacctatgacaaacgcaggagacctttatacttacctcaatttaagtttctgattataaatgacaatcgggggaaaattagagatgggctaagtaattggtatgagtattggaaaaaaaggattaacactcggctgacatggaaaggtattctgcaatgctgatactattttttatgccaaagccgagtaatttaagcagcaaaaagtgtatacagcaagtggtgctaatccaggcggctcataaatatttataagcgactgccacagttgttatatgctaatttgggccagaagtggcggcacagttacatcttgagcatctgctggtgcggtaaataatatttacatggcccggcatttgcatagctaacgacaaaaactgctccttgaacactactccactgctgccaccatatacagatccagaaccggatccttgccatatccggcgagtaaccccgagcagttccaacaccagtttacacaaattaatgcgaactcgcacgtgttaattcaaggatgtgcggctgtttcagcccactcccagttctgttctagtcgccatgaatttgcatattagaaaaagttttctgcttgtgaaatgtcagtttaatatgcgtgaagtagttctgctgcctccttcgccttcgcctccgcatccacatccacattcgcatcctttctcatccttttggacttgtaaaatgcgcttaagaaaaacgaagataaaactttgcgcaatctaactttcagctcaacccacacccaactcgtgggcggcataaataattagggttacacacttataggagacactgtgacaaagtgaaactgctgccgagagagaatgtgtgtttcataattaaatcattgagcatttaaatagtttcattcaggccgcaaactcttcagactcttttgggaaatgaaactaggaaatatatacatatatgcaatatgttatgttacgagactttattctactattctcatccgctgcctcgcgttgaactcctttcggcgaacatgaactgtatgagaataaccagatatgtgaccacagctgcaaacatctgtatggaaatttggctagttactttgtcattcagtgccatgcgatgtacttacactactcagtagatgcagattgagactgaagaaatccttggcggtcaccacaaatcgctggtgcagtgtttgaagtgaaaattcacttaccaaatcattgtatagtttgctgccctggggttttaccaacttcgaaattagacaaccgatttgccggccctaaaaagatagatacgatatgtttaaaggacacacggctatccacagtgtcctcactagattatagctttgttgacagtgccaacaagcagctgccatttgcagggctacattgaaaataaatcccaagttgagcaagatggcatatatcctccagggtcttgttctgatatccacgaatagccaataggagttggaaacaaagatcgcaaagtgaacaatgatgatggtcagaaggctgcctccaaaatagccattaatgcgaacaaacaaataatgtaggtcattatagcgccttttcaggtctttcactcgatgggcctgttggtcggaaaactgcggcttttgctttctctgtggccaacgacaggataattccctggccagaatcagcagctgcagcttggtctggcgaacccttatgttcaccttcatgacctccaggataaaggatataatctgcacctgcagagccagaaaactgggcagcgttttcaggtgatagatcctgatacgaaaggcatattctggcgcgttcgagcacaccaaatactctactcccaaagtgggaaccagcatcgccagcacagtgaaggccaaccagggatcggagtcctcgaacgcaatcggttcgtccaactggtcctgcttgattctgaaaccatcaagaaaggaggtaaccacaatgaaggcatgtgagaccgtctggaaaaatgtgagtatatgccgcagtgagcagtccaatgtgcagtcaatcgtttgggcatatatcacactttgagtccacatggaaataaaccaggttagccaacccagaaactgtaaccacaggaccaaacgagatagtctccttgatctcaaagaaaatgccaccaaaatgaaatggaaaatcttaaggaccactcgtgagctagcttgcactcttgtcggcggaaacattgttactaaatggtatttaattggatgggaattcagtagacgtacttgacaatgtgacaatccatcattgtcatcgtttattaactatgatttgtcagaaacttgcacttagcatagtcctgcctgattgattgtcctcaaattcacattgctgattaacagtggggtcgtgtaaaggtggtcaggattgagtttaaagattaatttaagtttccatgaatattacttacattttccgcacctgaatcgccgtgccaaaaaagagtggcaattggagtgccgaagtcgatccccgtggctccgttgaagatcagtgaacggacattgccgccatcgtaaatgcccatgatcatccagtaggcattggtcacgaactgaaagctggtcagcaaatggagtcccagcattccccatccatagcagtcgctgaatgtttcgtagcactcgaagatcctttcgtaggtggtgcgcagggtctggagttgaaggcactcttggactccgtagggctgccacagatcgtttccggaggccatggacaacagggatcggcgcaagtggatggatctctgattcagatccatgacgtgctgcaccagttgaacatagcgataccgtagtagccacatcagtggtaaggatatacaaaacacaggcgataccgtctccccaaaattggtcgcaagtctcacaagatcacaagtaaactgaactccaattagtggcaataggtatgccgcgtggcgagatctcccgaacattccaagtctttgcagttgcaactccgtctggactcgcagatcctccagctggctgtgggtcttctgcttaaggacactctccagcaggagcgcaaatcccagcacggagtttcccacgaacagcatggtgcccacggcatttccaacattttcgatggccacccacgaaaagctgatggcaacgtccagcaaatatataaagtaaactatccaacagcagcgaatggccaatgataaaaacagccatcccaactgcgaaataggaggaagtggaaccaaggcgagtacagagaagataacttccaggaaacggcgggtcaggcactccaaagtcttcatgttggctttataaactgaaactgattgaaccattaccattgttttgctttacaacaatcagctagttaattgaatcatgactagtgatatttcttttactcaaagcactttacacttgacactgattgatgtctaaattaattgtagttacagcttaaaagataattcttaagcacttaatattggaaatgtgtaaactcctaaagtccttctttgcaaacactcttattctcagttatcaaaaactgcagaaatgttatggcattgataatgaggtaaatgtagatttcaaagacaaggtcgcgatcgcaaataatttttctgttccagataaaattccgaatgggcagagattgctgctgtagtagaataacttgatgctgttggtggttatataaataagtaaataagatacatgtatcggtttaaagtttgcagccagcttaacggaagcacttgatacaggaagtaggagcaaaagtatagtttaaaaattatcacattcactgtaggaaatcgaacattgattatcactttgtgttagcgtattatactgcgccgctatatgatgcatagtaagtacaactttaatcacgggaaactgtaagccataggcttagatatcgcgcatacgcagtgttggccgcgcaataattgagctaattaacacattaataaatgaataaagcccaaagtcaatcgattaatgtaaatgcaaattagctagatgcgtttgtgaatatatttcgaaataatcgggggattagagctggcgtgcattttccattaactaaattatggcaaaaagtgttagcaattttttcagcctcacatgtgtgttattttctctacttatttggtcacgttccagacaaaaatccataattggcactaagcaatttcttctgtgcacaacgaatcattttctatgcgcaatatgtgacatcggaaagttgttccaatttaatttgactttgatcgccagctgacgcaaatgtcg

SEQ ID NO: 38459 - DNA, 1755 bp, DROSOPHILA
atgaagactttggagtgcctgacccgccgtttcctggaagttatcttctctgtactcgccttggttccacttcctcctatttcgcagttgggatggctgtttttatcattggccattcgctgctgttggatagtttactttatatatttgctggacgttgccatcagcttttcgtgggtggccatcgaaaatgttggaaatgccgtgggcaccatgctgttcgtgggaaactccgtgctgggatttgcgctcctgctggagagtgtccttaagcagaagacccacagccagctggaggatctgcgagtccagacggagttgcaactgcaaagacttggaatgttcgggagatctcgccacgcggcatacctattgccactaattggagttcagtttacttgtgatcttgtgagacttgcgaccaattttggggagacggtatcgcctgtgttttgtatatccttaccactgatgtggctactacggtatcgctatgttcaactggtgcagcacgtcatggatctgaatcagagatccatccacttgcgccgatccctgttgtccatggcctccggaaacgatctgtggcagccctacggagtccaagagtgccttcaactccagaccctgcgcaccacctacgaaaggatcttcgagtgctacgaaacattcagcgactgctatggatggggaatgctgggactccatttgctgaccagctttcagttcgtgaccaatgcctactggatgatcatgggcatttacgatggcggcaatgtccgttcactgatcttcaacggagccacggggatcgacttcggcactccaattgccactcttttttggcacggcgattcaggtgcggaaaattttctgggttggctaacctggtttatttccatgtggactcaaagtgtgatatatgcccaaacgattgactgcacattggactgctcactgcggcatatactcacatttttccagacggtctcacatgccttcattgtggttacctcctttcttgatggtttcagaatcaagcaggaccagttggacgaaccgattgcgttcgaggactccgatccctggttggccttcactgtgctggcgatgctggttcccactttgggagtagagtatttggtgtgctcgaacgcgccagaatatgcctttcgtatcaggatctatcacctgaaaacgctgcccagttttctggctctgcaggtgcagattatatcctttatcctggaggtcatgaaggtgaacataagggttcgccagaccaagctgcagctgctgattctggccagggaattatcctgtcgttggccacagagaaagcaaaagccgcagttttccgaccaacaggcccatcgagtgaaagacctgaaaaggcgctataatgacctacattatttgtttgttcgcattaatggctattttggaggcagccttctgaccatcatcattgttcactttgcgatctttgtttccaactcctattggctattcggccggcaaatcggttgtctaatttcgaagttggtaaaaccccagggcagcaaactatacaatgatttggtaagtgaattttcacttcaaacactgcaccagcgatttgtggtgaccgccaaggatttcttcagtctcaatctgcatctactgagtagtatgtttgcagctgtggtcacatatctggttattctcatacagttcatgttcgccgaaaggagttcaacgcgaggcagcggatga

SEQ ID NO: 38460 - protein, 584 aa, DROSOPHILA
MKTLECLTRRFLEVIFSVLALVPLPPISQLGWLFLSLAIRCCWIVYFIYLLDVAISFSWVAIENVGNAVGTMLFVGNSVLGFALLLESVLKQKTHSQLEDLRVQTELQLQRLGMFGRSRHAAYLLPLIGVQFTCDLVRLATNFGETVSPVFCISLPLMWLLRYRYVQLVQHVMDLNQRSIHLRRSLLSMASGNDLWQPYGVQECLQLQTLRTTYERIFECYETFSDCYGWGMLGLHLLTSFQFVTNAYWMIMGIYDGGNVRSLIFNGATGIDFGTPIATLFWHGDSGAENFLGWLTWFISMWTQSVIYAQTIDCTLDCSLRHILTFFQTVSHAFIVVTSFLDGFRIKQDQLDEPIAFEDSDPWLAFTVLAMLVPTLGVEYLVCSNAPEYAFRIRIYHLKTLPSFLALQVQIISFILEVMKVNIRVRQTKLQLLILARELSCRWPQRKQKPQFSDQQAHRVKDLKRRYNDLHYLFVRINGYFGGSLLTIIIVHFAIFVSNSYWLFGRQIGCLISKLVKPQGSKLYNDLVSEFSLQTLHQRFVVTAKDFFSLNLHLLSSMFAAVVTYLVILIQFMFAERSSTRGSG

SEQ ID NO: 38461 - DNA, 3937 bp, DROSOPHILA
cccagtattccatttcgaagcctgctcacttatgcatttgtaacttacgaatttccaactaatctttagcaaacattttcccagcaaatattggtataggcccccaattctaactttctcgagaaccctttaaacggagcgtgtgtgccttcgatggaaattccaaactccatgtgtacttagcaaccggccagcaattgcgagtatctcgaagaatcacagtctcactcgtaagcccattcagttttggcctaattaacagcatatctgcaggggattagggtgcgcaatggctcttgcattcatttcagtcgtattgtttcaatggttccgttgctggtgcccctcacaaaggtacaaaaggagtacaaccggcgggaaaaagggaaaaccggggcgtggctgtggctgtgggcgggtaaaaaactgaaaccagcagctatttgctgttgatggctgccgcgtgcatgcaaattgccacccaaaagatgcaaaacatgtgccccctgcgttggagctaaagtttctgaccgagttgatttgtatgcgcgatgcatctgggcagtcttcatccaccaagcccagcccaggccaaccgtatccaacccaaccacccacttccatccacacttttttgtcgctttttctcagatgttgtccgaacgtttttgccggcaaacggaagagggaacagaacagcgactacagaagcatctgccatttggcattaagagcagcccccaagctcccagccacccattgccgcaccttcgcaccactgacccaccatcgcatcacccaatgcccaaggtcgcgacagctattcactttgtgcttttgaattttcaaaagacgaccagcaaaaactgacatcattttgtggattcaggtttcgtgttgcgcggctaaggcgctagtttcgcttcaaaatgcaaagggttttcggattttcgattttcgcgtttttgggcaccaccaccacatggtcggtagcgtttactcacagattaaagtgagcatcagccatggtgggccggtgtccaagggtcattctcagagtgagttccgcttcctcgtatcttccttgggcactcaacacgctgcccaggttgcccagagctgaaatatatagaataatatattgatttttccaaatgctgtagatagattcaatatatttcttgtattttgtacatatgaatatctaagaaagtatgcactcaccctttggaggatttatagagatggcactgcggaatagctgctcctcatcccgccaatccaagttgcgcctgaaggtgcgcactccgtggacgccaaggagcagggccaggccgcataggagcatcaggcgggatcgccaggagctattgacccgctgccagagatgtccgaaaccgaggccaaagagtagacaatagccaacgcttggcaaatagagcaccctttcggccattacgaatcccacgtagaagagcagattgctggcgggcaggaatggcaacaccaggaaggcggtgcccaagatgggcgctgctgtccatgaggcgcttttcgatttggaggaggtggagtagattgctgacgcagagcgatagctgggtgcagagagttggtggtggcaatcgcaggtgaggcccagccaggtgtgacagctattgccgcccaatcgcctcagtaggggcagcgaaatgttcgccacctccgcaaaatccatcggtgaggctgcactacgcagtccagatcccttccacagtatggcaactagagatccgtagaagccagccgtcagaatatttcgtgcatcccaaagcgttctgatccgcgacacagcctccattccccagtcgaagcttagctcctgtggccagaggagaatcccaaagttggccactggcaggtacagaaaagttagagtcctagtccaaaaacaggattcatgggccgtcggattgtcggcggccgaaaaggcggttgaggggcgtggcaggaggctcagtcgacagtagaggccgcacagtagggtaaatcccaaaatgctaagcgaccggaagcggcgctgaaagttgaaagaagctaatcctgagatggatccatcacacaccttatcgctattttcccgaccgacaggcgataggacatcgcacaatccgcacagcagcagcgccgttatggcagtctccttgcaaagaagtgctgccaacgccagcataatggtgaggatgagggatccccactcccggttcagcatgtggcggcggtaggagaggtaggcgagcaggtaacaaacacacgaggccaaatccgccctgcccaccaagccggccaccgcctccgtgtgggcgggatgaacggcgaaaagagcgccagcggccaggacgcccattcgagatggcaggagcgttctcgccaccaggaacaccagccacgtggccacacagtggagcattacgttgaccaggtgatagcccaagggtgtcattccgccggcgaggtagttcagccggaagctgagcacgcacagcggtcgccaagaaccgtgggatccactgtccaccagtggagtgccccagaagtcgttccgcaaaagattggccaatgggcgagctcctgtcacgtcgccattcgccaagatggcgcgcctgcaaaaaagataaaggaaggaacataaagatttatgcaggtacactgacacaaaatacttttattaacaaaagctaagataattgggaaaatgaaaaatatatgatatcatattatcaagatgaattatggaatacaacttatgttatggtcactttttcgaactaattaaaataaagtgatatcttagatttcttataataagctatatttggtgctaatggtgtggctccttccatccggaaattgatatgtagacactcggctcacattacctctgctcggaatggacatgaacaacctgtggcacacctgtccaattaattaaaatgattaattgtacagccaggacctagtctatctctcctcatttctcacacctcccatctaaagtttcccaaagtgaccggatctccccaagctgactcctttcgtctcgactttcctgctacacgaaaccgtagtgtcctggattctatgggaccacttgtgtctgcgcctcttgtcctatttattttgcttttacttagattggttgaaactttgcggtgggtaatgtttgttatgcaaacggttacattaatccacttattattcatattttaaatatgtggtttttattactacaaattgtaaaaggtacagaataaacttttgtttttttaacgtactcattaatagaagccactttttttatggatagcgtgtgcaatggtctgctgtacttactcgtggcaatttcatgtctgcccatttttattgtccttttgtttttgcactcggcataaatattgttaaagtgccaaacgacagttgactcgagctccctcagcacccccccctctacattcgtccttgctgtgcacttgccacttgattaattgccgatttgctggcgtattttgtgcctttgttgtaaaacagcacacacacacacacactgaaacagcaaacagcacacaacacaccggtgtctttgtattggggacgtggtggaaggtccttggtaattgcctcgccgttgtagcgctccttgttgtcctaatcgatttggccggcacagtgactccgctccgggtcaggtggccatataatcagggttagtttgttatcggcgttgttgctgctgttctgcggcaatttatagagggcttgcaataataccttcgccattttatgcataattagtttttagatgtgcccagcaaatgtcattaattaactttccaactttgcacagggctctcagttgggttttccgcaacaatattgcatcaatatatttatcaatgtc

SEQ ID NO: 38462 - DNA, 1572 bp, DROSOPHILA
atgtccattccgagcagaggtaatgtgagccgagtgcgcgccatcttggcgaatggcgacgtgacaggagctcgcccattggccaatcttttgcggaacgacttctggggcactccactggtggacagtggatcccacggttcttggcgaccgctgtgcgtgctcagcttccggctgaactacctcgccggcggaatgacacccttgggctatcacctggtcaacgtaatgctccactgtgtggccacgtggctggtgttcctggtggcgagaacgctcctgccatctcgaatgggcgtcctggccgctggcgctcttttcgccgttcatcccgcccacacggaggcggtggccggcttggtgggcagggcggatttggcctcgtgtgtttgttacctgctcgcctacctctcctaccgccgccacatgctgaaccgggagtggggatccctcatcctcaccattatgctggcgttggcagcacttctttgcaaggagactgccataacggcgctgctgctgtgcggattgtgcgatgtcctatcgcctgtcggtcgggaaaatagcgataaggtgtgtgatggatccatctcaggattagcttctttcaactttcagcgccgcttccggtcgcttagcattttgggatttaccctactgtgcggcctctactgtcgactgagcctcctgccacgcccctcaaccgccttttcggccgccgacaatccgacggcccatgaatcctgtttttggactaggactctaacttttctgtacctgccagtggccaactttgggattctcctctggccacaggagctaagcttcgactggggaatggaggctgtgtcgcggatcagaacgctttgggatgcacgaaatattctgacggctggcttctacggatctctagttgccatactgtggaagggatctggactgcgtagtgcagcctcaccgatggattttgcggaggtggcgaacatttcgctgcccctactgaggcgattgggcggcaatagctgtcacacctggctgggcctcacctgcgattgccaccaccaactctctgcacccagctatcgctctgcgtcagcaatctactccacctcctccaaatcgaaaagcgcctcatggacagcagcgcccatcttgggcaccgccttcctggtgttgccattcctgcccgccagcaatctgctcttctacgtgggattcgtaatggccgaaagggtgctctatttgccaagcgttggctattgtctactctttggcctcggtttcggacatctctggcagcgggtcaatagctcctggcgatcccgcctgatgctcctatgcggcctggccctgctccttggcgtccacggagtgcgcaccttcaggcgcaacttggattggcgggatgaggagcagctattccgcagtgccatctctataaatcctccaaaggctctgggcaacctgggcagcgtgttgagtgcccaaggaagatacgaggaagcggaactcactctgagaatgacccttggacaccggcccaccatggctgatgctcactttaatctgtga

SEQ ID NO: 38463 - protein, 523 aa, DROSOPHILA
MSIPSRGNVSRVRAILANGDVTGARPLANLLRNDFWGTPLVDSGSHGSWRPLCVLSFRLNYLAGGMTPLGYHLVNVMLHCVATWLVFLVARTLLPSRMGVLAAGALFAVHPAHTEAVAGLVGRADLASCVCYLLAYLSYRRHMLNREWGSLILTIMLALAALLCKETAITALLLCGLCDVLSPVGRENSDKVCDGSISGLASFNFQRRFRSLSILGFTLLCGLYCRLSLLPRPSTAFSAADNPTAHESCFWTRTLTFLYLPVANFGILLWPQELSFDWGMEAVSRIRTLWDARNILTAGFYGSLVAILWKGSGLRSAASPMDFAEVANISLPLLRRLGGNSCHTWLGLTCDCHHQLSAPSYRSASAIYSTSSKSKSASWTAAPILGTAFLVLPFLPASNLLFYVGFVMAERVLYLPSVGYCLLFGLGFGHLWQRVNSSWRSRLMLLCGLALLLGVHGVRTFRRNLDWRDEEQLFRSAISINPPKALGNLGSVLSAQGRYEEAELTLRMTLGHRPTMADAHFNL

SEQ ID NO: 38464 - DNA, 3093 bp, DROSOPHILA
ctgacgagggcccaaaggcgttttgcagatttcgtcggatgtgtgccactgtgtgtgtgtgtgtttgtgtggtttttggtggatttactcgaggggcatctgctcggcttagcgctaaaatgtgtgtctacctggactccatccacctgtcatattcgggtggccaggtgccccaccgtgtgtgtgtgtgtgtgtgtgtgtgatgctgatggaattttaattaaatactcgggtgtctatgttaatttatatgcgcatatgcttagccaggaccagccagtctgggcctgagcaattccattctccgttttccacattgatatgacgaggactcacctttgaagtggctgcgcatgtttgtgattaagagctttttggggccctcgtgctcctgctccttaactcagtttcattgtttaaaatttaattataatttaatgcttagtaagcactatttctcgcatgaaaccccacgctttggccaaccattctggttgctgcggttttcctttttgccaagccacttgatattatcacgtcgccatccggctgtctatcggttgagtgtctggctgtctcacccactcgttggccaggacctctggcttcgatgcccttcaagtcctttggtctcatcaggcttttgtctgcgtttaagccccgttgtcacctggcttcgtttaaccaaacgaaagctccaaagacttgatatggaaataattcgcaacgcggtttggctttcgggaatttgcgtcggcaacagattggcatgttcacataatgctggctaaactaattgcggttgaaaggaatgcgccttgaattgttgctttttcaacaacatttttttggtttaaataccaggctaaatgaaaaagaatcctttaaattgaaaaccggataacacctttcaatcattgcatttttttatttttacaaaatatatattctcttctatctaaaatttatttacattctccattcctctagcagtgtattttcattcgttctcgtgcttgtgcacattcatcctggccagatttgctcggctgatggcatgtcctggctggagctccaaggccttgtgatagcacgccactgcttccttccgaagaccacgcatctgcagaatggcgcccagattggcgtgggcatgggcagccatcggttgcaaggtgaccgcctttcgataccacagctccgcttcggccagacgattcaacagacgcagtgcgtccgccacgcaggattgcagggtgtaatcttgtggcgccaaggcagcggctcgcaagcgaagaccgagagcttcatgatgacgctcctgctgctccaggaagtcagctgaaagaaaaagatattgaaaaatatataaattaatatcagcactgctacaaaccatgaaaatgacttattcttaccataatgatgatgcgaactgggctccaagggcgccaactggagggctcttttgaaccaagactctgcctccgccaggcggctgccctgcaagtccaataaaatatgttattacactatcattgggcatgtgtggcatgtggcaatcttacattcctggccagtgtctggccataggtgacataggctgccccctgctccggctgcaattgcatggccaatctctgctgatgctcggcctcgttccaatcctgcagctcggccaggatttcaccgagtcgcagatgcagcacagccctctgcttttgaggcagcaaaggcaaagcttttagggattccctcagcgctgcagcagcatcctgaagtcttccatcggagcggtaaaggacactcagttgcaggtagcaggtgtagcgagcctccacgtgagcccctcgatcccgtaccccactcccctccagacgagcaccggtccgcagcaccgagatggcttcttgccgatggtcgcccagggagatcagggatgtgcccagattcaagtaggccaccgccagctggggtcgcaattcgatggccctgcgaaagcatggaattgccgagctgaagttgagctgcttctggtgcaccacgcccctaaaatgtggcaaggaaaacagggtatgacatttatcatccattaaatgaaatctgaaatccttactaaattccttaagttaaaagcattgcttaaatgaatggtcttcgaatgctttaattgaaagagtgactttatttccttgctgtctctcttgtttctgagcacctaagcatattttattattaaattttagccaaatgttttacagaattaagcataagccattctggcactttggcttgcttttgctgcccaacaatgcacttgaatttccaaggaaatgcactcttcatagtttttgctcttcacttcatagaaggagtcgttggaaaaaaattgtttaaaaaatatgcgaaatggaaaaggggaaaaccagagaaagtaaagttacttaactcgagggatggagcctccaaaagtgttgggagtaaattaactttcagtttgctttgctgcggtttccaccggctaattgcagaatgctgaccttcaagttgattttagccggcttcattaaatcaacagacagctggattcccccattgcgatgtatacatatactcgcccacacaatttcatatatatgcacatatgtacctatatcacttgtcgtctggtggttattcccacatatccctaaacatcctggcagcccggatgtctgaggctccaaaaatagagaacacaaagtttcggcggatcgcatgcatggataagtgattctaaataaaggcagcgttttgtttgcaacattccagaagaatgtggcaaaataaacccaagcccagattgctcctatttctgaaaaccagccacatctgcagcagcaacaaaataattcaaacaaacagcgagtcctgaaaatgttgtgttgagtaccgacaaggctataaaatcaacaagagggccgattgtaaagactttgaaaaaatagggattatgtatgcaatttttaaaatcggtcaggaatgtaatttaaaagagggaagattaactggttgaaaatttaaatattgcacataaatattgttcttcgattt

SEQ ID NO: 38465 - DNA, 973 bp, DROSOPHILA
atggatgataaatgtcataccctgttttccttgccacattttaggggcgtggtgcaccagaagcagctcaacttcagctcggcaattccatgctttcgcagggccatcgaattgcgaccccagctggcggtggcctacttgaatctgggcacatccctgatctccctgggcgaccatcggcaagaagccatctcggtgctgcggaccggtgctcgtctggaggggagtggggtacgggatcgaggggctcacgtggaggctcgctacacctgctacctgcaactgagtgtcctttaccgctccgatggaagacttcaggatgctgctgcagcgctgagggaatccctaaaagctttgcctttgctgcctcaaaagcagagggctgtgctgcatctgcgactcggtgaaatcctggccgagctgcaggattggaacgaggccgagcatcagcagagattggccatgcaattgcagccggagcagggggcagcctatgtcacctatggccagacactggccaggaatggcagccgcctggcggaggcagagtcttggttcaaaagagccctccagttggcgcccttggagcccagttcgcatcatcattatggtaagaataagtcattttcatgctgacttcctggagcagcaggagcgtcatcatgaagctctcggtcttcgcttgcgagccgctgccttggcgccacaagattacaccctgcaatcctgcgtggcggacgcactgcgtctgttgaatcgtctggccgaagcggagctgtggtatcgaaaggcggtcaccttgcaaccgatggctgcccatgcccacgccaatctgggcgccattctgcagatgcgtggtcttcggaaggaagcagtggcgtgctatcacaaggccttggagctccagccaggacatgccatcagccgagcaaatctggccaggatgaatgtgcacaagcacgagaacgaatga

SEQ ID NO: 38466 - protein, 211 aa, DROSOPHILA
MDDKCHTLFSLPHFRGVVHQKQLNFSSAIPCFRRAIELRPQLAVAYLNLGTSLISLGDHRQEAISVLRTGARLEGSGVRDRGAHVEARYTCYLQLSVLYRSDGRLQDAAAALRESLKALPLLPQKQRAVLHLRLGEILAELQDWNEAEHQQRLAMQLQPEQGAAYVTYGQTLARNGSRLAEAESWFKRALQLAPLEPSSHHHYGKNKSFSC

SEQ ID NO: 38467 - DNA, 2943 bp, DROSOPHILA
acacccaccgacgccaccgccaacgtcatcgttcatttcgctccctttgcattgcttttttgttttggcttagcgctgatgatgtatgcactttgaaaagagttgagcaaagtggtttttcgggtttgatgagctaacgtcaagtccttcgggcgcccccggccttgccacgcccacttagccgcccccccccaccctctcttttccggctgagaaatatatgagttggtgtgggtgtttgatttcctcgtgtcggtgtgtttgatttgcactgctgcataaagttattaatggacttcaatggggtttcaattatgcaatttctgcgatttgaatttgaatgatattttgattgtttgcttgcgtttgttagaggattcccaaaattgatgcatacaaatgcattgttttaatttaatcatagagctaatggtcttgctatggtactcagtcgagcgcaattaattgttaaataattcactttgcaaattaaaatggccagaattcatcgagtttttcaacacacaaaattttaatagcctttgatattttagcatcgttgcgttttaattcattaagaaacttctcattggcattcatatttcatatcaaaggtgaaaaaggacactttagtgcgaaaagtaaacattttttaacgaacataatatgattaaatttgtattcgatatcagtttttaactagatttttttaaatttaatttccttttatttaaagctctaagaataaattttattagacaaaaactcaaaaatgcgctcaaaatgagtttagggctgcatcttaaccgatttatcgacatggcgtctctactcttaagaagatctggtccctcttaacaaggcttttaatttaattggccattggcaacgttgagctaaatcgaattggaatgaattcagccaggtacgatatactaaaagatacttgaagtacttccgcttactctcgttgatcatcagaaacaatttgaagcgctcaatgcccatggaagctctgatcaaaactaaagtcatgaaaacggcatcaatgtcccggaaaacactacttgaggatgcaaaactgtcgacttctgatcaagatccatccgatcgccaagtcctggcgaacaaagcaagtgagggagccgaggaaatgtctttgcccatcgtgaatcccagggagccgacgctgaaagatgtgctgagcatatacgaaaatgtgtccaaattgggggacatacagcgatacttgaacgttatatacaagtgagttggaagcgaaaactaaacttgtacaacactaatttgtatcccattctcgtagacccttctactgcttggcaatgaccacgtccaagttccatctcttggaactggacatgggcttaaaaaatacggcattcgaacccgaaaagcatatggccttgttcgtctatcgctattcgccgactcgcagtataaggatctatccccatggcaacatttattgtcaggcattttgcaaaaacagcgcccgatatggtctagccaatatattgaaagagctgaggtatctgggctatgcgcctcgtttgcgacggctgaagaccaatgcggtcaacgccaccttcagtgtgcctttcaatctgaatctaagacagttccacctggaaaatccggtagtgacccgttatgacacctcgaagtatccgttcctggtgtacaagatgatgggaacaacggtcgagatagctatcttccccacgggctacgtaatcgtgctgtttgctaccactatggaaattaccaagttggccatagcccacatcctgcccacattgtaccgcttaaaggatccgtatcaggaacaatgcaaactgagccacagcagcggtgatatcgactacaaactgctttgggagaatcatttccagaagaacggcgataagaccaccgattggtaaatccctcaacataatccatttgtcgttttcgatttgtttccaaaataaactataattttccatgcccacaaagttttctcctttacgctctcaagatcttgagacggctcataaatgtcggaaaaacgcccgaagacacaggagagttctatgccagccttaaatgggtctcaaaactttgttttaatactaagccacaagtcattgcctttaagtggcgtcagtcgaaatcactcgcatatttataatgcagatttgccactgcactccgctcgggaaatcgaatgtttgcagtgcccagccacgtgggggatatggtttcgaatggctattgtggtggctccacaattctcctggttgaggtgctggcacaccgactagcataataaaagtgacagcgagcatgacaaaaccgagcgaaatcgaatcggtagcgaaaatgtgtcaaatggaattggaaaccggcggctccatcactcaaaaccaacccaaaaacccacttcgcccacactcctgaccaggtggcttcgatttgtgctggccgacatgaaaaacaattcagtgtcatatttgtgtgcccgcctttggtgtttgttttgtaaacgcagctcatcggaatcgcctcgctggtttaggtcctgttgggatgtgggaatttcagctcccagttttgttcagtaaagtgtggataatttgtagcgctttttctggccgactaactaacttcgctgtttgcatttcaatattggaaaaaaattgcagctgaggtagttagtgaaatcagttttcacattttccgattaatggcaactttaagcagatcgaattttcaggtcaaagcattaatgctgcagtctgcataataaaaccaagcaatgaatattttaatttgcattcaacagctgcggtgcaattaagttaatcaaatagtgcaatggtttccctttgtggctcatccggaaactaagtccacataagtaagcacgcagtttttggtgga

SEQ ID NO: 38468 - DNA, 885 bp, DROSOPHILA
atgcccatggaagctctgatcaaaactaaagtcatgaaaacggcatcaatgtcccggaaaacactacttgaggatgcaaaactgtcgacttctgatcaagatccatccgatcgccaagtcctggcgaacaaagcaagtgagggagccgaggaaatgtctttgcccatcgtgaatcccagggagccgacgctgaaagatgtgctgagcatatacgaaaatgtgtccaaattgggggacatacagcgatacttgaacgttatatacaaacccttctactgcttggcaatgaccacgtccaagttccatctcttggaactggacatgggcttaaaaaatacggcattcgaacccgaaaagcatatggccttgttcgtctatcgctattcgccgactcgcagtataaggatctatccccatggcaacatttattgtcaggcattttgcaaaaacagcgcccgatatggtctagccaatatattgaaagagctgaggtatctgggctatgcgcctcgtttgcgacggctgaagaccaatgcggtcaacgccaccttcagtgtgcctttcaatctgaatctaagacagttccacctggaaaatccggtagtgacccgttatgacacctcgaagtatccgttcctggtgtacaagatgatgggaacaacggtcgagatagctatcttccccacgggctacgtaatcgtgctgtttgctaccactatggaaattaccaagttggccatagcccacatcctgcccacattgtaccgcttaaaggatccgtatcaggaacaatgcaaactgagccacagcagcggtgatatcgactacaaactgctttgggagaatcatttccagaagaacggcgataagaccaccgattggtaa

SEQ ID NO: 38469 - protein, 294 aa, DROSOPHILA
MPMEALIKTKVMKTASMSRKTLLEDAKLSTSDQDPSDRQVLANKASEGAEEMSLPIVNPREPTLKDVLSIYENVSKLGDIQRYLNVIYKPFYCLAMTTSKFHLLELDMGLKNTAFEPEKHMALFVYRYSPTRSIRIYPHGNIYCQAFCKNSARYGLANILKELRYLGYAPRLRRLKTNAVNATFSVPFNLNLRQFHLENPVVTRYDTSKYPFLVYKMMGTTVEIAIFPTGYVIVLFATTMEITKLAIAHILPTLYRLKDPYQEQCKLSHSSGDIDYKLLWENHFQKNGDKTTDW

SEQ ID NO: 38470 - DNA, 2798 bp, DROSOPHILA
cgttatggaaaattactagagtgcattactgatttctttgaaataatggaagtggctggtttggaccacccaaatacgtcactatatatacacactaatgtgcaactgtattgcaagacaagcatagcattttatttccgaggcaaaagaatttaacaaaacacacacacacacacccacacacactccggtgaactctgacccctgtgcacggctgtctggaaacgcaggtgagccgaagggatcccagaattcgccacaaccagtactacccccctacaaaagaaaaaaaaacccaagacaaaagaaacagccacagatagaagatctatgtaaaacactagcgatgtgaacgacacagaggaatgtttataaacaataaacaaatgtttgaaaactaacagtgtgcctttattactgggctgcagctcggactttatcgctttgaacaaaacttacaaggaacaactaaggatggctcaatagcagttagttgcttctatttgctttaaataagtagtcatactttataaatactttatactttagaaaagactaccagccgtattattaatgttttttcagtattattgcttcaatgaatcagattgaaaaaactagatttttcaaaaactaatcatattccatccctttttatatttgaactgaatatagcatctattctctttgccgcgcatgtgctattttgcttatctcatgcaaattaagctggctgtttcatattttcacaaagccggatgatgaatattttcgaaatggcgaaactaatcgaagcattcgggttcaattcaaaacaaatcttcgcctactttaattgactgctatttggcatcaccttgcagtcctttcgtagttaattagtaatgaaacggagcaggcgaggatccaatgagtatcggctaagcatggatactgtgtagtgtgaaacttcgattccacgaacacagaacctcaaagacacacagagatagaaacagatatgaaacagatagagctcaaggatgtgccgacagttcgcatcctgatgttgggcgacagaggtgggccaacatgagtatacataatatgtccattggatgctcctaattgtgtctcctacacatttgcaggtgtgggcaagactagtttgaccaatttgatggccactacggaaattacgcccactccagactcgcgaaccgttggcgaggagtcgtggcatgtccaggtgcggttgcatgagtattccaagccggtgatcctgccgcccacgcccacctggacaacgccctcctcgtcggaggactccgagaattacccgtatatgcggagtacgcccaccaccacgaatatcctgtactttgtcgagttctacgacctgaacagcgattggcgcatgtgccgccagcagcgcgaaagcttctataagaatattgacggcatcgtcctcgtgtacaacatgctggaactgagctcccaggacagcctgcacgattggctgtacgatccgttgcgacagatctgcaagcatcgacatctgcgcatccgttccatattgaaaaaccataatgcgcccattctggtggtgggcaccaacctggacaagctgatgcgacgaccactgcgtcgaaggggcagcattgcccaccagttaaacgtcgaggagatgctcgtcaattgcctggatccccaaagctttgtggacaagagccgtaatcagggcaaactgtacggcttcctaaaccgcgtcatcgagttcaaggagcaatttccactgttaagtttccgccacttgtgaccttttattttttagtttcccatcaatttttttaataaaatttatggaaaaatgaagtagcactacgtttttctaacgaagctttctttaggaattatggacatggcgaatttaaagtaacttgttttagcatttcacatagtttatttcaaaaattctctgtggtgtaaatgatcttggatctggtagctgcaccatcggctgcttcttatcctggtggccactgcatctggcggccgccgaggaagtgcaaatgcaagtggtaaactgactgggcgccgtgcttgccattgttgatgaccacgcggtagccatccgcgaggccgagctccttggccaccttgcggcccaccagcatgagatgtcccagcagatcggcatctccatcctcggctagcgagagttgggcaattggcttgcgaggaatcacgaggaagtgggttggtgcctggggcgccacatcgtggaaggcaacgcactgtgaaagattcgataggtaacatctttttctagcaaccaaatggactgcgatctcactttatcatcctcgtggataaatttgcatgggatctccttgcgcaaaatcttgccgaaaatggtgtcttcactggcggctgccgtttgcgatttttccacttcgcttgccattctagcactgcagcttgctatttggcgagagctgcagcgtaaatacagtatataatcgcggcactttagataattaagccaatttcgcacgaactcacctgaaaacacgaaagaaattccggccggttgacaagaacatcgaaatagcgctgccaacttggttttcagacaattcacacagagcggcaaatttagggtattcgaatgctctcacacctgcgtcgctataatgttatttattatttaaaaaaaacatcaacaaattattacagggaaatgcaaaagtatttagtgccatagatcgctttaattaattagggctgtagggctagtgaaaattcaattcaaagga

SEQ ID NO: 38471 - DNA, 729 bp, DROSOPHILA
atgaaacagatagagctcaaggatgtgccgacagttcgcatcctgatgttgggcgacagaggtgtgggcaagactagtttgaccaatttgatggccactacggaaattacgcccactccagactcgcgaaccgttggcgaggagtcgtggcatgtccaggtgcggttgcatgagtattccaagccggtgatcctgccgcccacgcccacctggacaacgccctcctcgtcggaggactccgagaattacccgtatatgcggagtacgcccaccaccacgaatatcctgtactttgtcgagttctacgacctgaacagcgattggcgcatgtgccgccagcagcgcgaaagcttctataagaatattgacggcatcgtcctcgtgtacaacatgctggaactgagctcccaggacagcctgcacgattggctgtacgatccgttgcgacagatctgcaagcatcgacatctgcgcatccgttccatattgaaaaaccataatgcgcccattctggtggtgggcaccaacctggacaagctgatgcgacgaccactgcgtcgaaggggcagcattgcccaccagttaaacgtcgaggagatgctcgtcaattgcctggatccccaaagctttgtggacaagagccgtaatcagggcaaactgtacggcttcctaaaccgcgtcatcgagttcaaggagcaatttccactgttaagtttccgccacttgtga

SEQ ID NO: 38472 - protein, 242 aa, DROSOPHILA
MKQIELKDVPTVRILMLGDRGVGKTSLTNLMATTEITPTPDSRTVGEESWHVQVRLHEYSKPVILPPTPTWTTPSSSEDSENYPYMRSTPTTTNILYFVEFYDLNSDWRMCRQQRESFYKNIDGIVLVYNMLELSSQDSLHDWLYDPLRQICKHRHLRIRSILKNHNAPILVVGTNLDKLMRRPLRRRGSIAHQLNVEEMLVNCLDPQSFVDKSRNQGKLYGFLNRVIEFKEQFPLLSFRHL

SEQ ID NO: 38473 - DNA, 2853 bp, DROSOPHILA
taacatttgattgcaggtctccaagataggagtcttctcctgcggtcctcgtccgctgaccaagagcgtgatgtctgcctgtgatgaagtgaacaagacgcgcaagttgccctatttcatccaccacttcgagaactttggataggtgtgctgcgttggatgtattcaaatttttcacctgccaccttccctgtcttccccctgcctgtgtatccccctcaacgaaagcgaattctaaccgtaagattcattcattagttttagcgaattcggctgctcaaacatacaacttaaatcttctttaatcgtaggctaatcgtacaatcataatttagtcaagttttgctaagtgcgttaagaaaatgtatcccattgtaacaaaatcactgcaatcatagcaagaacaacaaaaaggcctctatatgtatatgtgtatttattgaaaatatgatttgttatcagtttttgtaaaccgttcacattatttattaaaaatttacaattatctttatacatgaaagggaaactgcgtttgaagggtgggttaagaacaatatttcaaatttcttatagattggcgccatcaagcagttgcaagcagttgcgcttttaacactaatagtactagattttatttaccaccccattttgccaataagtgcgcaggaccataaaataacagctgttcaaggatgtttaccagtaaacaagcaggccataacaaacatttcatattggcagaaagacttgaaaatataaaaggagccagttgctaaaatattttaagactgaaaacaatggagtcgatagtgcacattctttcggatgcgtaccatacaacgctcacgcgggagcttttcatcaacgaatgggctcaggaacggttcgaactctctgaatttttcggctgtacatagcgattaagagaaatccatttttcagcttgagttttggaaggcccctttggcattttctcagcgttcatttggagccaaacaaaatgttcaacatcattatccccctatgtggtatcttcagtcaggaaatcctcgtgcatctcttcacggcatttaccctgattagcacactgaactccttcgaaaaatggtaagtaggaaagacaagtcctgaattcaattctccttaataatcctttattctggactcgatttgccggacaggatatatccggagacgcgtcctttgtggtttctgcgagagcagtttgccaataatgtggttgtaaagaaaccggcggtggccttggaaagtcatcagctgagctgcgagatgaccggtgggctgccctgcgcccactcaatgaccttcacggtgttcgtactcatcctggcctcgttcttcttcgttcactgctgggatcgctttgctgcgttgcgctcttccttctgccgctgcataatgtacctgctgatcattggaatggtggtctgtatgtggctgagtcgcctctacctggccaccgagtttctgcaccagtgcatactgggaagttacctgggaattaggtctctttgcacctttgagggaaatgtgaagtacttgttctcgcgaccacgtcgctatgcggtctcagctgttttcttcttgggaggattggcattgtcagtgtactatgtgaagctggaactgaatatcgatccccattggtcggtgcgagaggtaagtttgtatatgctattcgaaaccttattaaatatacctttcttcaggcatttaaatggtgtccagaacccacatatttgcgtcatgaagttggtccaatctttgcacttgtcagagatctgggaaatctaatgggattggctttggcctcgccactatataagctgtaagtctgattattttggatacacaaactgcatcaacctcattccagggaaatgaaacaatcatcattttggcggcgatgccgattccttggagttctggagtttgtcaactatggattgcgcttttccacgtttaagcagtctggtcgcttcgttttcttgacctatgagttcttaagaaatgtcattcattccctagtactgattaagtacgtatcgaaattttactagaatagaggcttttctaattttgtacagataaaagaaaatataaaaaacaatactgggacgaaagtaaaataacgatcttccaaaataatttatttgatgattacatttgaggcaaccaagttccatttctccgggctcagctacgcattaccacttttcttatctgcaaggataaattcgaagaaatatcaagaacatcaatttaagcccacgtctgaatccttaccagcaggctcccgatttgccatctgcaggttggtgttctttcgagaatgccgcctgtccgaccggaacaggcagtccacgcgatccgcctcgaagaaagcgtagaccacacggacattgttggtgaacccgccgccatccttccaggcactcactatcacaatgggatcgccgtcgtcgatgatgccccacttcttggcagaggtcatggcgaactgcacccgagcgtccacatcggtggcgtagtccgtgctgggctccaaggtgtacagtatcggcaggactccgcgatgcagatagacccagcgggcggtccgttcgcagcgcgtgatagccatgatgggacagcggggtcggaacttgctgaccagagtggccgagcggcccgaggtggtcagcacgatgatcagggtggcattggtgcgcttggccgtctccacggctgcaatggccagcgagtgtgccgcgtccagctcgccacgcacctcgctgaccaggtcggagaagaggtctcgaaaccagagcaccttctcggcctcccggcaca

SEQ ID NO: 38474 - DNA, 729 bp, DROSOPHILA
atgttcaacatcattatccccctatgtggtatcttcagtcaggaaatcctcgtgcatctcttcacggcatttaccctgattagcacactgaactccttcgaaaaatggatatatccggagacgcgtcctttgtggtttctgcgagagcagtttgccaataatgtggttgtaaagaaaccggcggtggccttggaaagtcatcagctgagctgcgagatgaccggtgggctgccctgcgcccactcaatgaccttcacggtgttcgtactcatcctggcctcgttcttcttcgttcactgctgggatcgctttgctgcgttgcgctcttccttctgccgctgcataatgtacctgctgatcattggaatggtggtctgtatgtggctgagtcgcctctacctggccaccgagtttctgcaccagtgcatactgggaagttacctgggaattaggtctctttgcacctttgagggaaatgtgaagtacttgttctcgcgaccacgtcgctatgcggtctcagctgttttcttcttgggaggattggcattgtcagtgtactatgtgaagctggaactgaatatcgatccccattggtcggtgcgagaggcatttaaatggtgtccagaacccacatatttgcgtcatgaagttggtccaatctttgcacttgtcagagatctgggaaatctaatgggattggctttggcctcgccactatataagctgtaa

SEQ ID NO: 38475 - protein, 242 aa, DROSOPHILA
MFNIIIPLCGIFSQEILVHLFTAFTLISTLNSFEKWIYPETRPLWFLREQFANNVVVKKPAVALESHQLSCEMTGGLPCAHSMTFTVFVLILASFFFVHCWDRFAALRSSFCRCIMYLLIIGMVVCMWLSRLYLATEFLHQCILGSYLGIRSLCTFEGNVKYLFSRPRRYAVSAVFFLGGLALSVYYVKLELNIDPHWSVREAFKWCPEPTYLRHEVGPIFALVRDLGNLMGLALASPLYKL

SEQ ID NO: 38476 - DNA, 2293 bp, DROSOPHILA
gcaccttccggtatgtggtcggggcggagttccagtgcgaactgctgccggattcgatggtctgcgaggagtccgagaagctggtcttgaatggcttgtagttcttttggcactcgtcgctagacatctcgtagccagcggacgcctcccgctccagttcgttcatcacgttcgagcggaactcgttgcagggtccacgttcgctcatcagcttgttggcgttcttggactcgtcctccgtctttaggctctcataaataccctccgggtactcgttcatgttacagtaatcgatctgataggtggtgttcatacggttggtctccagcctgcggctcagctcctccttgggcatgaccttcaggcgttcatacagatccgggtagactgtacgtaagatcttgagaaagcggttgggttgcagcttaaagcaatctgtttccgcggagaaggccatcttgtccacctggtcctgagtcagctgggtgggtatgatacgcggatccaccagctttcccattggcgctatgcccgtccactcgacgccgccacagtccttagacgcgttcggcggcatcatgatcttggactcgtcgacgcattcgcactccttgacctgcggaccactgtgagcctcggcgcccctgggccgcgttagaaactcgtaccgtttggcactgggcgggacatagtcgtgctgataggttgatagcatcatcttgataacgaaatctacaaaactaattggccaaaacaattttttttagtagtttttttttttttaacgagaaatttggtctgtttgatctgatagagaaactaatagtgatacatttcaaaatcgtacgaaatgagattagaatatttgctcgtagcctagcctgattttaaagttttttttatctcgttgcaggaggacatttccccagagattagcattcgtttcggtaccgagtcgctgacactagattcctggtccatccatcatcagtattcggccatgtgcactgtcatgggtcccgggatgacctcgcagctgcaggagaacgagttcatccgtgacatcttccagctgggaccacgacccacgaacacaggcatcaatggaaacgccaaggtcaagccgaccaagctggagcgggtaagttgattgaaatgtgttaacattcgcttcaaattttaatatatttatatttgttgcttttgcagcaccttgtgaatgctgctgcattcaaggcacgctccataacacgtggaaagaatcgtgacaagcgatcggccgtcgtcacttaaacctgtgcttcacccaccaaccgttcccatccacagacacccaaaccaaccatctcaaaccccgttagccaactctggacttactagttgaattgtttctaattttagcttgaaccaggcaaagcgtcgccaaagctgaagaactaagtctaaatttaggataattcagtgtaatctacaaaatttctctagtttattaaccacatgttggagccattgtttgaatattatgaaatatttattgcgtgcacgcacagtggttgtttatcagtaagtgcatggctggctccagcttggatcttattctttgtgaatttaaattaacactgcgattgttacgactggcatttacgctttgcgatttgggttaacctcttttgttgttgatctttttaaattacaagcgtaggaaaacatagtctgctttaatgctgcgaaaaagttattcataacttgacatggcttttaatacgcataataagcggctctatgaatacatatattttgtagtaaataagtgtaaaataaagtttaggcttaaacgaaaactacttgaaatgcattcttactggtggggatacaacaatggactcctttttagaaaacacttaaaaaacagtttgcgttttataaattgtattttatttgttagttttatcacaaaaattgtatggtaacttaaattgtatgttggattctttccttttgtggattttgttttgtttttctttgctttgacaaattttgtgtagtaactacaataaaatttatatatatatattatatatgttcgtgtgtatgtatatatgggcgcagcttatacaaatcagtttcttaaggagtaaacttaaaggttaataagaaacgtatttccatcaagtacaaattaaaaacttgtttgcttaatttaatattcgccaagtactcgtgttttgcttgcttcttgtttgcatccatggatgaaaccgataatgaaatgaaggaaatcaaaatgctttca

SEQ ID NO: 38477 - DNA, 225 bp, DROSOPHILA
atgtgcactgtcatgggtcccgggatgacctcgcagctgcaggagaacgagttcatccgtgacatcttccagctgggaccacgacccacgaacacaggcatcaatggaaacgccaaggtcaagccgaccaagctggagcggcaccttgtgaatgctgctgcattcaaggcacgctccataacacgtggaaagaatcgtgacaagcgatcggccgtcgtcacttaa

SEQ ID NO: 38478 - protein, 74 aa, DROSOPHILA
MCTVMGPGMTSQLQENEFIRDIFQLGPRPTNTGINGNAKVKPTKLERHLVNAAAFKARSITRGKNRDKRSAVVT

SEQ ID NO: 38479 - DNA, 2477 bp, DROSOPHILA
gcagcctgcaacagctccggcaacataacggtactcgttcgctcgctctctctttctcctggctcggcacttaaccgatgtaccctacatttggcttcgcaaaacataaacaaggaaatgcagccgtgaacacgaaacgaattgcggtaggttctccgttcggcaaagagcgagctccaaaagaggcgaagagagccggggctcgtaagccggccgcattgctgttgttggagctgagagagccagcacggcacccaaacaaacacttaagcaacaacaacaacggctgctgactgaagggaaggtgccagaggggctttaaacccaagagcgcaagctagaaagagcatcagagagagagagagcaaggcaggagcgtaggacgagctcaacttgacatcatcatcatttgtgtcaaaagaccattgaactttgcgagcggatggaacagaacagctccacccccatcccgctgcctacaagtatgcaacaatacctcgctctccttatttatatgcggtttgttttgttgctgcttgcacaccatcacaataacagcaacccacatgcatgcactcactttgcataggtgttggggcccaatgcatctcaaaatgttgcgcttttaacccttacctaactgatcagacatgtaaggccctttcatgaaaatgtcctgtgtttgggaaatcgggaaaatccccacgatgtagttataaatgacatactatagatttgtgtacaataagtggctgtgttaaatcttctttagcgaataggtttttatgtaattcattcttgttgccttaccttacttgtgatggataatggtcgtgttccattgatgttcaataatataacgcccattgcaggattcctgaatagggttcagatatgggttcctggcactacggccttgagctgaagatgaatgttcttgcctctgcggatgtgcatataaaattcggttaatttaattatttaaatgaataattgattttcagcttactggtgcttcccactgcgactgattctgacgtgagccgccagagttccagctttggttgtcataaaagcccctagattggttgggataaagccaagatagcggtggttgtggtagatcccctttattgggcttcctgttgttgttccacgctaaggaaggctgcttgatcttgttgccgtgcttctcctcgatgttcggggacacattctcgcatttaacttgaaccttgtaccacgaggcgtctgtatgcttacgtttgatggtcatatcctcctcgctggtggagtcatacacgtggcccttgatgggtctctttctctgacaattgttgactttctctggctctggtcctcctgttaatacccctggaatttgcggatgtgccttacgtcgttggcgctgatattgccttctcttgttgcgagtgtacctggggatctcacccacaaaatcgctttgattttgcattccttatgatgaagttgtaaacgatgaattcgaagaatcgacaccacgctgtcgaaagcacagcaagtaacacgttgagttgctaacactgacagactactttggcgacttaccagcactgatcgattaatcatgcaaaaagtttttctcgtattgatcgaaacttcctttcgtcatgagcattatcaagataagaaatcgttttaattgcattcggcttcaagtgttcccctaaggaacaggagttaagaatttccagcttttgtttgaaacagatggacatgaatttataaccttgcctggtcacactgaatttttaaagcatctccttccgttattacaaccatccatagtgttaaaaaaaagcaagacacaaaaggcagttatgtaaatgttacaatttttgatgttttattcgttcgatttatcaactactgttacggtaattgcatattaaattggttgttgttctgttgttgcttaaactttaataagtgtacttggttttagctgcggctgaatttaattatatttgtacaaaatatatatttacttttagctttgtcaatgaacaacatgttttgcattcattttggttttctactcgctttccacgttccaaagtccagcttaaaacttaattctgttggttttgctgttcgatctgtcggttcggttttgtttttgtttttgtttggttttcttttgtttcgtttcactacaataacgcttaacaaaatagaattattaactattactaggcgcgtttcgtttgtttttgttgttgttgtggttgttgttgttgttcttgtcggttgcttattgctgcacgttaatcttgtcacttcgaaaaaatttaactatgatttctacgttgtttagtttaattcatcgtgtatatatataaaaatatatatatattatatatctttatatataccaatatatagttatttatagttaggcatgtaattatgcttactttaattatatgcatgtt

SEQ ID NO: 38480 - DNA, 477 bp, DROSOPHILA
atgcaaaatcaaagcgattttgtgggtgagatccccaggtacactcgcaacaagagaaggcaatatcagcgccaacgacgtaaggcacatccgcaaattccaggggtattaacaggaggaccagagccagagaaagtcaacaattgtcagagaaagagacccatcaagggccacgtgtatgactccaccagcgaggaggatatgaccatcaaacgtaagcatacagacgcctcgtggtacaaggttcaagttaaatgcgagaatgtgtccccgaacatcgaggagaagcacggcaacaagatcaagcagccttccttagcgtggaacaacaacaggaagcccaataaaggggatctaccacaaccaccgctatcttggctttatcccaaccaatctaggggcttttatgacaaccaaagctggaactctggcggctcacgtcagaatcagtcgcagtgggaagcaccagtaagctga

SEQ ID NO: 38481 - protein, 158 aa, DROSOPHILA
MQNQSDFVGEIPRYTRNKRRQYQRQRRKAHPQIPGVLTGGPEPEKVNNCQRKRPIKGHVYDSTSEEDMTIKRKHTDASWYKVQVKCENVSPNIEEKHGNKIKQPSLAWNNNRKPNKGDLPQPPLSWLYPNQSRGFYDNQSWNSGGSRQNQSQWEAPVS

SEQ ID NO: 38482 - DNA, 3961 bp, DROSOPHILA
gcatatttaatgaccccaaagttaagtctcacatgttcgcacctggaatctgcgaggcgcgaccgagaccaaaccggcggtggattggataaggcatgacatagccgatgagcagcaagagcggaaaaaccagaacggccgaaagtgggttggcttgcatttcgagccgtttacttccgcatcttcctgtcccgcgagcggtgatctttcttaatgaacgtgatacgggcaaattggccaagcagaatcaggccaaacagctcggcggtagtttaagtttgtcccgaaaaccacgtagaaaagcgaggaaagcttaacagtggacctgtagccattggtcataaagcatcgcaattaaagtacttaggaaatcaaaggcccattgatgagtatggaaatatgttatttgttgcattgtatttcgagttagcagatttttcataaagtggttttcctcttggcattcaaaaataacagtcaaagtttacaataagtaaataaagtaattgtgagcatactccatcaactgatcagcagagttagaaactaattaaaaagagtgaccacaagaaagttgctccaaatcgtaaatagacaacaattgcgttgattacttgattctgcgaagtcatcgccctgaacagtttatatcgattcgcatccaaatcgtccagctttaagtccagttaaggctggaatttgaatctaagctgaatctaacaatatatgcacaaaattaagtctgctatctgaaagtgagtaacagttgtgctctgttaagcccaatttattgccctgcatcatgatgaatcagttgctggagcatcccaaatatttgttgagtattctttcgcctttagcggtagcttaagcttaggttgtggtttgaactttgtacaatgtttagggttaaatattacggcataagttagcttttaacattagagtttaggcgttagcccgccataggttgcctccgtccctggctatctccgcaggcttagagcggctccagggccgccggtccatgtggactgccctccagtttgcgccagaccacgttgcacatctcgcggaccagcgccttctcgccgtcatccatctggtcgagtgcgcttccagctaggttgccaagccgatcgcgctccagctgctcccgcacctcgagcacctggagggctcgaaccaccgcctctggtcgtccggcaatcggctccggcagttggatagcagctgctgccgccgctgcagcggccacgatgtcttgctgctgctgttgatgttgctgctgctgctgctgctgctggtggggcgatgctgctgatttggctggagtggctgcagatgtgaccgttggcgtgggcgtggcctgcggcgtgggcgtcgtcggctgttgtagatgggccgtgggcgtggtgcgctcctcctccagttgctggatgcggcgctccagtgagcgcacatactgaagcgtctggtcgttcagcgtgtgggcatgacgtagatcctgttgggaatcaaattgaaatcgccattaggtcaagttcttattgctgttcgttttttttttttgctcacctggggtagttgccgctgctctgcatagttcctcaaggcggtgatggtctcatctgcattcgtgctggagctggaaccatcgccgtcatctcgaagcgcattcctagtggctgctccgcaaccggcgcacagcgcatttgccgccacatgggcacgctcctcgtccaagtagaggcagagctccttgagctctagattatcggtgattagctcttgctgcttatcatccagctgacgtagtttgttctgcaaagagtatgtcaagtcaattagtattcaaagatctggagtttcgttcggggctggacccacctggtacgcggccacctcctgccgcatcacgctggccgtgtatcgcccaaatctttgccattcccgcgccagcttgcgtcccttctgccggtcgtcgtccaggaagcagcacagatcccgcaactcctggttgtcgtccagcaggcgctgattctgctccttcagcgcacgcagttcgttgaccaacgactgcaactgccggttctgctcggcggtcaggcgacctccgccattggccgtgggtattcccgtgccgctggacgtgaccgaggcattgggcgatgggtgttcctggtctggcttgcgcacaaacttcagcatatccttcgctcccggctggtgtgctggtagatatcgcgactgttgctgctgttgttgttgttgctgctgcttgatggagtcgggaatgtagatgctagatagctgggggatatccggcggatacttgagtggcaagtgcggctttaggatcccggtggccggctgcggcggtggctggtatctcggcgggatggagtgggcgggtgccggtgccttcagctgcgggctgcgcagagattgctgctgattttgcaactggtagtggaagctgcggcgctgctggccggctagattgggcaattctttagtcgattgctgctggatgggcaggcgggaagtcaatgcctgctgctgcgtggagtgcggctggtgtatcgtggccaccgtctgcaattgatgtgattgttgctgctgctgctgctgtttttgggctgccgactgagctgttggcgttggcgttccgctttgttgctgcgatgagtgtggctggtggggattcgttgctcctcctgttgctggcagcaatgagcgacgctggtggatttgttgttgttggtgctgctgctgctgctgctgctgtagtttgttaattgcctgcgttgctgcctgacttttgcctactattttgtcaacgctatttatttttatcaaattatggcccaaagtggttgcttcgtttgttgctgctgctgccgcgttgttagttaatgacttctgttgctgttgctgctgctgttgattgccggacattttcgtgttggttccttgttcgccttgtgtcgtttcggtgttccgtccgtcctctgcccgtccctcgccctgatttcccggtgtctatgacctcgcagtcatattgtcaagtcactgcaagatagcacaaaaaaaaatgggcagggcattagcgaaaatcttaagtggaaaaagctataggccagccataaatcaagccattgctcgatgtaatttatgcgacagccgagggcacgccgccggagcagcataattaaacctccattagactgccgcgagacgctgatagaaagtgaaatgagcatttatcgcaccactggagccatgacatggcacacgaggcgggcacacacgtccacatccacatccacatccacatccaagtccacgtcctcgccacggagtgctcaacaaagtgcagcgaagcgtcgccaaaatgtcgccagtacacggagaaaaaaggtccccccaactaatattatatataatgatttttcatatgactcatggaatttttatgtttttgtttttaggacacgccatcatagaaattcttaatcaacactctgacatacaataacttgtttagccttggaggctcttatttctttcggtgtggcaaagggaacatgtcgtcggtctccgctttctggctgggatcggatgggctggcgctgaagcgtctaatcaccagatgtgcgtcaactaaacggaggcttccgcttctggtttggaaaccgaaagccagcccgatgcactgaatcaacacatatcaccgcatttgtatctggaaagtgaaattgttcatgctttgatggatggcggctctctggggcaggaaaattgaaatgttgcagagttcggagattgacgtgattatggtagttaggtagagcaatttgtggtaataacaagattggtattgcaacagaacgtttcaccaaaatatgtttggcataatatatttatataatagggtgctagtcatatcaatgatcca

SEQ ID NO: 38483 - DNA, 1824 bp, DROSOPHILA
atgtccggcaatcaacagcagcagcaacagcaacagaagtcattaactaacaacgcggcagcagcagcaacaaacgaagcaaccactttgggccataatttgataaaaataaatagcgttgacaaaatagtaggcaaaagtcaggcagcaacgcaggcaattaacaaactacagcagcagcagcagcagcagcaccaacaacaacaaatccaccagcgtcgctcattgctgccagcaacaggaggagcaacgaatccccaccagccacactcatcgcagcaacaaagcggaacgccaacgccaacagctcagtcggcagcccaaaaacagcagcagcagcagcaacaatcacatcaattgcagacggtggccacgatacaccagccgcactccacgcagcagcaggcattgacttcccgcctgcccatccagcagcaatcgactaaagaattgcccaatctagccggccagcagcgccgcagcttccactaccagttgcaaaatcagcagcaatctctgcgcagcccgcagctgaaggcaccggcacccgcccactccatcccgccgagataccagccaccgccgcagccggccaccgggatcctaaagccgcacttgccactcaagtatccgccggatatcccccagctatctagcatctacattcccgactccatcaagcagcagcaacaacaacaacagcagcaacagtcgcgatatctaccagcacaccagccgggagcgaaggatatgctgaagtttgtgcgcaagccagaccaggaacacccatcgcccaatgcctcggtcacgtccagcggcacgggaatacccacggccaatggcggaggtcgcctgaccgccgagcagaaccggcagttgcagtcgttggtcaacgaactgcgtgcgctgaaggagcagaatcagcgcctgctggacgacaaccaggagttgcgggatctgtgctgcttcctggacgacgaccggcagaagggacgcaagctggcgcgggaatggcaaagatttgggcgatacacggccagcgtgatgcggcaggaggtggccgcgtaccagaacaaactacgtcagctggatgataagcagcaagagctaatcaccgataatctagagctcaaggagctctgcctctacttggacgaggagcgtgcccatgtggcggcaaatgcgctgtgcgccggttgcggagcagccactaggaatgcgcttcgagatgacggcgatggttccagctccagcacgaatgcagatgagaccatcaccgccttgaggaactatgcagagcagcggcaactaccccaggatctacgtcatgcccacacgctgaacgaccagacgcttcagtatgtgcgctcactggagcgccgcatccagcaactggaggaggagcgcaccacgcccacggcccatctacaacagccgacgacgcccacgccgcaggccacgcccacgccaacggtcacatctgcagccactccagccaaatcagcagcatcgccccaccagcagcagcagcagcagcagcaacatcaacagcagcagcaagacatcgtggccgctgcagcggcggcagcagctgctatccaactgccggagccgattgccggacgaccagaggcggtggttcgagccctccaggtgctcgaggtgcgggagcagctggagcgcgatcggcttggcaacctagctggaagcgcactcgaccagatggatgacggcgagaaggcgctggtccgcgagatgtgcaacgtggtctggcgcaaactggagggcagtccacatggaccggcggccctggagccgctctaa

SEQ ID NO: 38484 - protein, 607 aa, DROSOPHILA
MSGNQQQQQQQQKSLTNNAAAAATNEATTLGHNLIKINSVDKIVGKSQAATQAINKLQQQQQQQHQQQQIHQRRSLLPATGGATNPHQPHSSQQQSGTPTPTAQSAAQKQQQQQQQSHQLQTVATIHQPHSTQQQALTSRLPIQQQSTKELPNLAGQQRRSFHYQLQNQQQSLRSPQLKAPAPAHSIPPRYQPPPQPATGILKPHLPLKYPPDIPQLSSIYIPDSIKQQQQQQQQQQSRYLPAHQPGAKDMLKFVRKPDQEHPSPNASVTSSGTGIPTANGGGRLTAEQNRQLQSLVNELRALKEQNQRLLDDNQELRDLCCFLDDDRQKGRKLAREWQRFGRYTASVMRQEVAAYQNKLRQLDDKQQELITDNLELKELCLYLDEERAHVAANALCAGCGAATRNALRDDGDGSSSSTNADETITALRNYAEQRQLPQDLRHAHTLNDQTLQYVRSLERRIQQLEEERTTPTAHLQQPTTPTPQATPTPTVTSAATPAKSAASPHQQQQQQQQHQQQQQDIVAAAAAAAAAIQLPEPIAGRPEAVVRALQVLEVREQLERDRLGNLAGSALDQMDDGEKALVREMCNVVWRKLEGSPHGPAALEPL

SEQ ID NO: 38485 - DNA, 4720 bp, DROSOPHILA
ccatttggcagctggcgtaatgaacctggcagccactggctttggccacgagatcgccgcgtcctgtttgcgcgactttcagcacaactttaacggcggggactggggcaacaatggcccaggggtgataacccgtgtggctcagaagatatgtggcaccaaagacattgctctgatgcgagaggaccccaagcgctgcatgggcttcaaagtattcggacggggcgccttttacgccgtaccgtggaagcagtggcgagacttctttgagccggaaaacttagaagagacaatcgcccggtgcaaggactcgtatgtagtgcatgtgtggaataagcactcgagcaagctgcctatcaaaataggatctaagaacgcctacgccttgtatgccgaacaaaattgcccgagatcgtacaaggctgctggcgaatacttctagtatcagaagggttatcaagctcttatcatttgtatatgaatgtttaccgctgcaagccaaagtcgtcgccctgcaaaggggccattgctaaatgtatccctacctatttgctgtcatcctgttggcattaagtttcattgtcattccaagcgatgtcagcttactcaaacgcacatccgcagcacagttcaagtcaaatggaatggttttttattttgcgataagctttacctctccgattgcacattatatatatgtatttaaatactgattgtgaatataattcgataatataagcaagcgaacaactcacatagacatttattgaaagctgtaaaagtcgcttagaatactattttgaatcattgtagtttgtcttaactaagttcgaataagttgaagaattttgtacatactatttatccagggaatgttactatcaacctacaaataaaatagaagtatttaagtcatcacaaacacagtatcttaactctatttcgataattgaaaaataatttgttaaagcgaaatgaaagttaatatccccgcaagtcattacatgcattgcacttgggaatatcgcagacaggcacccacgttatcctctgcgttcgccttgccggcgccctggccattgccgaagtggacaccaatatagaacggagtcacagtgctttcaatgcgacagggccacacgcccgaggagcagaattgggcgccgcagtggacgggctcgcacccaggaagtgggcccagaccggttcctatgaaatcctctatgatgcaaggcattgtaatccggtcagagcaggtgctgaagaactggcgggcctgtcgccgtcgccacttcagcggcaaatcgatggcattccgaataatacccatgatgtcgaagcctccactgggacgaggacgtctggaaacggtaggtccctccgtggtgggacgactcctgaagaagagaaacccaccgtcgtcatcctcatcatcgcctacctcaccacccgatccctccacatcatcgctggctggcgaagatgcaggtgctgccgaggtggtagatgcctctgtactggatcggagcggtgtgggagtggttgatgttgtcgtcgtgctcatggcagcggtgctgctactgctgctgctgctggtactgcccgatgatactgaactggcagccagagtcgaatttccgctcatcatggtcatcagcgttgtggttgtggagtttgccatgttggctagcatctgcatgagggtgctagaagtaggtgctgtagtggtcactgcagcattgcctaatgttgttgctgttgcacctgctgcatctgactgggctggagcaggactcgacgttgccgttgtcgctgctgcttcagaggtgccaccacctcggcttgccattcgcccacctccgccgatgcggaaggactgctcatcgcatggctggtacataatggagcacatgtccagctcctggcgcacacaaatccgatagttttgattggccaaatgtcgaccattctcggcgaagttaaaggtttgcataatgccctcggtgccggtgtgatattgtaggcaacccgccggagctcgttggctgaaggggatctgcaccacactcatctcccaaatgcggagcggcagaaggcgactggacaggctcagactgatgtcgatgaagcgatcgcccgtgggggtggagttgctagggccagtactcgcatccacagggcgcagactgccgtacaaagtagattgtcgtggcgacgcccgtgtccccacatcgtagtacactgaaaaaaaggagcatcagttatttactcaggcagcttacacacatgtatactcacagtgctgaccactgttttggccgcatagggagaagtttccgcctggtccaccacctatgctgaagatatcgccttcgcacactccggttcttcggtttggctggcccagtgtaaagtgatggaagtcaatccgcacctggctgatctcgtcgctcatcatctttacccgcagactgcagcctgtgaagttgctgggcatgaagctggggaattccggcgacacaatgtaggtcacgttgttggtaatcgtagtgttgcagctggccaggaacacgcagcacaccccgaaccccatggcacactcccccctcgcctgaccgtccttctggcggcactcgtatgcattcaggcagttgccaatccgccgattatcgctcgacatgcagtagccatccacgggaacagggaacagatggataactaatgaacagaatgaaagcatcttttaactggttcaggtactatacatattgaaatatttgaatgagattgttttttaaagcttaattattttattgcagctcaccttttccctgtctgttgttcgcctggctggaattccgatcagagatttcctgcaacgacatctcaatgtccagttcccccggtgttcccgtttgcagcctaaagttcacctcatccgcgaaggaatcttcctcaagagcgcccggctcgcccaagtggtcgtcccaaatatcgtaatgtcgcattggtggccaggccgtctcgttagccggcgacctggcgctgactgcaggagccagccccacctggaagataagtacgcaaattgcggcggagagggacggcagtaggtggccacaaccggctccagtgactttcttttcactggcactgcacttctggctgaataaaacttttgctgtgccatcgggtttccagttggagtcgtactggttggcaacgtcttggctcgacgtcagcgattttatggcttccatgtccatgtccactgccatgccatatgttcagctgcaacttcttctctgagcacactccgaatattttatatgcgtgtgcgattcactgcgcagttgaatggtaagtgcgccagtctccatcttccgagatgcgcggatgctgctcgatctgaaccagatgacagctgcccgatgatggtgactctgcgcttgtctgcaactgcttttctccgcttctcggcttttctcctataatacccgcctactaaatattttcggtgatccatgctccatttcgagtgcgcgaagagcgatcttttcacctgaccgactaagcagatcggttggcaaatatatagcttacttatcatatctattatggctgataattgaaaatatattcattttatgacgatacaaattgtgtcatttttcatcagtagtgatctgcgaataaggagggtcgcagctagaattcacatctcttactgttatcgcttactgttatgataacctcgataaccacggctatattaaaggggttttccctttttttgattaccgaaacatccatcccacccgaccgcaatcaataatgcacgggtatcacatgatcgtggtgagatagagcagtggtgaatggtggaactccatggaagtgcacttgaacggatcaagaaatcgccgcagtactttgagtgcagccgggcgtaggtgttgatttgttgtggtgttgatttttatcaaatatacaaatacatgtggttctaaatgacacacccctatctttgtataaaacgtatatttatataaatacatttcttggtaagaaatatatgtatataaatatagaaagctctttgtagggaaactaaagagagtgttcttaaattatatgtgtttgtaggtactatctgaaaatgtgcaaacaaaagcttactgaaaatgtagacaaaattgaaagatttcagacttttatccacgtttaactggaaccaccgacgacgaatcaactcaaaatgtctgataagtaagtaccaaccgctacaataaattgaaagtattgtgcgagatatagttttcagaaccgtcgagttgatgaatccccatttggaaacagcacgatcggattatttataccacctggacatcaatgtggccaatacccgagacaccagtgagttacagaataggttcggcgatgttagggtaagatagtgtcagtcaaatgccttcggattgctaatgcgcgcgaatccgtaggtcatctgcatgggtggaacgggctccagaatgcggcagttagccctttacctaagagatatcctggtagtgtcggagtccggcgatccggtggatttgtgcgagcgtggcaaccgatatgccatgtacaaggtgggtccggtactgtgcgtgagccacggcgttggatcctcctccttcagtgtcgtgctccacgagctgatcaagctcctcaaata

SEQ ID NO: 38486 - DNA, 2452 bp, DROSOPHILA
tgtgaattctagctgcgaccctccttattcgcagatcactactgatgaaaaatgacacaatttgtatcgtcataaaatgaatatattttcaattatcagccataatagatatgataagtaagctatagagaaaagccgagaagcggagaaaagcagttgcagacaagcgcagagtcaccatcatcgggcagctgtcatctggttcagatcgagcagcatccgcgcatctcggaagatggagactggcgcacttaccattcaactgcgcagtgaatcgcacacgcatataaaatattcggagtgtgctcagagaagaagttgcagctgaacatatggcatggcagtggacatggacatggaagccataaaatcgctgacgtcgagccaagacgttgccaaccagtacgactccaactggaaacccgatggcacagcaaaagttttattcagccagaagtgcagtgccagtgaaaagaaagtcactggagccggttgtggccacctactgccgtccctctccgccgcaatttgcgtacttatcttccaggtggggctggctcctgcagtcagcgccaggtcgccggctaacgagacggcctggccaccaatgcgacattacgatatttgggacgaccacttgggcgagccgggcgctcttgaggaagattccttcgcggatgaggtgaactttaggctgcaaacgggaacaccgggggaactggacattgagatgtcgttgcaggaaatctctgatcggaattccagccaggcgaacaacagacagggaaaagttatccatctgttccctgttcccgtggatggctactgcatgtcgagcgataatcggcggattggcaactgcctgaatgcatacgagtgccgccagaaggacggtcaggcgaggggggagtgtgccatggggttcggggtgtgctgcgtgttcctggccagctgcaacactacgattaccaacaacgtgacctacattgtgtcgccggaattccccagcttcatgcccagcaacttcacaggctgcagtctgcgggtaaagatgatgagcgacgagatcagccaggtgcggattgacttccatcactttacactgggccagccaaaccgaagaaccggagtgtgcgaaggcgatatcttcagcataggtggtggaccaggcggaaacttctccctatgcggccaaaacagtggtcagcacttgtactacgatgtggggacacgggcgtcgccacgacaatctactttgtacggcagtctgcgccctgtggatgcgagtactggccctagcaactccacccccacgggcgatcgcttcatcgacatcagtctgagcctgtccagtcgccttctgccgctccgcatttgggagatgagtgtggtgcagatccccttcagccaacgagctccggcgggttgcctacaatatcacaccggcaccgagggcattatgcaaacctttaacttcgccgagaatggtcgacatttggccaatcaaaactatcggatttgtgtgcgccaggagctggacatgtgctccattatgtaccagccatgcgatgagcagtccttccgcatcggcggaggtgggcgaatggcaagccgaggtggtggcacctctgaagcagcagcgacaacggcaacgtcgagtcctgctccagcccagtcagatgcagcaggtgcaacagcaacaacattaggcaatgctgcagtgaccactacagcacctacttctagcaccctcatgcagatgctagccaacatggcaaactccacaaccacaacgctgatgaccatgatgagcggaaattcgactctggctgccagttcagtatcatcgggcagtaccagcagcagcagcagtagcagcaccgctgccatgagcacgacgacaacatcaaccactcccacaccgctccgatccagtacagaggcatctaccacctcggcagcacctgcatcttcgccagccagcgatgatgtggagggatcgggtggtgaggtaggcgatgatgaggatgacgacggtgggtttctcttcttcaggagtcgtcccaccacggagggacctaccgtttccagacgtcctcgtcccagtggaggcttcgacatcatgggtattattcggaatgccatcgatttgccgctgaagtggcgacggcgacaggcccgccagttcttcagcacctgctctgaccggattacaatgccttgcatcatagaggatttcataggaaccggtctgggcccacttcctgggtgcgagcccgtccactgcggcgcccaattctgctcctcgggcgtgtggccctgtcgcattgaaagcactgtgactccgttctatattggtgtccacttcggcaatggccagggcgccggcaaggcgaacgcagaggataacgtgggtgcctgtctgcgatattcccaagtgcaatgcatgtaa

SEQ ID NO: 38487 - protein, 704 aa, DROSOPHILA
MAVDMDMEAIKSLTSSQDVANQYDSNWKPDGTAKVLFSQKCSASEKKVTGAGCGHLLPSLSAAICVLIFQVGLAPAVSARSPANETAWPPMRHYDIWDDHLGEPGALEEDSFADEVNFRLQTGTPGELDIEMSLQEISDRNSSQANNRQGKVIHLFPVPVDGYCMSSDNRRIGNCLNAYECRQKDGQARGECAMGFGVCCVFLASCNTTITNNVTYIVSPEFPSFMPSNFTGCSLRVKMMSDEISQVRIDFHHFTLGQPNRRTGVCEGDIFSIGGGPGGNFSLCGQNSGQHLYYDVGTRASPRQSTLYGSLRPVDASTGPSNSTPTGDRFIDISLSLSSRLLPLRIWEMSVVQIPFSQRAPAGCLQYHTGTEGIMQTFNFAENGRHLANQNYRICVRQELDMCSIMYQPCDEQSFRIGGGGRMASRGGGTSEAAATTATSSPAPAQSDAAGATATTLGNAAVTTTAPTSSTLMQMLANMANSTTTTLMTMMSGNSTLAASSVSSGSTSSSSSSSTAAMSTTTTSTTPTPLRSSTEASTTSAAPASSPASDDVEGSGGEVGDDEDDDGGFLFFRSRPTTEGPTVSRRPRPSGGFDIMGIIRNAIDLPLKWRRRQARQFFSTCSDRITMPCIIEDFIGTGLGPLPGCEPVHCGAQFCSSGVWPCRIESTVTPFYIGVHFGNGQGAGKANAEDNVGACLRYSQVQCM

SEQ ID NO: 38488 - DNA, 3468 bp, DROSOPHILA
cagcgccaggaggacgaggaagccaaacggctcagaatggaggtccttaaagagaagcgtcgccaggagaaaatggcaaaggtgctaaaggagcgcgagcgtcaacgttttattgagaaccagcggaaggccgtggagttcagtcgcaaacttttaaaacggacgggcatggaaggcttcaaacgactgctggagcggaaacgtgagaatcttgttaagagcgaggaattccgttgccgggtaagctttcatatgggtgtagcttttcctcactaacatccttccatattccaatggcagttgatcacaaagaactccttcagttcgtggcacagctattcgacatacagacagcgcgagaagatcatcaaggcggagatctgttggcacaacatcctcaagcggcgcgctctgtatgcgtggattttgtatgtgcagaatgaaaagagcaagatgctagtggcgatcgattggcatgcactgcgctccatggaacactggtttgcgcggtggcacaagtattccacgcactgccggatgattgaagacagcaagactcggcaggccatctcgcaccatgagtggtaggtccctgtaaaatagaattcactgtattatgtatcattttcaattgaaccaatttaataggcacctgaaatggaaggtcctggactgctggcgacgcttgccgcaaatcctgaagatcgagaaggaaacggaggagcgacgccagcggtggcgcatgaaaatatgggagctcttgcctgactacaaaccgagagaggacagcttgtggtagctactagatagaacattattactcttgttcgttgtgcgttttgagttacttaattatatttattttaaatcaattttaaattgcaataaagacttcaaagcggtacgactaagtacgactaccgagaacagcgttaagatttgaaatactttagtatctaagcgacatgcttgtgctttttgctttttggtgtgtgagtagtcactttaagatggctcgccagttgctccagattctgttgcgtcctgcggcgttggaggtgcgcttgtattcgtgcaaggtggatcccttccaccacaagtaagcctgtctagcgagtataaaggctatgtaggaagaaatgagcagagcgtagcaagccaccacaaaggagattccgaggctagaaacagagtgtgcataagaaacgttaattggaaatagaaacaaagtatctactcactcgaagccttcgaacacctcactgcagtcgtcgggcaaaagaactggataaccaagcggtcgcaccaccataaacggatggcaaatggaagtgagggtcaagtttgcgccgagcagcagagcgatctccgacagggccagtccaacaatgtaccacacgtagttccgctcgccaatgcagcagtttagccagtagctgtgatgatcgcgcctcttcacgcaggttccgcagacgggacagtggtatgcccgccttggagtaaccttccggcagatctcgcagatattgggctgaccgtgcatcaagccagatcgctcagcagtgtccatatcccccacctcgtcatcatccaaactcagcacactctccatctggagtgtggtctgggcctctgcctgctcctcgccactcgaagcctcggcgatcccaggcagctcatccttgggcgtggttccgtattgagcagaaacaagattcaagggcgacagtgccttggcggaatagaggcagtacaaagcggcacaggagaagaacattaacgcgtagttctcctccggagccagctccagcagaggaacctgaaactcaaatatgatgatcatgtagaacaccgagaagaccagccagctcaaaaagaagtttgtccgcgtggcggtccgcttagccagctccatgccccagatggtgaagcccaccagcgtgagcatcagcactatggcggtctttgagttcagagtggccaatcccagcatgagggggacaatgaaggcgggagcaacggctgcgggcgagattcgcttggctcctccgcgccatggcaagcgcagtctatcctggaaggcgatgagcatgccgtcgatgttccttcgatcaatggctcggcaggtgacaagtctgtggtaaatttaattttaattgtagacggcctttcatttatgtatcctaccttgtgcaaactaagtcgaagtccacgcagttacaacagcatcctaggatgtgggatcgctctcgactgtcctcagccacgtactcgcagcagcagagactcccgttctccttactcttggactcctcagcctctgatctccaggctgcagaaagaaaattggaggtgccggctgtcatcaagaacatcgatttggacaggaaatggcgcggcgaacgttttttaatgagttccgagcagcgtgtacggaaacagtttagattagattagtgcacgccctactggccgagtggagaaatgtttcaaaagtaattatcagatccgggtgggtccattttaattgttttattggagtacaacgaatttgcttacaatttctccggaataacgacaactacaacaacacagctgacgaacgtccctcccttacagggtgccccgtgtaaagtgggctgccaacttgttttatgctaccgctatgttttgaacttagatctcttatcattattacaaagtttaagaattgtgttataaataattccaaaatatattttatttaaatttcaattgcaagattcctctttttaagttttcgtctgcctgccaaacactctcactttggaaaacatttcccagcctaatgttctctgaaaactgttccaggccgccaccaactccaaaataatgagattttgcggcaaccaaaatgactccatcggattttaagcgaccagcaaaggtatccaagagcttttgctgatttgcaatattgtatatagtctcagaggtaagtattagatcgtatttcgccacatcccttgatagttcagcaaaatgagaccaatctccagaatataaggttgtactgttgtctaaaaatttcagcttttcatcttcagataaagagtcgtccaaatttagcaggatatttggatatgttatgtattccagcacatctttgttctgaaaatatatgattgcaaccaaactatttcaagacttattgtttgcttacgtagtcctgaaaatccacccgtgcgccgtgtttcatagcatatatacccagcaatccgcagccacatcccaaatctaggactcttttctccttccagaatgagtcctcgtacttttcggatagatatagtagaagatcttcagtgcattcccatattttagcaccgccctcgtagacaccggaaatcagatctgaatgattttcctcagacttcctgagatccaggtttaccaagtgggattgctcctttaaatcctccagcagaa

SEQ ID NO: 38489 - DNA, 1356 bp, DROSOPHILA
tagggcgtgcactaatctaatctaaactgtttccgtacacgctgctcggaactcattaaaaaacgttcgccgcgccatttcctgtccaaatcgatgttcttgatgacagccggcacctccaattttctttctgcagcctggagatcagaggctgaggagtccaagagtaaggagaacgggagtctctgctgctgcgagtacgtggctgaggacagtcgagagcgatcccacatcctaggatgctgttgtaactgcgtggacttcgacttagtttgcacaagacttgtcacctgccgagccattgatcgaaggaacatcgacggcatgctcatcgccttccaggatagactgcgcttgccatggcgcggaggagccaagcgaatctcgcccgcagccgttgctcccgccttcattgtccccctcatgctgggattggccactctgaactcaaagaccgccatagtgctgatgctcacgctggtgggcttcaccatctggggcatggagctggctaagcggaccgccacgcggacaaacttctttttgagctggctggtcttctcggtgttctacatgatcatcatatttgagtttcaggttcctctgctggagctggctccggaggagaactacgcgttaatgttcttctcctgtgccgctttgtactgcctctattccgccaaggcactgtcgcccttgaatcttgtttctgctcaatacggaaccacgcccaaggatgagctgcctgggatcgccgaggcttcgagtggcgaggagcaggcagaggcccagaccacactccagatggagagtgtgctgagtttggatgatgacgaggtgggggatatggacactgctgagcgatctggcttgatgcacggtcagcccaatatctgcgagatctgccggaaggttactccaaggcgggcataccactgtcccgtctgcggaacctgcgtgaagaggcgcgatcatcacagctactggctaaactgctgcattggcgagcggaactacgtgtggtacattgttggactggccctgtcggagatcgctctgctgctcggcgcaaacttgaccctcacttccatttgccatccgtttatggtggtgcgaccgcttggttatccagttcttttgcccgacgactgcagtgaggtgttcgaaggcttcgacctcggaatctcctttgtggtggcttgctacgctctgctcatttcttcctacatagcctttatactcgctagacaggcttacttgtggtggaagggatccaccttgcacgaatacaagcgcacctccaacgccgcaggacgcaacagaatctggagcaactggcgagccatcttaaagtga

SEQ ID NO: 38490 - protein, 417 aa, DROSOPHILA
MTAGTSNFLSAAWRSEAEESKSKENGSLCCCEYVAEDSRERSHILGCCCNCVDFDLVCTRLVTCRAIDRRNIDGMLIAFQDRLRLPWRGGAKRISPAAVAPAFIVPLMLGLATLNSKTAIVLMLTLVGFTIWGMELAKRTATRTNFFLSWLVFSVFYMIIIFEFQVPLLELAPEENYALMFFSCAALYCLYSAKALSPLNLVSAQYGTTPKDELPGIAEASSGEEQAEAQTTLQMESVLSLDDDEVGDMDTAERSGLMHGQPNICEICRKVTPRRAYHCPVCGTCVKRRDHHSYWLNCCIGERNYVWYIVGLALSEIALLLGANLTLTSICHPFMVVRPLGYPVLLPDDCSEVFEGFDLGISFVVACYALLISSYIAFILARQAYLWWKGSTLHEYKRTSNAAGRNRIWSNWRAILK

SEQ ID NO: 38491 - DNA, 3188 bp, DROSOPHILA
caccctgttggtctatggagcaattctcctactccttatttactatgtgagtgtggttttccattgaagagaaacattctgaaggtacaaatttttaggtcctcacactggcggatctggagtgcgactatcttaatgcccaggagtgctgccgacgcctcaacttctgggtaatacccaagttcggatcccacgccctgctctgcgtgcttctgttactcggaggccactgggtgatgtttctccttaacctgcctatggtgatttggcttttctacgagctgcatcgccagcggcgcgatagtctgggtgtctacgatccggtggacatacacagtcggggattgctaaaggtccatctgagaaattgtatgatttatctgggctactacttcgttatgttcttcgtggggttgtactggtgagttagacgttgaaaactgcatgttcatctctacgaagttatctgattcttgtctttacagccttatttcgtcactaatcaagggagatcccatcaagcggtatgaggacgacgaaatagtaacggatttctgaagtttagccaaataagcctgcaccaaagggcttccagcaaatttcttcatcctagaccgaactaccaagcctggttatagttgcaatctaaaattctgtaactaaaacttaggcgtacatctaacaaacaagtttcctcgaacactttcgcagaatttgataagagcatttgcctgattctcacaacctaaaccgaaaattgattgaaaattttccttagactagttaatttattattttatttttaaatctttaaaaaagactgtaacaccgcagtgtgctcaattgcgttaacaggatagacgaaacacttgcccaaaccaacctagtcgcacttcatcttcactttatttatttaatctttagcaatataagcgtattcgaatagaaatcacaaaatacataaccatacacagtaagctgttcttgagtcgatcatctgttattgcagaaagtcgaccacctcctccagttctctttggcgagcctgtttctgggcccagcgcgcctctgcggtctttacgctgaccacccaccgatcgtgagccagcttgatgccgcacacagtgtcctccggagttttggaaacggtggctcctcctccctgtgacctgcccatataggtctgggcatcggaacgaggatggcgacgcgcggcgggacataatttgccaccctttggaaacggaggctccgataggtatttcttaaggcagccttggtgaaagagatgaccacagtagacgcgctcgatgaagaagtcggcattgtcatccgtttctatgtcctctgggtattcgggtagcacggtactatcacatatgggacaacgctcggtgtgaaagtcccgggtggcttccaggcagaatttcagcgagcgttgcagactcctaacaggccgaaaattggctagagcctccttgctcatacggatcggtggctccacgcactgccgggctatttcctttgactggccgtttaggtaacgcacgagcacggctgggagattggaatcttgaccgcgcagctccacactctgcatgggatagctgtccggaacaacagcgattactctgtaggtgtagcgtccgcccttggcgaccagctccacgcttttgttcttctgcttcagcttcaactggctctccgtgcctccagtcttgatgtccgctctcagctgcttgatctcctccaagcacacgcacagcggattatcagttaaatactgttgggcgaaggccagcacttgcaatgcctgtggcttcccgatgaaatccctggcatagtcgtcgatcagccgggtaagctccgtcagaagcatttcggagtacacacgactcttcagctccaccagaatttgggtgctctgcgggtagttttctggaaatcgaaggcacatagtcatcgagcgattcggccgctccgggtatatgtcaacccggatcagcgagttggagcaaataatgatcttcgtgtgcggcacctgcttctcacattttgctcggaactccgtgacttcctggtcaataaagctcattgttgaagtcggaatctgttgcgaattcgctgctgttctcctcctattggactattttgaacagctgctaaaagcaagtagtgttgtgaattgctgacatgtatgtttcaaatgatgacgaataaagtgtacgttttaagcgatatttatattgtcagttatgttattctggttataaagggtatttcttatgggaaataactaaacagaaaatataaaaaaacattataaaattcttgggttaacttttcagaagcacttagaaatttgatgagtcacaagaatgaacttcgtcataatctcagccaaaatatgcacttaccaccatcgctttccagcactgcccagctgacgaaaagcctagccacgttgtgaaaacgccgacgaaacgcgagagaatcgaagctaatacgcgactgaaactgaaataaagggtaactaaaatggtgctggatctggatctgtttcgcagcgacaaggggggcaacccggacctcgtgcgcgaaaatcaaaagaagcgcttcaaggatgtggcgctggtggagactgtgatcgccaaggatacggagtggcgtcagtgccgccaccgtgccgacaacctgaacaaggtcaagaacgtctgcagcaaggtgatcggcgagaagatgaagaagaaggagccggttggtgccatgagcgaggacctgcccgcagacgtgaccaaggacctcacagagattgtagccgagacactgcagccgttgaccgtcaaccagatcaagcagctacgcgttctcatcgacgacgcaatgaccgagaaccagaagtcgctagagcttgccgagcagacgaggaacacctcactgcgggaggtgggcaaccacctgcacgagtccgtgcctgtgtctaacgacgaggacgagaaccgcgtggagcgcacctttggcgactgcgaaaagcgcggcaagtactcgcatgtggacctcatcgtgatgatcgacggcatgaacgcggagaaaggagccgtggtgtccggcggacgtggttactttcttaccggagccgcagtctttttggagcaggctcttatccagcacgctctgcacctgctgta

SEQ ID NO: 38492 - DNA, 1188 bp, DROSOPHILA
caattcacaacactacttgcttttagcagctgttcaaaatagtccaataggaggagaacagcagcgaattcgcaacagattccgacttcaacaatgagctttattgaccaggaagtcacggagttccgagcaaaatgtgagaagcaggtgccgcacacgaagatcattatttgctccaactcgctgatccgggttgacatatacccggagcggccgaatcgctcgatgactatgtgccttcgatttccagaaaactacccgcagagcacccaaattctggtggagctgaagagtcgtgtgtactccgaaatgcttctgacggagcttacccggctgatcgacgactatgccagggatttcatcgggaagccacaggcattgcaagtgctggccttcgcccaacagtatttaactgataatccgctgtgcgtgtgcttggaggagatcaagcagctgagagcggacatcaagactggaggcacggagagccagttgaagctgaagcagaagaacaaaagcgtggagctggtcgccaagggcggacgctacacctacagagtaatcgctgttgttccggacagctatcccatgcagagtgtggagctgcgcggtcaagattccaatctcccagccgtgctcgtgcgttacctaaacggccagtcaaaggaaatagcccggcagtgcgtggagccaccgatccgtatgagcaaggaggctctagccaattttcggcctgttaggagtctgcaacgctcgctgaaattctgcctggaagccacccgggactttcacaccgagcgttgtcccatatgtgatagtaccgtgctacccgaatacccagaggacatagaaacggatgacaatgccgacttcttcatcgagcgcgtctactgtggtcatctctttcaccaaggctgccttaagaaatacctatcggagcctccgtttccaaagggtggcaaattatgtcccgccgcgcgtcgccatcctcgttccgatgcccagacctatatgggcaggtcacagggaggaggagccaccgtttccaaaactccggaggacactgtgtgcggcatcaagctggctcacgatcggtgggtggtcagcgtaaagaccgcagaggcgcgctgggcccagaaacaggctcgccaaagagaactggaggaggtggtcgactttctgcaataa

SEQ ID NO: 38493 - protein, 364 aa, DROSOPHILA
MSFIDQEVTEFRAKCEKQVPHTKIIICSNSLIRVDIYPERPNRSMTMCLRFPENYPQSTQILVELKSRVYSEMLLTELTRLIDDYARDFIGKPQALQVLAFAQQYLTDNPLCVCLEEIKQLRADIKTGGTESQLKLKQKNKSVELVAKGGRYTYRVIAVVPDSYPMQSVELRGQDSNLPAVLVRYLNGQSKEIARQCVEPPIRMSKEALANFRPVRSLQRSLKFCLEATRDFHTERCPICDSTVLPEYPEDIETDDNADFFIERVYCGHLFHQGCLKKYLSEPPFPKGGKLCPAARRHPRSDAQTYMGRSQGGGATVSKTPEDTVCGIKLAHDRWVVSVKTAEARWAQKQARQRELEEVVDFLQ

SEQ ID NO: 38494 - DNA, 3448 bp, DROSOPHILA
gcgcatcgtaaacacgttgacaagttccattatcaaaacagcaacaagcacactcagtggatgatattattatgtttaaatgcttacatatctcaagtactcgggtttgttaccgccttgacaatttttcccaataatagctaatttcattcagacatcagataagcgctgggatttcaaggtcttccgacagctcagactaaaagtttccctcagcaattttgactactctagtttttgggtacaaccaatatctggagagtcttaggcaacgttctattctatattggttgtgactactttaagggtattttctcatcggctagcatcggttcggcaccactccaatcatatcaagagtgacgggcccggtaacaaattgagacctattaataaaaaccaaaacaaaacagagacgcgtgcattcttcgcttttttcgccgcctatgtcggatgatagcggcgatggagaggcttttcgttggcttttagaaagcctcgaccccggcgatagcggcctgttcgtgttccgatgctctggagcgttgcgaacgcatgtgagcgatgtgattagagccggctggccgcgtgctgcggaatcaccccgccgccgtccactcaacctctgataacaaatctgggtatcgggcgctgctgcggcagctagccagccaggcgatggaataaatttagacgcacggaaattttcgcaggccgatggcgtgtgtcgtgcctcgtcaacattagtcccggaatttcacggatttaaaggtgatccctgacggaggccagcgctctaatcacgcagatcgtcgattattttatataggaaatatatttatatgcgtcagtggcttggcctggaactacagtctttgaaccgcgcaagtgatgcaatggaatggcgtcaaagttttaatgtttcactaagtagatttctctagtgtttcaattaaccaacacaagcctttaatgcaacagaaacaacaatatcagtctgttagtcgccagtttcctctcgcagcttcaccacaattttgccccggaggtgcccggatttcatcttctcaaaggcctttggcagctcactgaaaccgtagctgctatcgatcagcggcatcagctaaaatagaagaaagtaattagttgacagagtagctcgggagaacaactcttacctttcgctgctccactagtttctgtagaaattgaattccctggggggcgggactaaagaaaccccatttgacaaggcctccgcgctgcgtgacggatcttacgttggtctggaacagatcgaacacattcttaagcgctcctactcccagtccctgcttgtcgatgttggccagcaacggagatgagaaggtgatgtactggcgaaagtcgtacttcgattccgccgccttctgaccaccttgtccagcgcagtccagcacaatgtcatagggtgcgtatttgcacagctcctccatggcctgcgggttgttatagtcgaccactaaatcggctcccaaattgcgaaccatttcaatggcattttcgctgcaggttgccaaaacttgtactttctgggacttgaggatttgtatggccaatgtgccaacgccaccggagccgccaaggactaggacccgcttgtgggcacctccaccggaagctgttgtggctccacatggaccacccaggcctccagttatgtacagtcccgaccaagccgtcaatccggcatacaacacgctggcggcctcgtaatcatccagttctttgggtgcaggagcaagctatggactacacgttatataaaagaccttgcaagtagtttaactacttacacagtatgaaggaacggctacatactccgcatgcgagccaatggtggcctgtaggggtaccactccccagactcgcgatcccagaggcagcgaaacacccattcccgtctgcaccagctcaccgcagaactcgcggcccaaaataagcggaaactcgatgccgtcgcccggctgacagcgcatcttgttcagcactgtggccccgtaaccacggagcatggccaggtcgatggggttcactgccgtcgccctgatgcgtaccaggcactcgttggaacaacggatctggggtatctttagcatttcagagagctgcagctcgtcaatatcgccgtagttgtgcagctgccatccgcgcattttgtccgcggatttcgatgtcggtggtggcgttgcctggtcatttgtttgtgagccggaaagcacggatttcgcaggggctgaatactggcgcctgtttagacggactaactgcctcaggcagaggatagaattaaagccggctgccgtcatcagcgggttttcgataaaaacgcaataagaattaaaaattagagatatttcttaagaaaatatgttcctaattttgttttgttttggtttgctggccaaacagctgatattatgtcaacaataatcgcgaagaaccgatacgtaatttttgttatcgaccgttcaaattgactaatcaatatttaaactaactaaacgctagtattttatacatacaaagatagttggcaaacggtctatgttagtatgtaaccatggcttgggtaataaaagtgcaatcccaatgcattacaatgaacacaaatttaattttaatgagtgtagtgggatatttaagggatgctacttaaaaaaaacgctttacaacactctttcgcaaaacgcagtatggaatatttagaacaatttcttaattaaaaacaaatcaaacgcgaaatgctgcaaattttgtaaatagcataggaaaacatcgtatttttaagtgaaaagcgaatttatagtgcaataatgtttctgcccgaaacagccaccttctgtatcaccctgttggtctatggagcaattctcctactccttatttactatgtgagtgtggttttccattgaagagaaacattctgaaggtacaaatttttaggtcctcacactggcggatctggagtgcgactatcttaatgcccaggagtgctgccgacgcctcaacttctgggtaatacccaagttcggatcccacgccctgctctgcgtgcttctgttactcggaggccactgggtgatgtttctccttaacctgcctatggtgatttggcttttctacgagctgcatcgccagcggcgcgatagtctgggtgtctacgatccggtggacatacacagtcggggattgctaaaggtccatctgagaaattgtatgatttatctgggctactacttcgttatgttcttcgtggggttgtactggtgagttagacgttgaaaactgcatgttcatctctacgaagttatctgattcttgtctttacagccttatttcgtcactaatcaagggagatcccatcaagcggtatgaggacgacgaaatagtaacggatttctgaagt

SEQ ID NO: 38495 - DNA, 1342 bp, DROSOPHILA
tttggccagcaaaccaaaacaaaacaaaattaggaacatattttcttaagaaatatctctaatttttaattcttattgcgtttttatcgaaaacccgctgatgacggcagccggctttaattctatcctctgcctgaggcagttagtccgtctaaacaggcgccagtattcagcccctgcgaaatccgtgctttccggctcacaaacaaatgaccaggcaacgccaccaccgacatcgaaatccgcggacaaaatgcgcggatggcagctgcacaactacggcgatattgacgagctgcagctctctgaaatgctaaagataccccagatccgttgttccaacgagtgcctggtacgcatcagggcgacggcagtgaaccccatcgacctggccatgctccgtggttacggggccacagtgctgaacaagatgcgctgtcagccgggcgacggcatcgagtttccgcttattttgggccgcgagttctgcggtgagctggtgcagacgggaatgggtgtttcgctgcctctgggatcgcgagtctggggagtggtacccctacaggccaccattggctcgcatgcggagtatgtagccgttccttcatactgtcttgctcctgcacccaaagaactggatgattacgaggccgccagcgtgttgtatgccggattgacggcttggtcgggactgtacataactggaggcctgggtggtccatgtggagccacaacagcttccggtggaggtgcccacaagcgggtcctagtccttggcggctccggtggcgttggcacattggccatacaaatcctcaagtcccagaaagtacaagttttggcaacctgcagcgaaaatgccattgaaatggttcgcaatttgggagccgatttagtggtcgactataacaacccgcaggccatggaggagctgtgcaaatacgcaccctatgacattgtgctggactgcgctggacaaggtggtcagaaggcggcggaatcgaagtacgactttcgccagtacatcaccttctcatctccgttgctggccaacatcgacaagcagggactgggagtaggagcgcttaagaatgtgttcgatctgttccagaccaacgtaagatccgtcacgcagcgcggaggccttgtcaaatggggtttctttagtcccgccccccagggaattcaatttctacagaaactagtggagcagcgaaagctgatgccgctgatcgatagcagctacggtttcagtgagctgccaaaggcctttgagaagatgaaatccgggcacctccggggcaaaattgtggtgaagctgcgagaggaaactggcgactaa

SEQ ID NO: 38496 - protein, 362 aa, DROSOPHILA; identical to SEQ ID NO: 25443

SEQ ID NO: 38497 - DNA, 2591 bp, DROSOPHILA
ttacaggctttgatggtttcaaaatatttcgagtccttatttcacaaaaaataaatccaaaggacacatatatatggtttaatatattctcctgttagcattcacaattcattggcattttgcgattagggagccacgttcggttaattaaaatactacaccattctcattagacacttgactaaattctttgaattaaagataagtaggctgactatttggaacttcagtttcgtggattcgattgtatggcgtgttatcctggctgtgtcaaatacgtcttggttttaacaattcgcttttctcggaaaataaatctagttcgcattttagaacacgccatttctttggtacacttcacttgactcacatttcgtatgccactaattcggatcgtatcgtttttggacggcaccttattcacttgggttcactgatcgcgtatccttttcgaatgtgccgtgcgttttgcgggacaaccaggatgtcagctgggctagtaggtccttctagttgggtgtggttgtatatccttttggtgggcacgtatagatccgacttgttgcgcagacagactgaacaagggctgcactcgacggattccttatatatatccggtttgcggggtccggggacggcggtggccacccgatggcgcattttaatttccccgtaaccatagcatatagaaaacccgatctcattatggcaaccaggcgcgctgaattattcatttctatgcaaaacgcgcctctaacttcgaccaaatgaaatagaaaatgcgtcgacgagcaggacaggtgtatccatttggttttcatttttccgtgcccctgccctggtaattagtccaagtgtgcgccatcgcagccgactacgcctagttaacccagttgctccacagcccgcccgtctggttcaataacacgccgcggttgcaagccattcgcaattgtattatttattggacagaacagatttcatagccatggtttctcttctagttttgcttctttggcgctgccccaggagtcttcttgggcttttttaggcgtccgcctgaccgcttcttggccgccaacttggttgccgtggtcgtcgccatccgctgcttggtcagctggcgtcccaagcggagagggatcctgttcctgacaggcaccttagtcttggatttacttctgcggtacctgatgggcatgcggaccgtcttggtcatcgagaggatgcccatgttgacgcccaactccagggcaaactccaccgcacgcttgaggctcccgaaggctctgacgtgctcctcgagcataacgtccttgatgtgtttaaccacgtcgtccacagaagagcctaaaaattttgaatgattttatgcaataatatacgagtacatacttccaaagttattagctccataagtcacttacacatttgcgtctcgcgacttagcatgtccataatatacggcagcaacgtaggtttatgtttatccattataaattttggtttactacttgtagtctcagaaaatgaatgtttgtgtgccgatccaaatagattcaatagcttgagtagaatgattttgttgtgttggtcctgtgaaggtttctcggactggagacttatttaaaacaccacgcatccttgatcgaaagtacttaagtgtcagacggctgctttgattcgcccctttcactatttaaaatacaaaattaagtcaaattaatacactagacgaaagaaatgcgtgctaacgaaaccctaatgctcttaatcgtatgcaaataattaccgaaagaaattacccataaaaacagcgacgttgctccagtttcgatttaatatcggaatgggtcatcattaatagatgaattctggtacttgaaagtacttcctacccatcttcctggcgctaccccaacaaataatattattgcgtaaggaaacccaattgtgcgcatcgtaaacacgttgacaagttccattatcaaaacagcaacaagcacactcagtggatgatattattatgtttaaatgcttacatatctcaagtactcgggtttgttaccgccttgacaatttttcccaataatagctaatttcattcagacatcagataagcgctgggatttcaaggtcttccgacagctcagactaaaagtttccctcagcaattttgactactctagtttttgggtacaaccaatatctggagagtcttaggcaacgttctattctatattggttgtgactactttaagggtattttctcatcggctagcatcggttcggcaccactccaatcatatcaagagtgacgggcccggtaacaaattgagacctattaataaaaaccaaaacaaaacagagacgcgtgcattcttcgcttttttcgccgcctatgtcggatgatagcggcgatggagaggcttttcgttggcttttagaaagcctcgaccccggcgatagcggcctgttcgtgttccgatgctctggagcgttgcgaacgcatgtgagcgatgtgattagagccggctggccgcgtgctgcggaatcaccccgccgccgtccactcaacctctgataacaaa

SEQ ID NO: 38498 - DNA, 514 bp, DROSOPHILA
acacaacaaaatcattctactcaagctattgaatctatttggatcggcacacaaacattcattttctgagactacaagtagtaaaccaaaatttataatggataaacataaacctacgttgctgccgtatattatggacatgctaagtcgcgagacgcaaatgtgctcttctgtggacgacgtggttaaacacatcaaggacgttatgctcgaggagcacgtcagagccttcgggagcctcaagcgtgcggtggagtttgccctggagttgggcgtcaacatgggcatcctctcgatgaccaagacggtccgcatgcccatcaggtaccgcagaagtaaatccaagactaaggtgcctgtcaggaacaggatccctctccgcttgggacgccagctgaccaagcagcggatggcgacgaccacggcaaccaagttggcggccaagaagcggtcaggcggacgcctaaaaaagcccaagaagactcctggggcagcgccaaagaagcaaaactag

SEQ ID NO: 38499 - protein, 126 aa, DROSOPHILA
MDMLSRETQMCSSVDDVVKHIKDVMLEEHVRAFGSLKRAVEFALELGVNMGILSMTKTVRMPIRYRRSKSKTKVPVRNRIPLRLGRQLTKQRMATTTATKLAAKKRSGGRLKKPKKTPGAAPKKQN

SEQ ID NO: 38500 - DNA, 4907 bp, DROSOPHILA
acaggaagtgggctcgcacggacgcgacactcgcggcattttccgcgtccaccagttcgagaaggtggagcagttcgtactgacctccccacacgacaacaagtcgtgggagatgatggacgagatgatcgggaatgcggagcagttctgccagtcgctgggcattccatatcgcgttgttaacatcgtttccggtgccctcaaccatgctgcctccaagaagctggatctcgaggcctggttcggcggcagcggcgcttacagggaacttgtctcgtgctctaactgcttggactaccaggcccgtcgtctgctcgtccgtttcggccagactaagaagatgaacgccgccgtagactatgtgcacatgctgaacgccacgatgtgcgcagccactcgcgtcatctgcgccatcctggagacccatcagacagagacgggcatcaaggtgccggagccattgaagaagtacatgccggcgaagttccaggatgagattccgttcgtcaagcccgctcccattgatctggagttggccgccgccgagaagcagaaaggcaaaaaggagaaaaccaagaaggaccctgccgccggttaagcctaaagttcacataatttactacgaaatatactgctaaactaagcttgcaaagtccacaaaatttttgttacttatcgacttatctaatatttatggcatttatagaaactttataacgattaaactggatcaagctgtgctttgaatgcaatcgacagtctttgttattaggggataaaggtttttttttcaaatggcggtataaaaaataatatctgcccaatagattctatcctaataataataatggttgatagggaaagtcaccccggccggcagttttcgttgtcaggacaatatgttcaacttgtttacgaaattttcccaagttcacaaatcatttttaaattgagtagacgtaatttaactatcacagtgtgaaagaattgttttataaagatgtcgcatcctaagcgacgtgagaagccgagcaaggagactcgctgggaccgcatacgcaagcgccacctgcaggcgaaccctttgggactaaagacggatgcagtgcgtcgcctaatcgagacggactacgttggtaggcgacaggagaggcttctgattgaaggagaagattctaaacagctgaatcctggtctgataatggacatgcggcataaaatggtaaatataagggattataatgattaataagaaattcaaatagtttcagaagataccacacaaacttcccttggccaccatagcccatgacccaagcaactccctggaagccaccaaagcgcacaatcttgaggtggagaagcgtttcattgataatcaactacagaagtttcgccagcagttgtccaggcagttccagcggaccaagtcccaccgcgtgccgccaaccaagccggattttaagctgaacaatggaccgttggtgaagagtctggcacaggcagcccagcacatagataacttctataacactcccgtccaggctctgagtcagatggcacagatgtgctccgagaccaagtcggaggcaaccaagagtctgatccagcaactgagggcagaaccagagaaggaggcggaggcggacatggattgtgagtggacggagcaggaagcgcaggtggtagagatacccgcgtttatagaggagcaagtgatttcatttgatgcccttgagtatcgtaacttcaccaagcaagtccaggcggatgagagcaaggcgaagcttctacggtgccgcactccaagtcctctcacttccaccgaggagttctttcgtcccatgcgggcggctgccgagcgccaaatgctccatgtccgcaccgtgcgccacgaggaggacctgctgcaggagaacaagcaggcgcagcaaccagaaggtgaaccttcctcactaaaaagagaatcctccacctgctcaaacaccagcgatggcatagactctgtaatatccgatttggccgaggaagcgctatatgaactgcaattggaagcagctgagaaggagaatgaagagcttgacaaggagttgcccgttccgccaaagcttgtgcaatttcaattgcccccaaagaagagtccaacactcacaacacatccagttggagattcggaagctgagcctgaacaggaaccgctgctcatccgccgcatagaactgccgaaagtagtcgtcaaacccaaggaacccgagctcaaacagccgtccagctctagtgaagatgagtcggatgtggagcccacacatgagaagcagaagatcatcgagcagctgtttcaggccagggcaaacacccagttggtagtgatgcgcaagtactttctcaagtggatacacttcacaacgatggaaaaaattgagagagagcaagggcagtcgtgtcaggcgcgagacacccgggtgcagaagatcaacgcatttctggacaaggtgcgacaggaaaagaggcgtcagcgcacagaaactgtggccgagactagcaagaccacacaaaaatcgctggagaaacgcgaggaggccgtcaaaatggccaagcagtttaagaacaagtaggtctcagctagacacagatgacaaatgtttctaatactgttttctttcttccagactcaaagtgcagcaggacatcattgacttacagcgcatcaagctggagcgccaagagcgacttattatgcagcttaagctgtctaagctcagtgacgaggccaaggaggcccgcgaggatctgaaacaggaactcaaaacggtcatccggtgcggggatcctaaggcgaaagccaaggcgaagtgcttgcagctgatcggcaacctgcgcgatgcggatgacgaggagatggaccggctgcagggcaaagccctgctccagccacggtttctgcagcacatgcaggagcgggccacagagcggagcatgcgtcatgagcaggctcgtcagcggagggctcaggcagaagccgaaagggaggcagccaagctagctctagaggaggctaaggtttgttactacattcatttaaagctttaatctacctgaacttgtaaacagcgccaggaggacgaggaagccaaacggctcagaatggaggtccttaaagagaagcgtcgccaggagaaaatggcaaaggtgctaaaggagcgcgagcgtcaacgttttattgagaaccagcggaaggccgtggagttcagtcgcaaacttttaaaacggacgggcatggaaggcttcaaacgactgctggagcggaaacgtgagaatcttgttaagagcgaggaattccgttgccgggtaagctttcatatgggtgtagcttttcctcactaacatccttccatattccaatggcagttgatcacaaagaactccttcagttcgtggcacagctattcgacatacagacagcgcgagaagatcatcaaggcggagatctgttggcacaacatcctcaagcggcgcgctctgtatgcgtggattttgtatgtgcagaatgaaaagagcaagatgctagtggcgatcgattggcatgcactgcgctccatggaacactggtttgcgcggtggcacaagtattccacgcactgccggatgattgaagacagcaagactcggcaggccatctcgcaccatgagtggtaggtccctgtaaaatagaattcactgtattatgtatcattttcaattgaaccaatttaataggcacctgaaatggaaggtcctggactgctggcgacgcttgccgcaaatcctgaagatcgagaaggaaacggaggagcgacgccagcggtggcgcatgaaaatatgggagctcttgcctgactacaaaccgagagaggacagcttgtggtagctactagatagaacattattactcttgttcgttgtgcgttttgagttacttaattatatttattttaaatcaattttaaattgcaataaagacttcaaagcggtacgactaagtacgactaccgagaacagcgttaagatttgaaatactttagtatctaagcgacatgcttgtgctttttgctttttggtgtgtgagtagtcactttaagatggctcgccagttgctccagattctgttgcgtcctgcggcgttggaggtgcgcttgtattcgtgcaaggtggatcccttccaccacaagtaagcctgtctagcgagtataaaggctatgtaggaagaaatgagcagagcgtagcaagccaccacaaaggagattccgaggctagaaacagagtgtgcataagaaacgttaattggaaatagaaacaaagtatctactcactcgaagccttcgaacacctcactgcagtcgtcgggcaaaagaactggataaccaagcggtcgcaccaccataaacggatggcaaatggaagtgagggtcaagtttgcgccgagcagcagagcgatctccgacagggccagtccaacaatgtaccacacgtagttccgctcgccaatgcagcagtttagccagtagctgtgatgatcgcgcctcttcacgcaggttccgcagacgggacagtggtatgcccgccttggagtaaccttccggcagatctcgcagatattgggctgaccgtgcatcaagccagatcgctcagcagtgtccatatcccccacctcgtcatcatccaaactcagcacactctccatctggagtgtggtctgggcctctgcctgctcctcgccactcgaagcctcggcgatcccaggcagctcatccttgggcgtggttccgtattgagcagaaacaagattcaagggcgacagtgccttggcggaatagaggcagtacaaagcggcacaggagaagaacattaacgcgtagttctcctccgga

SEQ ID NO: 38501 - DNA, 2625 bp, DROSOPHILA
atgtcgcatcctaagcgacgtgagaagccgagcaaggagactcgctgggaccgcatacgcaagcgccacctgcaggcgaaccctttgggactaaagacggatgcagtgcgtcgcctaatcgagacggactacgttggtaggcgacaggagaggcttctgattgaaggagaagattctaaacagctgaatcctggtctgataatggacatgcggcataaaatgaagataccacacaaacttcccttggccaccatagcccatgacccaagcaactccctggaagccaccaaagcgcacaatcttgaggtggagaagcgtttcattgataatcaactacagaagtttcgccagcagttgtccaggcagttccagcggaccaagtcccaccgcgtgccgccaaccaagccggattttaagctgaacaatggaccgttggtgaagagtctggcacaggcagcccagcacatagataacttctataacactcccgtccaggctctgagtcagatggcacagatgtgctccgagaccaagtcggaggcaaccaagagtctgatccagcaactgagggcagaaccagagaaggaggcggaggcggacatggattgtgagtggacggagcaggaagcgcaggtggtagagatacccgcgtttatagaggagcaagtgatttcatttgatgcccttgagtatcgtaacttcaccaagcaagtccaggcggatgagagcaaggcgaagcttctacggtgccgcactccaagtcctctcacttccaccgaggagttctttcgtcccatgcgggcggctgccgagcgccaaatgctccatgtccgcaccgtgcgccacgaggaggacctgctgcaggagaacaagcaggcgcagcaaccagaaggtgaaccttcctcactaaaaagagaatcctccacctgctcaaacaccagcgatggcatagactctgtaatatccgatttggccgaggaagcgctatatgaactgcaattggaagcagctgagaaggagaatgaagagcttgacaaggagttgcccgttccgccaaagcttgtgcaatttcaattgcccccaaagaagagtccaacactcacaacacatccagttggagattcggaagctgagcctgaacaggaaccgctgctcatccgccgcatagaactgccgaaagtagtcgtcaaacccaaggaacccgagctcaaacagccgtccagctctagtgaagatgagtcggatgtggagcccacacatgagaagcagaagatcatcgagcagctgtttcaggccagggcaaacacccagttggtagtgatgcgcaagtactttctcaagtggatacacttcacaacgatggaaaaaattgagagagagcaagggcagtcgtgtcaggcgcgagacacccgggtgcagaagatcaacgcatttctggacaaggtgcgacaggaaaagaggcgtcagcgcacagaaactgtggccgagactagcaagaccacacaaaaatcgctggagaaacgcgaggaggccgtcaaaatggccaagcagtttaagaacaaactcaaagtgcagcaggacatcattgacttacagcgcatcaagctggagcgccaagagcgacttattatgcagcttaagctgtctaagctcagtgacgaggccaaggaggcccgcgaggatctgaaacaggaactcaaaacggtcatccggtgcggggatcctaaggcgaaagccaaggcgaagtgcttgcagctgatcggcaacctgcgcgatgcggatgacgaggagatggaccggctgcagggcaaagccctgctccagccacggtttctgcagcacatgcaggagcgggccacagagcggagcatgcgtcatgagcaggctcgtcagcggagggctcaggcagaagccgaaagggaggcagccaagctagctctagaggaggctaagcgccaggaggacgaggaagccaaacggctcagaatggaggtccttaaagagaagcgtcgccaggagaaaatggcaaaggtgctaaaggagcgcgagcgtcaacgttttattgagaaccagcggaaggccgtggagttcagtcgcaaacttttaaaacggacgggcatggaaggcttcaaacgactgctggagcggaaacgtgagaatcttgttaagagcgaggaattccgttgccggttgatcacaaagaactccttcagttcgtggcacagctattcgacatacagacagcgcgagaagatcatcaaggcggagatctgttggcacaacatcctcaagcggcgcgctctgtatgcgtggattttgtatgtgcagaatgaaaagagcaagatgctagtggcgatcgattggcatgcactgcgctccatggaacactggtttgcgcggtggcacaagtattccacgcactgccggatgattgaagacagcaagactcggcaggccatctcgcaccatgagtggcacctgaaatggaaggtcctggactgctggcgacgcttgccgcaaatcctgaagatcgagaaggaaacggaggagcgacgccagcggtggcgcatgaaaatatgggagctcttgcctgactacaaaccgagagaggacagcttgtggtag

SEQ ID NO: 38502 - protein, 874 aa, DROSOPHILA
MSHPKRREKPSKETRWDRIRKRHLQANPLGLKTDAVRRLIETDYVGRRQERLLIEGEDSKQLNPGLIMDMRHKMKIPHKLPLATIAHDPSNSLEATKAHNLEVEKRFIDNQLQKFRQQLSRQFQRTKSHRVPPTKPDFKLNNGPLVKSLAQAAQHIDNFYNTPVQALSQMAQMCSETKSEATKSLIQQLRAEPEKEAEADMDCEWTEQEAQVVEIPAFIEEQVISFDALEYRNFTKQVQADESKAKLLRCRTPSPLTSTEEFFRPMRAAAERQMLHVRTVRHEEDLLQENKQAQQPEGEPSSLKRESSTCSNTSDGIDSVISDLAEEALYELQLEAAEKENEELDKELPVPPKLVQFQLPPKKSPTLTTHPVGDSEAEPEQEPLLIRRIELPKVVVKPKEPELKQPSSSSEDESDVEPTHEKQKIIEQLFQARANTQLVVMRKYFLKWIHFTTMEKIEREQGQSCQARDTRVQKINAFLDKVRQEKRRQRTETVAETSKTTQKSLEKREEAVKMAKQFKNKLKVQQDIIDLQRIKLERQERLIMQLKLSKLSDEAKEAREDLKQELKTVIRCGDPKAKAKAKCLQLIGNLRDADDEEMDRLQGKALLQPRFLQHMQERATERSMRHEQARQRRAQAEAEREAAKLALEEAKRQEDEEAKRLRMEVLKEKRRQEKMAKVLKERERQRFIENQRKAVEFSRKLLKRTGMEGFKRLLERKRENLVKSEEFRCRLITKNSFSSWHSYSTYRQREKIIKAEICWHNILKRRALYAWILYVQNEKSKMLVAIDWHALRSMEHWFARWHKYSTHCRMIEDSKTRQAISHHEWHLKWKVLDCWRRLPQILKIEKETEERRQRWRMKIWELLPDYKPREDSLW

SEQ ID NO: 38503 - DNA, 3577 bp, DROSOPHILA
ctagagcctccttgctcatacggatcggtggctccacgcactgccgggctatttcctttgactggccgtttaggtaacgcacgagcacggctgggagattggaatcttgaccgcgcagctccacactctgcatgggatagctgtccggaacaacagcgattactctgtaggtgtagcgtccgcccttggcgaccagctccacgcttttgttcttctgcttcagcttcaactggctctccgtgcctccagtcttgatgtccgctctcagctgcttgatctcctccaagcacacgcacagcggattatcagttaaatactgttgggcgaaggccagcacttgcaatgcctgtggcttcccgatgaaatccctggcatagtcgtcgatcagccgggtaagctccgtcagaagcatttcggagtacacacgactcttcagctccaccagaatttgggtgctctgcgggtagttttctggaaatcgaaggcacatagtcatcgagcgattcggccgctccgggtatatgtcaacccggatcagcgagttggagcaaataatgatcttcgtgtgcggcacctgcttctcacattttgctcggaactccgtgacttcctggtcaataaagctcattgttgaagtcggaatctgttgcgaattcgctgctgttctcctcctattggactattttgaacagctgctaaaagcaagtagtgttgtgaattgctgacatgtatgtttcaaatgatgacgaataaagtgtacgttttaagcgatatttatattgtcagttatgttattctggttataaagggtatttcttatgggaaataactaaacagaaaatataaaaaaacattataaaattcttgggttaacttttcagaagcacttagaaatttgatgagtcacaagaatgaacttcgtcataatctcagccaaaatatgcacttaccaccatcgctttccagcactgcccagctgacgaaaagcctagccacgttgtgaaaacgccgacgaaacgcgagagaatcgaagctaatacgcgactgaaactgaaataaagggtaactaaaatggtgctggatctggatctgtttcgcagcgacaaggggggcaacccggacctcgtgcgcgaaaatcaaaagaagcgcttcaaggatgtggcgctggtggagactgtgatcgccaaggatacggagtggcgtcagtgccgccaccgtgccgacaacctgaacaaggtcaagaacgtctgcagcaaggtgatcggcgagaagatgaagaagaaggagccggttggtgccatgagcgaggacctgcccgcagacgtgaccaaggacctcacagagattgtagccgagacactgcagccgttgaccgtcaaccagatcaagcagctacgcgttctcatcgacgacgcaatgaccgagaaccagaagtcgctagagcttgccgagcagacgaggaacacctcactgcgggaggtgggcaaccacctgcacgagtccgtgcctgtgtctaacgacgaggacgagaaccgcgtggagcgcacctttggcgactgcgaaaagcgcggcaagtactcgcatgtggacctcatcgtgatgatcgacggcatgaacgcggagaaaggagccgtggtgtccggcggacgtggttactttcttaccggagccgcagtctttttggagcaggctcttatccagcacgctctgcacctgctgtacgcccgtgactacgttcccctgtacacgcccttcttcatgcgaaaggaggtaatgcaggaggtggcccagctgtcacagttcgacgaggagctctacaaggtggtgggcaagggcagcgagaaggcggaggaggtgggcatcgatgagaagtacctgatcgccacctcagagcagcctatcgccgcctaccatcgcgatgaatggctaccggagtcttcgctgcccattaagtatgctggtctgtccacctgcttccgacaggaagtgggctcgcacggacgcgacactcgcggcattttccgcgtccaccagttcgagaaggtggagcagttcgtactgacctccccacacgacaacaagtcgtgggagatgatggacgagatgatcgggaatgcggagcagttctgccagtcgctgggcattccatatcgcgttgttaacatcgtttccggtgccctcaaccatgctgcctccaagaagctggatctcgaggcctggttcggcggcagcggcgcttacagggaacttgtctcgtgctctaactgcttggactaccaggcccgtcgtctgctcgtccgtttcggccagactaagaagatgaacgccgccgtagactatgtgcacatgctgaacgccacgatgtgcgcagccactcgcgtcatctgcgccatcctggagacccatcagacagagacgggcatcaaggtgccggagccattgaagaagtacatgccggcgaagttccaggatgagattccgttcgtcaagcccgctcccattgatctggagttggccgccgccgagaagcagaaaggcaaaaaggagaaaaccaagaaggaccctgccgccggttaagcctaaagttcacataatttactacgaaatatactgctaaactaagcttgcaaagtccacaaaatttttgttacttatcgacttatctaatatttatggcatttatagaaactttataacgattaaactggatcaagctgtgctttgaatgcaatcgacagtctttgttattaggggataaaggtttttttttcaaatggcggtataaaaaataatatctgcccaatagattctatcctaataataataatggttgatagggaaagtcaccccggccggcagttttcgttgtcaggacaatatgttcaacttgtttacgaaattttcccaagttcacaaatcatttttaaattgagtagacgtaatttaactatcacagtgtgaaagaattgttttataaagatgtcgcatcctaagcgacgtgagaagccgagcaaggagactcgctgggaccgcatacgcaagcgccacctgcaggcgaaccctttgggactaaagacggatgcagtgcgtcgcctaatcgagacggactacgttggtaggcgacaggagaggcttctgattgaaggagaagattctaaacagctgaatcctggtctgataatggacatgcggcataaaatggtaaatataagggattataatgattaataagaaattcaaatagtttcagaagataccacacaaacttcccttggccaccatagcccatgacccaagcaactccctggaagccaccaaagcgcacaatcttgaggtggagaagcgtttcattgataatcaactacagaagtttcgccagcagttgtccaggcagttccagcggaccaagtcccaccgcgtgccgccaaccaagccggattttaagctgaacaatggaccgttggtgaagagtctggcacaggcagcccagcacatagataacttctataacactcccgtccaggctctgagtcagatggcacagatgtgctccgagaccaagtcggaggcaaccaag

SEQ ID NO: 38504 - DNA, 1577 bp, DROSOPHILA
tgaaaacgccgacgaaacgcgagagaatcgaagctaatacgcgactgaaactgaaataaagggtaactaaaatggtgctggatctggatctgtttcgcagcgacaaggggggcaacccggacctcgtgcgcgaaaatcaaaagaagcgcttcaaggatgtggcgctggtggagactgtgatcgccaaggatacggagtggcgtcagtgccgccaccgtgccgacaacctgaacaaggtcaagaacgtctgcagcaaggtgatcggcgagaagatgaagaagaaggagccggttggtgccatgagcgaggacctgcccgcagacgtgaccaaggacctcacagagattgtagccgagacactgcagccgttgaccgtcaaccagatcaagcagctacgcgttctcatcgacgacgcaatgaccgagaaccagaagtcgctagagcttgccgagcagacgaggaacacctcactgcgggaggtgggcaaccacctgcacgagtccgtgcctgtgtctaacgacgaggacgagaaccgcgtggagcgcacctttggcgactgcgaaaagcgcggcaagtactcgcatgtggacctcatcgtgatgatcgacggcatgaacgcggagaaaggagccgtggtgtccggcggacgtggttactttcttaccggagccgcagtctttttggagcaggctcttatccagcacgctctgcacctgctgtacgcccgtgactacgttcccctgtacacgcccttcttcatgcgaaaggaggtaatgcaggaggtggcccagctgtcacagttcgacgaggagctctacaaggtggtgggcaagggcagcgagaaggcggaggaggtgggcatcgatgagaagtacctgatcgccacctcagagcagcctatcgccgcctaccatcgcgatgaatggctaccggagtcttcgctgcccattaagtatgctggtctgtccacctgcttccgacaggaagtgggctcgcacggacgcgacactcgcggcattttccgcgtccaccagttcgagaaggtggagcagttcgtactgacctccccacacgacaacaagtcgtgggagatgatggacgagatgatcgggaatgcggagcagttctgccagtcgctgggcattccatatcgcgttgttaacatcgtttccggtgccctcaaccatgctgcctccaagaagctggatctcgaggcctggttcggcggcagcggcgcttacagggaacttgtctcgtgctctaactgcttggactaccaggcccgtcgtctgctcgtccgtttcggccagactaagaagatgaacgccgccgtagactatgtgcacatgctgaacgccacgatgtgcgcagccactcgcgtcatctgcgccatcctggagacccatcagacagagacgggcatcaaggtgccggagccattgaagaagtacatgccggcgaagttccaggatgagattccgttcgtcaagcccgctcccattgatctggagttggccgccgccgagaagcagaaaggcaaaaaggagaaaaccaagaaggaccctgccgccggttaa

SEQ ID NO: 38505 - protein, 501 aa, DROSOPHILA
MVLDLDLFRSDKGGNPDLVRENQKKRFKDVALVETVIAKDTEWRQCRHRADNLNKVKNVCSKVIGEKMKKKEPVGAMSEDLPADVTKDLTEIVAETLQPLTVNQIKQLRVLIDDAMTENQKSLELAEQTRNTSLREVGNHLHESVPVSNDEDENRVERTFGDCEKRGKYSHVDLIVMIDGMNAEKGAVVSGGRGYFLTGAAVFLEQALIQHALHLLYARDYVPLYTPFFMRKEVMQEVAQLSQFDEELYKVVGKGSEKAEEVGIDEKYLIATSEQPIAAYHRDEWLPESSLPIKYAGLSTCFRQEVGSHGRDTRGIFRVHQFEKVEQFVLTSPHDNKSWEMMDEMIGNAEQFCQSLGIPYRVVNIVSGALNHAASKKLDLEAWFGGSGAYRELVSCSNCLDYQARRLLVRFGQTKKMNAAVDYVHMLNATMCAATRVICAILETHQTETGIKVPEPLKKYMPAKFQDEIPFVKPAPIDLELAAAEKQKGKKEKTKKDPAAG

SEQ ID NO: 38506 - DNA, 2590 bp, DROSOPHILA
catactccgcatgcgagccaatggtggcctgtaggggtaccactccccagactcgcgatcccagaggcagcgaaacacccattcccgtctgcaccagctcaccgcagaactcgcggcccaaaataagcggaaactcgatgccgtcgcccggctgacagcgcatcttgttcagcactgtggccccgtaaccacggagcatggccaggtcgatggggttcactgccgtcgccctgatgcgtaccaggcactcgttggaacaacggatctggggtatctttagcatttcagagagctgcagctcgtcaatatcgccgtagttgtgcagctgccatccgcgcattttgtccgcggatttcgatgtcggtggtggcgttgcctggtcatttgtttgtgagccggaaagcacggatttcgcaggggctgaatactggcgcctgtttagacggactaactgcctcaggcagaggatagaattaaagccggctgccgtcatcagcgggttttcgataaaaacgcaataagaattaaaaattagagatatttcttaagaaaatatgttcctaattttgttttgttttggtttgctggccaaacagctgatattatgtcaacaataatcgcgaagaaccgatacgtaatttttgttatcgaccgttcaaattgactaatcaatatttaaactaactaaacgctagtattttatacatacaaagatagttggcaaacggtctatgttagtatgtaaccatggcttgggtaataaaagtgcaatcccaatgcattacaatgaacacaaatttaattttaatgagtgtagtgggatatttaagggatgctacttaaaaaaaacgctttacaacactctttcgcaaaacgcagtatggaatatttagaacaatttcttaattaaaaacaaatcaaacgcgaaatgctgcaaattttgtaaatagcataggaaaacatcgtatttttaagtgaaaagcgaatttatagtgcaataatgtttctgcccgaaacagccaccttctgtatcaccctgttggtctatggagcaattctcctactccttatttactatgtgagtgtggttttccattgaagagaaacattctgaaggtacaaatttttaggtcctcacactggcggatctggagtgcgactatcttaatgcccaggagtgctgccgacgcctcaacttctgggtaatacccaagttcggatcccacgccctgctctgcgtgcttctgttactcggaggccactgggtgatgtttctccttaacctgcctatggtgatttggcttttctacgagctgcatcgccagcggcgcgatagtctgggtgtctacgatccggtggacatacacagtcggggattgctaaaggtccatctgagaaattgtatgatttatctgggctactacttcgttatgttcttcgtggggttgtactggtgagttagacgttgaaaactgcatgttcatctctacgaagttatctgattcttgtctttacagccttatttcgtcactaatcaagggagatcccatcaagcggtatgaggacgacgaaatagtaacggatttctgaagtttagccaaataagcctgcaccaaagggcttccagcaaatttcttcatcctagaccgaactaccaagcctggttatagttgcaatctaaaattctgtaactaaaacttaggcgtacatctaacaaacaagtttcctcgaacactttcgcagaatttgataagagcatttgcctgattctcacaacctaaaccgaaaattgattgaaaattttccttagactagttaatttattattttatttttaaatctttaaaaaagactgtaacaccgcagtgtgctcaattgcgttaacaggatagacgaaacacttgcccaaaccaacctagtcgcacttcatcttcactttatttatttaatctttagcaatataagcgtattcgaatagaaatcacaaaatacataaccatacacagtaagctgttcttgagtcgatcatctgttattgcagaaagtcgaccacctcctccagttctctttggcgagcctgtttctgggcccagcgcgcctctgcggtctttacgctgaccacccaccgatcgtgagccagcttgatgccgcacacagtgtcctccggagttttggaaacggtggctcctcctccctgtgacctgcccatataggtctgggcatcggaacgaggatggcgacgcgcggcgggacataatttgccaccctttggaaacggaggctccgataggtatttcttaaggcagccttggtgaaagagatgaccacagtagacgcgctcgatgaagaagtcggcattgtcatccgtttctatgtcctctgggtattcgggtagcacggtactatcacatatgggacaacgctcggtgtgaaagtcccgggtggcttccaggcagaatttcagcgagcgttgcagactcctaacaggccgaaaattggctagagcctccttgctcatacggatcggtggctccacgcactgccgggctatttcctttgactggccgtttaggtaacgcacgagcacggc

SEQ ID NO: 38507 - DNA, 474 bp, DROSOPHILA
atgtttctgcccgaaacagccaccttctgtatcaccctgttggtctatggagcaattctcctactccttatttactatgtcctcacactggcggatctggagtgcgactatcttaatgcccaggagtgctgccgacgcctcaacttctgggtaatacccaagttcggatcccacgccctgctctgcgtgcttctgttactcggaggccactgggtgatgtttctccttaacctgcctatggtgatttggcttttctacgagctgcatcgccagcggcgcgatagtctgggtgtctacgatccggtggacatacacagtcggggattgctaaaggtccatctgagaaattgtatgatttatctgggctactacttcgttatgttcttcgtggggttgtactgccttatttcgtcactaatcaagggagatcccatcaagcggtatgaggacgacgaaatagtaacggatttctga

SEQ ID NO: 38508 - protein, 157 aa, DROSOPHILA
MFLPETATFCITLLVYGAILLLLIYYVLTLADLECDYLNAQECCRRLNFWVIPKFGSHALLCVLLLLGGHWVMFLLNLPMVIWLFYELHRQRRDSLGVYDPVDIHSRGLLKVHLRNCMIYLGYYFVMFFVGLYCLISSLIKGDPIKRYEDDEIVTDF

SEQ ID NO: 38509 - DNA, 2408 bp, DROSOPHILA
ctagtaagagttctgttaattacgaaccattccaaaataatattccaacctaaaggtccgaaatttccgaacaattcgtttaattaattgttttcgcttgaattggcggttcagtaaaccccataatttaccgcttaatcggaatgtttgcttcattatcctgctcacgaatgccccaaggactcgactcatattgcactgccaggaggtcattatgcaaattccccagcttgcttatcgataacatttcatatcccgaaagcagctgctccagctccccggctatcgtgccacattcgaataattatggccacatatggcggcgttggctgcgaaaggagcagttctttgggcgccctcgtcttttttggcggaaacttttgtgcagtttgcacttgataacaatcggcactcggttggggcacaggatggcgcaaactttcacgcgaaaagttcaaggacactgaatgggccggaatgggtgtggcagccacattgtagattttatttccacatcccgctccacgaaatcacaaaagttcgagacgcaggcggcgcttgtttaacttgtctgttgaaattgcattttcgattaagtcggcctgtgtaaactgccatcgagtgcatttcatattgtgtggcatgcagcaaatttcagcgcctcagtagcccccaaaaaaaaaaataagaaccccggatgaagatgaagaaacttttccttgtcagtctaaacgttggcaaagtttgcggtcggatattgtttggcaagcatttagcacattaaactaacttttcaggccgatggtgtcgatgatatggagcgaatataaattggttttccaaaaagttctttctatttgccatttacatagtggaatacaaaatggaattagctctagacctgcagatctacgctttcaatttgtaattttctattaaaacttgaaataaggtattgttacagctagcaaggaaataatttgtatcctaaaataggtgactatgtgctttttggcttcagaagtcccttggatcgcaaatacctcacgataaacggtgtggtgcccaatgtgatgctgattctggctggcgcaaagattttatgaacggcaaaggccacaacaaaggtgcttcctgcggcaactttctccgcaaccgccgatgaacccattccaaagtattccagtacgggcaccaggtttattccactggaaacaagtgcataaaagcctccaagagaaatgacggaaatgaccacatgaaagacaacaatggttgctccatactccttgaatgcccgcttcagttgttcccttttagttatctttaaggtcgttgcggtccccgtggaggcggattcggtactgtagttttgcttaaagcatcctccatgtttcgtccagttcatgtcttgagatgaatatttgtattcccgtttttctctgattgaaattggttttcttgttccacttatgtagttttgcattaaggcagtcgagtgaaagagatgaacaggtgacatcgtcttgagttgattaaacgcaaacccataaggcaaacgggctgcaagaagcgcacatgtcttccccgactttgggaacattttttcgtagtttgtagaaattcctaaataaagagtagtagttcttagaaattccctaagttttatctgtgaacgaaaaaactaagaagccctgaatgacttatgaacgaagtagtacatgatgacgagtattttagtttcaatcgtaatcgaaatgtaatgtcaaaattccctcttatctatcacgttgcataaagttttccccttgatataattttctcccgcttttcctaacgtgtacgtgcataattagctggctgtgtagtaatgcccccgtaatgatataaattcattatacccacgacgcccctgtttttttttcatccccctcgcgctagcataaacagttcagcgcggccataaagttcttccaaaagtcgttgctccttttttccttatttgattaaaatgcaattagctatgaggggttgaaagggatatatgtactccacaaaaaagggagctgttaagtttcggtgacatcagcaaaaggattttggctttttgggagagaaacaaccccgtttcagggatactgctttaaagtgcgttgaactggtgccaagtggaaacgccccactgaactactttgcaccatattggccactgccaaaaagtctgagcacgtgctgaatgcggattgctgaacagatctatgcggcgccaacgcgacaggctaatacacaagaaaaaaaatcaaagtatttgctaataattcataatactaaagaaaatacaattaatcgtcttcaaatcgaatattattgaaaaatgatctgagaaactttatataccttcggtttaa

SEQ ID NO: 38510 - DNA, 408 bp, DROSOPHILA
atgaactggacgaaacatggaggatgctttaagcaaaactacagtaccgaatccgcctccacggggaccgcaacgaccttaaagataactaaaagggaacaactgaagcgggcattcaaggagtatggagcaaccattgttgtctttcatgtggtcatttccgtcatttctcttggaggcttttatgcacttgtttccagtggaataaacctggtgcccgtactggaatactttggaatgggttcatcggcggttgcggagaaagttgccgcaggaagcacctttgttgtggcctttgccgttcataaaatctttgcgccagccagaatcagcatcacattgggcaccacaccgtttatcgtgaggtatttgcgatccaagggacttctgaagccaaaaagcacatag

SEQ ID NO: 38511 - protein, 135 aa, DROSOPHILA
MNWTKHGGCFKQNYSTESASTGTATTLKITKREQLKRAFKEYGATIVVFHVVISVISLGGFYALVSSGINLVPVLEYFGMGSSAVAEKVAAGSTFVVAFAVHKIFAPARISITLGTTPFIVRYLRSKGLLKPKST

SEQ ID NO: 38512 - DNA, 2434 bp, DROSOPHILA
aaccaagttgtttgtttttttctgcagaactaatgatggcctcattcgactgcgaggaacccaataatgccgagaagctaatgtacgatttaaactagtgggatatgtgtaggcttcactaataatagcgactaagaaagcatttaaagttagcctaagcaagtactgtacataaaagttaggtaaagcacttggatatttagcgttaagtagataacaataaaccaatcagctgtaaaaactatttaacacaattaattcgtgtgtacatggactatctgtaaagtaataaagtatatgaatatttgacatatatttctgtcgattttttttaaacaggtaagaattcgtgtttaatacatttttacaaaaagttccacgaaaatcaataaattgataagcaactgctgcgaggtaaacacgactttaaaggccaaccgaaaggtaaacaaaaaacatccttcatcaataacacctgtgcaaaaatattcgataattttggacttcggtaaataaaaataatcagctgcataaactaatatttaataaaatcaataagacgggtagataatcaaataaatatatgggtcattgtattaaaatgtggatcaaacttgacagctgcataaactaatttaaataaactcaatgatcagctgtaaaaatgccggaaaataattaaataaataaaacggttattgtattaaaaagtggattaacatatttacttatgtgtatattaaacccgttgaataaaaaatgattttgttactttcaagccagcaatttgaatattcttaaatgcctttttcaaaaatggggtataacattttattattttgaaaaggcgtaaatattttagtaaattaatcatcggtgaccatatgggggaaattaaaaaaaaacttctacttgatttttatattttattgccttatacaaaattccctctcaaatccattaaatgataagcgataatatttgacgatcatacatttatttagaaacagacatctttaagcttagacttgcagaacaagtcgcagcaattcggacgcgtaatggtgtagacattgatgtccaggcactccaggcggtttcgattgggcaatctgaacaaatctgcaagaaagtgtgattgtgaatggattgtgaatttcatcaaggatatgagtgtccgaacttacttagcttatttctcttgtcgcgcacttcattgatgtcgtcgatttcttcaggacatgtaagtacccagttgcagggcttgtcccactcggagcaggtgtagtcgcaaacgcattgatactgaagttttcccttgcaccggggattcgagttcgtgaccactgggcacaggttttgggagcactgggctgagaccagatcggtgacaacagcgaggagcagcaggctcagcagaatcttggcaaccatttcgaagacttctcagataaagtgccaggagggtcgagacttttatagtctatctcaggttaaggaggtctatttttgctttagcaattgtgtaaatatatggcgatatgtgggtataaaagcagtctgctttttggttgatcatttgagtgacctattaaccaacatgagagcaatacgagttctgctgattttccaactgctggcttgtctaatggccgtaatatcgggctgcaaccaggggtcctgccatccgttcattggcctgaacaagtgcaatggtaatggctataaggagcccaaacttccacctcgggataacgcctgctgcggtgcccattgcgtctacaatggtccaagttgtcaaaatcccggtccctgcgacagcaaacccgtgaatcgttgcatcctggactcacattgtggcaaaggcgtagccttctacttcgtatgcaagtcagattgtgaactgataaaggaaaatgaagctcgccaggcagctggatatgcccgtgagtatttgtataattttatgagttcgtttgcttacttatataacttatttttccatgtggttaggtcttctttcattttcgtggggcaagcagaaatgcgagggcatgaattacaaatgcggcatcaattgttgctgtcgtgagtattgtcctaaacggttttgtaaattttaatgcggtcaataaagggtattaaaaaaaattaaatcccttgtattcgaataaaaggaagcaagtaaagggatttgtgtgtcacattcaacttggcgctcaaattcaagtaacacacacatgcagtgttgtcaaatgagcaaggttccgaaatgtgtgttcagtcttggattctcccatgcaatcaacattagttgccaatttgccgagtcataccaacagcagtcgtggccgagcggttaaggcgtctgactagaaatcagattccctctgggagcgtaggttcgaatcctaccgactgcgagaaggtttac

SEQ ID NO: 38513 - DNA, 369 bp, DROSOPHILA
atggttgccaagattctgctgagcctgctgctcctcgctgttgtcaccgatctggtctcagcccagtgctcccaaaacctgtgcccagtggtcacgaactcgaatccccggtgcaagggaaaacttcagtatcaatgcgtttgcgactacacctgctccgagtgggacaagccctgcaactgggtacttacatgtcctgaagaaatcgacgacatcaatgaagtgcgcgacaagagaaataagctaaatttgttcagattgcccaatcgaaaccgcctggagtgcctggacatcaatgtctacaccattacgcgtccgaattgctgcgacttgttctgcaagtctaagcttaaagatgtctgtttctaa

SEQ ID NO: 38514 - protein, 122 aa, DROSOPHILA
MVAKILLSLLLLAVVTDLVSAQCSQNLCPVVTNSNPRCKGKLQYQCVCDYTCSEWDKPCNWVLTCPEEIDDINEVRDKRNKLNLFRLPNRNRLECLDINVYTITRPNCCDLFCKSKLKDVCF

SEQ ID NO: 38515 - DNA, 6350 bp, DROSOPHILA
tccctacatgaagtttcctataatcaaagcacaaatagataaattccgttctgtttagttaacctaattcttaccaattttccggaaaatgtttgctcattgataaccttgaaccaatccatacatcagtcgtgattttttgcgctctggcccccaacgcatctgcagtgatttaatgactgccattgacccttcgacccaactcctctacgcccttattgatgatccgcacatgtctatgggctgatgagtcgcaagtggccccaaagggataataaccctgaccataacctaacgcacacaatcgcacacacgcgaaatggccgacacgcagtgatttaagcttcattcctgccccggccacgcggcgtatgagtaatgtgctgcgattgaccgcaacgttgacttgttgacgccgcgcgacccattgagccataaaacgtcgcactttttcgcagttttgatattcgatttgccccctccactggggtgggtggtgctaaacgaaaccacgcctatatagaggtagtagaaattggaaaaccaatgtgggaactaaatgaaattgaagcttatgcggcccgagagatttgatcgatgcgcggaagtcctttgctcagtgaaacctgtgcacttggaaaaattagcttataagcaatactattttcgaatcaagtatttaacaattgttaaaagtggaacctgcactccaaacagaaccatatattttgtaatattaataactttctaaaatcaccaatttctctttgtgcaggcaacttctaatccctatcgtaattgacgtttgattggatctgcccggccatggaaacggccaacttgccacctgcccgccacgtgcccatgcattaaaaagtcagggcagttaagccgcaggtccgaccacccaccgcccaccagagctccccccctcccgaaaaggaacacacacagccccacacacatgaccgcgtcacgagcggcgaaacgaacgtgacacatggcgatgtacttttatgccagcaagatatcagccatcgcctgcggaacgcgttgcaagcagaccgtgctgcagaagtcgcggggtcagcgcgaccgggacaaatgccatcatggccaccaccagcaccaccggcgccaccaccgacgacggtgccgtattagcagtaacagcagcagcacggacagcgaatctgcggatgaatgcggcctggagttgggcgaatcgggagcggattcgagggaagccggagcaggcggtggagccggattacaggtagcccagggcggcatattctccctggatccgggtcatctgacggcggagacagcactcctgggtggcaatattcgctacaggagacgacacagcgccgagcagttgagtgcctacgatctagaaatggggtttcagcaattagaggtgagtgaaacttcctgaaaacgcattataagctgtctatgagtatgcaacaatatttttaagtccaaaagcatcagagattttcctcagaaagctgtagaaaacattgaaatgccattataaatatgtttgtccttgtggcttctgtggcacaaatatctgccaaaatgggaatgggaatgagtcaatattttgaataactcgaaatatttcattgattttggctttgtttgtctgacttgcagcttggcaccacaatatcggttgggccgaaaaacgaggatttggtccagtacgatgtgcccaaaaatccgcacaaacgcagccaatgtgatattaattttgaggtaagctgtgcggtaactaagagccactgtttgtccccatttaccaattcaaaaattcaaaattatcgcgccagcatttaattagctaagtaaattggttttatttcagtttccactgttgagcagcaaacatttttcattaaactcatatttgactgccgtcatatgtatgtgccatatgacattgttgtttgtttctcttttcacagagctcggttttgggctccggcggtattatgtacataaatggtagaatagtttccggaccactggactctctcatcgaaactctgctgcccaaggatgttgtggacttagataaggtgggtctacatatccgaacaggtatttcataaagctctttagctgcttaattaagcgcagcgaaatacgtaataatatattttaaaatatttatcggcgtaaatgctagaagtgaatcaatgtacccaatgcatatttcataaattccatcgtatgcaattaatatatattaagcttttcatttcaaatgtgctttcgcatttcatcatacaaataaagtgaacggcaaatgcaattttgctatccatatttcaactggtgaataacatgaattattttcattaaatatatacgaaaagttaaatattcaatttctcgaactgggtagcttattcgggcgttttgctcctttccccgccgtattgtacacgccaaatggaatacaaatcagttcttacttagtcgcagacacttaaagacttgaacgctggccaacttgcgtttgttggcacgagccaaaaaccacaaaccagagggcaaccgacaagccggcgagtccttttgccaggatcaaggaccccaggcccaaggggctaacgaaacaaggaccaaaagccagggaacaaggacattcttgtgtgtaagcacgaccattcagaggacacaggcagcaagtgcaaaaataattaattcgttgcaaacaaatccagagattagcgctaatttgatagggctgaatgtggaatgtggcctttggtcagggaaaacttctgagagctgaacaaacacaacaaaaacaccactaattgggggcatcttctagttgaggcaattctaagtgaaaataaacaaaacacacatgtataatgtatcagaaaacgaaaatgtgcatggtggttataaagttataacaaaacaacacatattcgaatacattattggatcctaggtagtgagtgatgaacctgagcagcactctactcttatattgtggcctacatctcttgattttccttttaaccttgttttctttctgcttatttgcaacttgcaggaatttgtattctcgtttttattatcctgccgcttgttcctgcgaccccacgaattgctgggcagactgctggactcggtacctgaaagcgaatgcttggagtccctggtgtccctgctggccgagtggacgatgaagttcccctacgactatcgggatgagcggatgatgagccatgtcaaacatatcgttgccaggtgaggagaaactgctttccaaatggcacccaatcatcaactcaagtcttctacacgattcccgccacacagatgttccaattcgcatttggaagccgctgtctcccaaacactgagtgccttactaaaacgattgactgatttagagagacatgaggcggacctacgagcctgccagaccaacgacaaggtgagtggatgtttggccagtgctgtcatcagtgaaaagcatgttccagaaaaatatctgaaagtttttaggtgcacatacttccttttaaaactgtattatgcttaaaaccatctcagacttaatttctgtaggctataatataaccctattgaaaatagcttggtttcccaggcaagctatccaagttgacagcactgaccggcctgaaagcaatctgcctaatctccggcaattgtcctgttctcccttctttttccattatgtctttctgtggcgattttccccgcagtctggaccagaaactccactcaactgtccaacggccacgcagtacgcacaaatcgtttgtcgggtggaaaagaaactggccaagcacattggtggcgaggagttcctccagtgcagcagcatgatcctcctcgataagcaggtgagcaccaagagaaaatcaagtagaagttctttaaaaacttgcttaaggaaggacaaaatatgtcttttaaatgatacatttctctactaattatgcaattaaaattataaatatgcacaccatttgcatttgtaaaaaaaatatatgggaagctggccatattttcgcctaaatgaacacccctcatctgaattaaattatattctcaagttaaatactcttctgatggccaatgttttcctctgcataagtcaacacaagaagaatctgcagttttgcataaattacaccgagcactctcgcacataaacaatcgcactctcacgcacacacacactcgcacaagcgccaggacctacaaggacatgcaattaaaatgacgacaagccgcttcattaacaatgcccctcgccattccactgcgcacctcatttcaacaaccattctgaatcctgtgccattttccattttttaatgcagaagaagtgggaccaaccatccacgtcgggcgctccgccaggagcccaggatccaaagaagacgtgcaacctggaaacctatctggattggtcggcacgtctgcgtctgtttgtctgcaacgagatcctgcaggtgagtggacgagctcataaccatttgggggtcagcacgaacactgctccgcactccgtactccaaccaactccggtgctgaagttaaacggagcgcatgagtccttagacccagtggattgaattaaaattcccatgcatgttgaatatgctgggagagcacgtccatccaagtgctgctccctacagccgcggtcgcaagaataggaatcacttaagctatctataagtgtgtgtcttacaaatagggatatcttctatctgaactcatcgcttacttctagttgacattgaacagtagctcatttatgggctagatattttaatatcgttcctattcttgtgaccgctgctgctcgaggtctgtatgcaaacagaacgactggtaagatggcttataatttatgccgttcgtaactgtctcattgacagtttgccagttggccgtgtaagcgactcgttaaaactttgcccaagtcacgtgggtcccggcatgtccaatgtccttttccctccctgcccttgtccttgctgctggcccctgccccttaacgtctaactaacttccgtaatcaaataaatctttcattttgcccgtgcccgctgcaacatcattgtttttgccaccgcttttccagagcgtcggcatcgagggacgcagtcgaaccgtagaactctggagcggagtggcccagtattgcctcctggtgggcaactacaatagtgccacggccattttggagtccctggaatcgccggccatagcgcggcttaaaattacggtgagtttgccaaataatatctatttaatttgtgcaatcctgtaattaatggcgacgaccgaaaaaatagggctgatatatatgcaatcatgtatcagcgagagataatgtctaatttatattggttttatttatcgcaaacaaaaactaatttgatgaacaatttattgctgcgggatataatttgttttctgtaattaaccagccgctggggataacattcaaaaggaattgatacaatttggttcgatcgaattatcctgatgacggaaatgactagtttttaaatcaatttaaatagaaatttaaaaataaattgatagcacaaacaaaacgttcatttaacgatactaaaatttttaatgttacaaaatcacagacattctttaactttcgcagaagaaagttaaactttattttctccaattccgaatttaactatagcgaatatcacgtagtacgtgctgcttcataaatttcagaaataagcactcgaaattaaatagacagcagttttataggcaaattacgtggcaaggcggcgaaatgggttcctggttcataatttcccatggcaaagtgcgcagtgaaactttaattggactgaaacaacacaacggcgttctttgcataatgtgatgcgtaaaccaaatggaaaatcatttggcccccgacatcaattcctgcctgacattttcgcatgacgtacagccaacattcgaggagcaaatttccataaactcggggatctgaaacttaagcttagctaaagttagtcggtacagtcaaggaaacgagcaaggataataaaattgtgccctttgccatgtgagagtgcgactggatccttacactcgtatatgcactgtaattgtacgctgttaaaagttagaaagcagcgccttggggccattttcattcatggattgagctaaaagcgctgcagtctatttggtcgatggcacaaatacactattttttattaaattaagatcttcaaagctgctaagctattcgcagtaaggtagtaatttgagatattcac

SEQ ID NO: 38516 - DNA, 1416 bp, DROSOPHILA
atggcgatgtacttttatgccagcaagatatcagccatcgcctgcggaacgcgttgcaagcagaccgtgctgcagaagtcgcggggtcagcgcgaccgggacaaatgccatcatggccaccaccagcaccaccggcgccaccaccgacgacggtgccgtattagcagtaacagcagcagcacggacagcgaatctgcggatgaatgcggcctggagttgggcgaatcgggagcggattcgagggaagccggagcaggcggtggagccggattacaggtagcccagggcggcatattctccctggatccgggtcatctgacggcggagacagcactcctgggtggcaatattcgctacaggagacgacacagcgccgagcagttgagtgcctacgatctagaaatggggtttcagcaattagagcttggcaccacaatatcggttgggccgaaaaacgaggatttggtccagtacgatgtgcccaaaaatccgcacaaacgcagccaatgtgatattaattttgagagctcggttttgggctccggcggtattatgtacataaatggtagaatagtttccggaccactggactctctcatcgaaactctgctgcccaaggatgttgtggacttagataaggaatttgtattctcgtttttattatcctgccgcttgttcctgcgaccccacgaattgctgggcagactgctggactcggtacctgaaagcgaatgcttggagtccctggtgtccctgctggccgagtggacgatgaagttcccctacgactatcgggatgagcggatgatgagccatgtcaaacatatcgttgccagatgttccaattcgcatttggaagccgctgtctcccaaacactgagtgccttactaaaacgattgactgatttagagagacatgaggcggacctacgagcctgccagaccaacgacaagtctggaccagaaactccactcaactgtccaacggccacgcagtacgcacaaatcgtttgtcgggtggaaaagaaactggccaagcacattggtggcgaggagttcctccagtgcagcagcatgatcctcctcgataagcagaagaagtgggaccaaccatccacgtcgggcgctccgccaggagcccaggatccaaagaagacgtgcaacctggaaacctatctggattggtcggcacgtctgcgtctgtttgtctgcaacgagatcctgcagagcgtcggcatcgagggacgcagtcgaaccgtagaactctggagcggagtggcccagtattgcctcctggtgggcaactacaatagtgccacggccattttggagtccctggaatcgccggccatagcgcggcttaaaattacggtgagtttgccaaataatatctatttaatttgtgcaatcctgtaa

SEQ ID NO: 38517 - protein, 471 aa, DROSOPHILA
MAMYFYASKISAIACGTRCKQTVLQKSRGQRDRDKCHHGHHQHHRRHHRRRCRISSNSSSTDSESADECGLELGESGADSREAGAGGGAGLQVAQGGIFSLDPGHLTAETALLGGNIRYRRRHSAEQLSAYDLEMGFQQLELGTTISVGPKNEDLVQYDVPKNPHKRSQCDINFESSVLGSGGIMYINGRIVSGPLDSLIETLLPKDVVDLDKEFVFSFLLSCRLFLRPHELLGRLLDSVPESECLESLVSLLAEWTMKFPYDYRDERMMSHVKHIVARCSNSHLEAAVSQTLSALLKRLTDLERHEADLRACQTNDKSGPETPLNCPTATQYAQIVCRVEKKLAKHIGGEEFLQCSSMILLDKQKKWDQPSTSGAPPGAQDPKKTCNLETYLDWSARLRLFVCNEILQSVGIEGRSRTVELWSGVAQYCLLVGNYNSATAILESLESPAIARLKITVSLPNNIYLICAIL

SEQ ID NO: 38518 - DNA, 4429 bp, DROSOPHILA
aagtcggccactatcaggggttgttgacaaatcaaagtccatactaaatcattagggcaataaaatggaaccagtcaatcgattcttatctacacgaaatgcagtgcgttatcatggccgttatttccaaaaatcatggcaatgttatatgtattttctcaatttgtattttcccctttgtgggcaagctgaatttatttgtttatgttgcatgtttgcgcattgcattctgctctatgatcaaacattttctgttagtatttttgtaaaagtcatttaaattccattgcaattgtcagcaaataagcaacaagctcgggcttcattttattttgaccctggtcaggtcaaatcgaaactcacatacatatgttttctcccattgtaaactaattcatctcagcaatgtgttgaaattacctttgcgagctgttcttttttgcggcagaaaagtgttgccacgtgtgtgtttgcatataataacagtgtcaccccgccgtgtttgcttatcgtaatagtgttgctcttttctacattgagtgatgccttaaaagcgcgcgtgttttgttatttgaacgattaaatggtgtttggagtgcaaataggtgcgcgtaggtcagggaatctgctgcagaatccagggaacattaactacaactgaatcgtcacaactgaatcttctcaactgaagcgaatcaacacatcgtgaacttgggatacaaacagaagggcgaacagacgccaagcgaatccggaagatttactgatgtgtgccgagtattacggagcaacagctctgggcagcgggcaccacccacctagacaagcggtatgacggatcccgtaatctgcggctgcctgcggactcccaaactgcgtaatcgttggcagattcttagatgaaatagtagatgtttacccatagatttagatatggattcggtataaagggggcatcgccgcctatttcacaagccattttcgtagtaaagctactccgttgaagtcaacgcggaacaaccaaggatacagagcatggaaaaaggacatttgagcaggaagtttacacgcaagtgctttaaggcaacctaggaccatctttacacccaggctctccaactgtgatatacgagattgaaggatttagccgtagacgttataagtcatagaataattaaattaaatcgcacggactaccgccagaatgctgatcagcatattcaaatcgggcatcttccagtggcagtaccgccgccaactgctggtctctttgagtggtatgttaatgaagataatacggatttacagctcaactgggaagtgaaaagttttgaatccatatccatgtcaggttgtggacaaagaacttttctcaaatgcgatttgcagcggccatggcaaccaagtttccccaaagtcgacacaaagttgacgggtgaaaattaagtttccaatttcacgtgtgtgcctatgcaaatgaggcacttgagctgtcgattcgccctccagagatgatgatgtcatgtgctgatctgaatgttcttgtagccactctgataaccttctgccatggcatcgccctgggctggttgtcgcccatgctgccaaagctgctctccccacaggagacgccactctccttttacattgacgtgaacgaggcctcctggctgggagcagtcattagcatcggtggcataagcggaaacttctcgttttcctatctgatgaaccgctttggccgaaaagtgtcgatttacgccctcgcagtgccgcacacggtgagttttcgcgaactttttcgatggtaactggcatctcatgtgattctccctcccttgcatacccaagtgcatttggttcctgttctatttcgcccagagcatcgagtggctctatgtggccagggtgtttgccggcctaactggcggcggcatgtttgtcgtcttacccatcttcattggcgaaatcgccgacaataggtgagtgaaagtgaaaatattgcatttgcgttagaaaagtgtcattaaaaggaggaatttttaaaagatatccgttgcagaggcagacaattgagttctgatttttttttactataccaaaacctttgttccttgtctctgcaacatgtcgtatacggaatttcatataagccagtttttgtatgcatcgccattgtccttggataatggatcttttttataatactcgtaccatgacatgacaggtgaaaatattaattttaacataacaactggcttttaccaagttctattttaacatttttgacgaccaaaaaagtaaacttcagctaaacacctttgggtttgtgtggcttcaaagggaatatatctaaattaaatttcgacagataatagttttttttcacaaaacccaccagcattcgaggtcgcctgtgctccttttttacgctcaccatgaacacgggcataatggtgggctttgtggtgtcctcgcacatcgcctatcacgtgataccctgtgccgtcgttggactgcccgtgctgtacgtgctcctggccacgcgatacccggagccaccgcagcagttaatcaggtggaagcgcgaggaggaggccgagaagtcactaaggtactatcgccgctgcgacggacccaatgtttccaaggaggaggagcgagcttatcagaaacacttcgacgaaatgcggctggccatccaacagcaaaacaacgacactgacgacaatggcctctcaatgtccgatttccgtaagaggttttccgaaaaacactcgaatgcatacttagatccacatccttgcagtcaccaagcgctccttgaaagccctggccacgggattagttttgatggtagccaacatcttcacgggcaccttcgccttcaacaactacatgtccaacatctttgatgccgtgcacactcagctggatccgaatacgaacaccattattattggagcagtgcagatcctgggcacgctggccagcatatacttggtggatcgctatgggcgcaagatcctgctgatagtgtcctgtgcaggcagtggcatcggaacttccgcctttggactgtacgccttctatgcggaggagcagaaggtggacctatcggccttctccgcctggctgcccgtcaccctaatggccttcatcatcttcattgccaacgtgggcgttatctcggtgacgatggtggttttggtggagatcctgccgcagaagatccgcgcggtggccaccagcttctgcctgggctgcctcagtttcttcgccttcgcctcgctgaagacttttccactgatgatgtttcacctgggtctggcggctaccatgtggttctgtgccgccgtcagcgtcatttgtctgttctatgtggtggtctgcctggaggagaccaagggtcgctccatgtatgactaattacgcgcggaataaagttcagatagtatggaagtggagcgtgtttttctctggtctgggagggtattaaaccaaaacaaagcaccggctggaaacagaagccgcgggaggagcacccaataaaatagcgcagcagacagggcttgatttatgacccccacactagccacctgtcaacaggctcgttggcggttttattcaccagcactcgacataatcccctccagcgtcggatgaatgggacatgtgcaagtgctatggaaatctttggaattttaaaagctcttccagctacatgacaaaatttgaaaggcggttaagttatttatttaatttgctccgtatcctttaaacaagcgtcactatcaattaaggagcttaactcgaagagaaaacatagttctcagtaagctgaaatatcatttagaacttaagtgaactcaatgtgtttttttagtctactattttcccaaattactttcaaatccatgttatcttggagtaggtcgttgcttttcaatattaagaagaggcataaatatcaagaacctgccaaatcaccacgattgcgattgtctaccgatggttatttatgattgtaaaaaaagaaacgaagggggaaataattcacagatattgcggggatgggatcaaagtatatatttaagttctatcaacatgactctttataattgatgaataaatatttattaaatattttattaaatattttccaatgatacgcatcgcttaactatggaaatggctttctttgatgtattgaatttaagctttaaattagcagagttgtaagccccctaattattttacaaaagtccagcaaatattgtgaaatgtatacaatcgagaaaatcgatattagttgaaacccatctggaaatggaggtggcggtcaacttgtaaagttttccaattgtccggtcccttaaatgtcatttgcccagcgaaaagaggtttacatatcgctgtttatggacaa

SEQ ID NO: 38519 - DNA, 1623 bp, DROSOPHILA
ttgaagtcaacgcggaacaaccaaggatacagagcatggaaaaaggacatttgagcaggaagtttacacgcaagtgctttaaggcaacctaggaccatctttacacccaggctctccaactgtgatatacgagattgaaggatttagccgtagacgttataagtcatagaataattaaattaaatcgcacggactaccgccagaatgctgatcagcatattcaaatcgggcatcttccagtggcagtaccgccgccaactgctggtctctttgagtgagatgatgatgtcatgtgctgatctgaatgttcttgtagccactctgataaccttctgccatggcatcgccctgggctggttgtcgcccatgctgccaaagctgctctccccacaggagacgccactctccttttacattgacgtgaacgaggcctcctggctgggagcagtcattagcatcggtggcataagcggaaacttctcgttttcctatctgatgaaccgctttggccgaaaagtgtcgatttacgccctcgcagtgccgcacacgagcatcgagtggctctatgtggccagggtgtttgccggcctaactggcggcggcatgtttgtcgtcttacccatcttcattggcgaaatcgccgacaatagcattcgaggtcgcctgtgctccttttttacgctcaccatgaacacgggcataatggtgggctttgtggtgtcctcgcacatcgcctatcacgtgataccctgtgccgtcgttggactgcccgtgctgtacgtgctcctggccacgcgatacccggagccaccgcagcagttaatcaggtggaagcgcgaggaggaggccgagaagtcactaaggtactatcgccgctgcgacggacccaatgtttccaaggaggaggagcgagcttatcagaaacacttcgacgaaatgcggctggccatccaacagcaaaacaacgacactgacgacaatggcctctcaatgtccgatttcctcaccaagcgctccttgaaagccctggccacgggattagttttgatggtagccaacatcttcacgggcaccttcgccttcaacaactacatgtccaacatctttgatgccgtgcacactcagctggatccgaatacgaacaccattattattggagcagtgcagatcctgggcacgctggccagcatatacttggtggatcgctatgggcgcaagatcctgctgatagtgtcctgtgcaggcagtggcatcggaacttccgcctttggactgtacgccttctatgcggaggagcagaaggtggacctatcggccttctccgcctggctgcccgtcaccctaatggccttcatcatcttcattgccaacgtgggcgttatctcggtgacgatggtggttttggtggagatcctgccgcagaagatccgcgcggtggccaccagcttctgcctgggctgcctcagtttcttcgccttcgcctcgctgaagacttttccactgatgatgtttcacctgggtctggcggctaccatgtggttctgtgccgccgtcagcgtcatttgtctgttctatgtggtggtctgcctggaggagaccaagggtcgctccatgtatgactaa

SEQ ID NO: 38520 - protein, 472 aa, DROSOPHILA
MLISIFKSGIFQWQYRRQLLVSLSEMMMSCADLNVLVATLITFCHGIALGWLSPMLPKLLSPQETPLSFYIDVNEASWLGAVISIGGISGNFSFSYLMNRFGRKVSIYALAVPHTSIEWLYVARVFAGLTGGGMFVVLPIFIGEIADNSIRGRLCSFFTLTMNTGIMVGFVVSSHIAYHVIPCAVVGLPVLYVLLATRYPEPPQQLIRWKREEEAEKSLRYYRRCDGPNVSKEEERAYQKHFDEMRLAIQQQNNDTDDNGLSMSDFLTKRSLKALATGLVLMVANIFTGTFAFNNYMSNIFDAVHTQLDPNTNTIIIGAVQILGTLASIYLVDRYGRKILLIVSCAGSGIGTSAFGLYAFYAEEQKVDLSAFSAWLPVTLMAFIIFIANVGVISVTMVVLVEILPQKIRAVATSFCLGCLSFFAFASLKTFPLMMFHLGLAATMWFCAAVSVICLFYVVVCLEETKGRSMYD

SEQ ID NO: 38521 - DNA, 7259 bp, DROSOPHILA
ttatctgccttacggtctttggccatatacatttaccccaaggggggaataacttgtgataaaacttacggtcagtgggcttcgcctgcgattatgtggagaagtctgaagaggtagcattcggtacacgtgtaactactgaagacagcgaggaagttcatttcatgtcaactcatccgagttgagcccctgtctcatgctttgtgtacaatctaatcaaagttatactccaggccaataaaagaggatgagtttaccacttgttgctcctcatatttaaatatgtctctatttgcattgggtgcattgagggaatttgggaatttcacggcgccaatctcaccgaaacacgcatcattcttgcgtggaaatgatcccatttaattcgcagcagcctctaatccaaatttacgcgtttacggacgaccaagctggcccaaaatgttaaatgcgcgacttttgtttgcgctgggtatctcgactagccaaatattagccacgattaggccgcacgagtaatttacaatggtggctctctcttctcgcctctgattagtagacattttattgagagggagagaatgtgacagtcctcccattgaacgcatatcaaatcaggaaaaagcaaacaaaagctgtaaaaaccattgtaatcgtcagagggttagcaacaacaaatttgcactgacaccccgggctgtaattaactagatttgtgacactgcatgtggtggactcgcttttgctctcatttggccggagcataatgaggcggcgataacggtctataatctacgccactcgtagccgttgttcagcagagctcgtttacgatctagtgcactatataaatattatcatccagccactggtttcgcttagttaaacgcgaacacctacggatatttgacggccgggtccggttgaaaatcagcctaaacggaggacttgtcgtgctatgaactaccgataataggatttaatttaaatattccgcaaaatgagttccaccggcggtgacaaataccaatatctagctgcaatcagtggttagtagacggttaaccacaaccgcaaattttagtgaaaaccatgtttaatgcgaatttattgtgtgccaatgaaacgtggtgcaaatatatgacctaatgagtgcagaaggttaattaaaatgctgtctgcaaaaattaaagcttttaaattgtttcaaaatttaagaaatccacttgaaataatcttttttttgaaatacataatcccctttaaccaatcgcatgcacagtaaacatcatttcgatttcgtatggcgctttttgcggatggccatcgtccagtttcctggaattgtcatcagaaaatagtcctttggatacgggtcctttgacgccaacggatcagggatgggtggcgtcgaatatatgcctgggaggcctggtgggcacctttctgtttacctggctggcggacagaatcggcaggaaattgtgtctcatgtggatggcgctgcccaatttggtaattggtaattgaaatatttcacggacttaattaaattactatgtatttacagctaggctgggtgataataccgttcgcgcgcactcccatgcatttaattatcgctagatttattggtggagccgctggcggtggatgtttcacagtgattcccatttatatagccgagttagcctcggacaagtaggttcctcaccagaatttaaacagtagcaaattgaaatccatttttgcagtattcgcggcattttgggcgtctttttggtgctgacctgcaatttcggtctcgtgctggccttcgtccttggctactacttcaactatgcccaagtgtcctggattgtgtcctcgctgtcctttgtgttcgtcggctgtttctggttcatgccggaaacaccgcagcacctggccaagataaacaagattgaggaggcggagcattcgctgcgctactaccggaacatcaagtctaatccggccaaggaactcagcgaggagctgcaactggagcttcagaagttaaagaccaccgagaagaccactgcggatggagttgatgacgatgacgcggccaccggcgtaacttggtccgacttcggtgagatcatagtgaatgctaatggcatcgaactttaactggaaactcgaaagttttaaacaggacgtagtttaactcgaatttatgctgccctaagccatcacactgactagccaattcaaaattgttcacttcaaaagggaccttaaacacccagtttgttcaacgctgcgaattcaaaatttcatttggttagtttgtgaaaacaaaccacatagatcgatataatgaggtttcagctcgatgcatttggatatttgaaccaaaatgtaatgaacttattcaaataagttggcaaatgagctattcatgactatgtagatgactttggactgggagttatttgacttctgtgcaccatatctctaatgtatctaacttcttaatttcctgaaccagctgagggcaagactcgaaaggcattcctaatcggactcggactgataagcttcaatcagctgtgcggatgcttcgccatgctgaactatacggccgtaattttcgagcaagctggctccagccttccgcccacagtggccgccatcatagtgggtgtcatccaactaatgggcacctatgcatccaccgttttggtggagcgactgggccgtaagatcctgctcctggtctctgcggtgggaatcggattgggccagagtgcgatgggcacgtatagctacttccagatgctcggatgcccagtggcatcgttcagctgggtgcccatcgctgggttctccttcatgctgttcctggctgcagtcggactgctctccctgccattcctggtggtatcggaaataatgccgcagaagataaggagcacggccatcatgattctaatgtcgacactctggttaatttccacctgcgccgtaaaggtaggatatgcgtaaatattcgagttaaaaaaaaaaaaaataatctaatgaatttcttccataacagttgatgccggttttcactgaatccctaggaatgcacggaaccgtcttcatgtttgccagcttatccttcctagcagcaattttcatcgctattttcgtgcccgaaaccaagggcaagtcagttgatgccatcttggccagtctctagtacctatgacttatatttaaaccaattgttattgctgttaataaatccgctaagaagcgcacatctccatcgttctttatgtgtacacccgtgatcataaacaaaagcacagttgacatgattgttatatggaaatataactactacaatcggttgtctattcagcgctaccttgatcttccgcagctgtcgccacacaaaagatcgtttcagccaggcaaaatctttgattagataagttcgctgactataaggaacatcttctctgtagaagagcttttcccccagggcttttgcctgaaaactaaaagttatctcataaatattaaataattgatatacaaataacagactacattttaatggcctaaatgcactactaataatcggtttgtttcatacaaaatatggtatgtattataaatgaaataaaagctcgaataggtggttgcttagactaaggaattttaagagcaaaaacatgactagaatatgtagtctgcttctgggatcagcttttcatgtggattcgaatttcgagcttcattatcttttctttgacttgctaacttactaaaattatgacttatgagatgttttccctgtaaaattgtttcataatggaaaaatgtagctggcccgcttaggaatagtccttaaggcaaacggattttgaacaatgataattctgtttccatcaaaaaataggtatgcacttcgtgtgtgcgaactgcgcctttgcgaaaaaatagtaaataaaactgagcaaagaaatggaaattttgaaatcgattccttccaggacgaactagtgcgttcagctatttgcctttttttgcctaagatgcgcagcagaagctcttttatcggcttatccttttgttgcaagattcactttgtttctaccgctttcggccaaatctactaaattttttgttgagtctggatcaacatcgtaaacgttgcagcttaaggcttaagtcgagacagacaggcccccttttttgtggtctcatctccggaatggtagagtggcaaataattgtttgtcttgtgaaatatctgctgtatgcatacgggaagataatttcaactaacttaatccgtttggcgagtaacaacaggtggtcgcggctttcgccacctatctttacaatgtaatttgtgacgttgaggtgggtttgccaattcagaaaacaccacaaagctgtatagacagcgatctcttatattgcggatataaagtttatgaaggggtccaattcgacggagctttggtctctgctgggatttaagaaatacacgctatcgcatttgtggcgcaactctggagtgagcttgacatacaaacggctagaatggccacgtttttaaagaactccctgctgcagcagaaaacccgctatcagctcttggccacggttataggtgaggctccccccccccccattttttccccaccacaattgcggttcataatgattcttgttggcagttaacattattacattcggacatggagtgggtgtgggttggctctcgccgactctgaccaaaatccaaacggccgattcgccactggactttgaagtgaatctcgcccagatttcctggctgggctcgatgctgggactggacagcctgtgcggtaacctgaccatagccatgctgattgagagagcaggcaggaagttctgcctttacctcatggccgggccatatgcggtgggtaaatacgccaaattggtcgttagttgattaatggagtatccaacattctagtgtatctggattttgatctactgcgcgtccaatgtgtactacctgtacgcagcgagattcctgtgttgatttaccggcggagctggatacttggtggttccgattttcattagcgaagtagccgatagcaagtgagtttatacgccaggcaaccaccaatctaatctaagccgtcgagtttccagcattcgaggggctctgacttcgatggtgatgctatccgtcgatttgggaatactggctggctacattctaagcacttatctggcctatcatgtcgtacccttcttggccattatcttgcccgttgcctactttatagccaatataatgttgcccgaaacagctccgtatctgctaaagaagagccagctggctgctgcagagaactcgttcagatactataggaatcagcggagtgcaatttgcgagcaaacctcaaaggtcaacttcgaggagctacgcacagcggttttgtcccagcagacgaggaatgccacaccactcagttacaaggacctcagtgagtgagattataacagcgaatggaacccattatgtcccattaccacattgcagcgaccaagcccgctctgaaaggatttgccgcctccattgtcctaagcttgggctaccagttcagtggggttttcagcttcatcaactatatgtccgacatattcaaagcatccggctcggttgtggacgttaatacggccaccattatcataggattagtccagatcgttggcgtctacacctcgaccatactggtggacatcgtgggcaggagggttctgatgttgatctccactatgggagtgggaataggctgcattgccttcggttgcttcacctacttggccaaaatctatgatctcagcgattttaattggcttcctttggtgctgatgattatcatttgttatgtggccaatattggactgattggaatctttttcctcgtgctggtggaactgtttccagtaaaggtacgtttaaagatacaatatataaaatgggtatcagattcagatactttatctgtgtatttcataatcgcagattcgctccctagccacctcactgtctgtgatttttttgagtttactcgtctttggaaccctgaagctgtttcccctgatgctgcactactggggcatatcctttaccatgtggttctctgctgcctctgcactacttacgttcttctacttctggctcttcctgcaggaaaccaaaggaaagtctatgattgaggattagcaagtagctgaatttcacttgaaggctttaacacctttaaaaccaactgcaaagtcacatgattgatttggttaatgcaggtggtttattttataattgattaccacaacatgtgcaatttttgcatttatttgtataatctaatataaattgtaataaataaatttaaaaagaatatgttatattggattcgttttttagtatttgtaaactctgcgcaaaaaataacgtgtaatatgcacgaatcaaaaaaatacacaattctggtttaaaatatacattggtttgtatattaagtttgaattaagtcattttaagcgttgtgtaaacgataaaggtgctgcttgttttgttaatgtcattatttataaacatgatggtccactgttaatgatatctggcacgttctcaggtggtttcctcctccgcagggattcatatgatatgtaagatatattcaagtgttacaatacaactaaaaatatattcaactaacaaaaatttctcttgaaaagagagaaaatgtgtaggcttatgactgtctttatttatgtagacactccgggattatccgactagacagtgttattttcattcagacatcaaattaagaactttttttaatcagtgaatatcaaaaccttttgtaactgctcgtatgaatcctggataagatccttggtgagcaggggaagtaaattgtattagccatgtttggttatgtttgatgctgcctttacttacatggcaagataagttaaaagataagtgtcaactatttcatcacggaattcgacgtaatctaagatgatttgatgcacgacttacttcgttccgtgttccgtgttaagtatatgtgattgtagactttttaccttcatgtctctgctgacagttggccctggagtccttatgggtaacccagtctcctatagctaccactggaagccaccgactatttttacctttccggtctgttacattattgagtttcctgttt

SEQ ID NO: 38522 - DNA, 2478 bp, DROSOPHILA
atgagttccaccggcggtgacaaataccaatatctagctgcaatcagtgaaaatagtcctttggatacgggtcctttgacgccaacggatcagggatgggtggcgtcgaatatatgcctgggaggcctggtgggcacctttctgtttacctggctggcggacagaatcggcaggaaattgtgtctcatgtggatggcgctgcccaatttgctaggctgggtgataataccgttcgcgcgcactcccatgcatttaattatcgctagatttattggtggagccgctggcggtggatgtttcacagtgattcccatttatatagccgagttagcctcggacaatattcgcggcattttgggcgtctttttggtgctgacctgcaatttcggtctcgtgctggccttcgtccttggctactacttcaactatgcccaagtgtcctggattgtgtcctcgctgtcctttgtgttcgtcggctgtttctggttcatgccggaaacaccgcagcacctggccaagataaacaagattgaggaggcggagcattcgctgcgctactaccggaacatcaagtctaatccggccaaggaactcagcgaggagctgcaactggagcttcagaagttaaagaccaccgagaagaccactgcggatggagttgatgacgatgacgcggccaccggcgtaacttggtccgacttcgctgagggcaagactcgaaaggcattcctaatcggactcggactgataagcttcaatcagctgtgcggatgcttcgccatgctgaactatacggccgtaattttcgagcaagctggctccagccttccgcccacagtggccgccatcatagtgggtgtcatccaactaatgggcacctatgcatccaccgttttggtggagcgactgggccgtaagatcctgctcctggtctctgcggtgggaatcggattgggccagagtgcgatgggcacgtatagctacttccagatgctcggatgcccagtggcatcgttcagctgggtgcccatcgctgggttctccttcatgctgttcctggctgcagtcggactgctctccctgccattcctggtggtatcggaaataatgccgcagaagataaggagcacggccatcatgattctaatgtcgacactctggttaatttccacctgcgccgtaaagaactccctgctgcagcagaaaacccgctatcagctcttggccacggttatagttaacattattacattcggacatggagtgggtgtgggttggctctcgccgactctgaccaaaatccaaacggccgattcgccactggactttgaagtgaatctcgcccagatttcctggctgggctcgatgctgggactggacagcctgtgcggtaacctgaccatagccatgctgattgagagagcaggcaggaagttctgcctttacctcatggccgggccatatgcgtgtatctggattttgatctactgcgcgtccaatgtgtactacctccgtcgagtttccagcattcgaggggctctgacttcgatggtgatgctatccgtcgatttgggaatactggctggctacattctaagcacttatctggcctatcatgtcgtacccttcttggccattatcttgcccgttgcctactttatagccaatataatgttgcccgaaacagctccgtatctgctaaagaagagccagctggctgctgcagagaactcgttcagatactataggaatcagcggagtgcaatttgcgagcaaacctcaaaggtcaacttcgaggagctacgcacagcggttttgtcccagcagacgaggaatgccacaccactcagttacaaggacctcacgaccaagcccgctctgaaaggatttgccgcctccattgtcctaagcttgggctaccagttcagtggggttttcagcttcatcaactatatgtccgacatattcaaagcatccggctcggttgtggacgttaatacggccaccattatcataggattagtccagatcgttggcgtctacacctcgaccatactggtggacatcgtgggcaggagggttctgatgttgatctccactatgggagtgggaataggctgcattgccttcggttgcttcacctacttggccaaaatctatgatctcagcgattttaattggcttcctttggtgctgatgattatcatttgttatgtggccaatattggactgattggaatctttttcctcgtgctggtggaactgtttccagtaaagattcgctccctagccacctcactgtctgtgatttttttgagtttactcgtctttggaaccctgaagctgtttcccctgatgctgcactactggggcatatcctttaccatgtggttctctgctgcctctgcactacttacgttcttctacttctggctcttcctgcaggaaaccaaaggaaagtctatgattgaggattag

SEQ ID NO: 38523 - protein, 825 aa, DROSOPHILA
MSSTGGDKYQYLAAISENSPLDTGPLTPTDQGWVASNICLGGLVGTFLFTWLADRIGRKLCLMWMALPNLLGWVIIPFARTPMHLIIARFIGGAAGGGCFTVIPIYIAELASDNIRGILGVFLVLTCNFGLVLAFVLGYYFNYAQVSWIVSSLSFVFVGCFWFMPETPQHLAKINKIEEAEHSLRYYRNIKSNPAKELSEELQLELQKLKTTEKTTADGVDDDDAATGVTWSDFAEGKTRKAFLIGLGLISFNQLCGCFAMLNYTAVIFEQAGSSLPPTVAAIIVGVIQLMGTYASTVLVERLGRKILLLVSAVGIGLGQSAMGTYSYFQMLGCPVASFSWVPIAGFSFMLFLAAVGLLSLPFLVVSEIMPQKIRSTAIMILMSTLWLISTCAVKNSLLQQKTRYQLLATVIVNIITFGHGVGVGWLSPTLTKIQTADSPLDFEVNLAQISWLGSMLGLDSLCGNLTIAMLIERAGRKFCLYLMAGPYACIWILIYCASNVYYLRRVSSIRGALTSMVMLSVDLGILAGYILSTYLAYHVVPFLAIILPVAYFIANIMLPETAPYLLKKSQLAAAENSFRYYRNQRSAICEQTSKVNFEELRTAVLSQQTRNATPLSYKDLTTKPALKGFAASIVLSLGYQFSGVFSFINYMSDIFKASGSVVDVNTATIIIGLVQIVGVYTSTILVDIVGRRVLMLISTMGVGIGCIAFGCFTYLAKIYDLSDFNWLPLVLMIIICYVANIGLIGIFFLVLVELFPVKIRSLATSLSVIFLSLLVFGTLKLFPLMLHYWGISFTMWFSAASALLTFFYFWLFLQETKGKSMIED

SEQ ID NO: 38524 - DNA, 3813 bp, DROSOPHILA
agaaggccaagtccttcgactacagagatttcagtgagtagataaggcatcccattttatatatcaatttcactaatttccataatccttagtaaccagacctgcatttaaggcctacgcttctgccgctgtcctgcttattagcaatcaattcagtgccagtttttgtgtgaccacctacttggcggacgtctttgccgcatcccacacaactctgaatctgggcatgtgcaccatcatcatcggagtgctccagatcgtgggcaactacgtgaccactctgttgtgcgataagtacggaaggaggatactcatgctgacctccaccttgggagcctccgtttgcctaactgccttcggcaccttcaccttcttcgccgaggcggctgatctctcttcggttgactggttaccccttgtgatcttgtcctgcttcgtattcctctgcaacatcggcttggtgggatgcctattcgttgtgctcgtcgagctctttccggccaaggtaagtttggattactgtccccaaaaatgtaccctaaatataccgctatcgtttattttttctagattcgatctgtgagcgtctccacctttgtggtgatcctaagcagtacagtatttctcacactgaaaatctttcccatctgtatggctgtttggggcacctcggttaccatgtggagctgtagcggaattacgtttttctcgtttctctacttctgcttttttctggaggagaccaacggaaaatcgctactggcggcttagtttgtttactggaaagataatgggttatcacacttgtagcacctgtccgattagcctaagtcagtagttatctttacggtcagaggataccagccggatacttaagccgactcctcagcggaaaacccttttagtggtcagagatacgtggccagaggtagactgaataaagatcggggtggtattcttattcatatgtgaagtgaacaatcgaatttacgggtacataatgctgatgcgcttatttcaaaggccgaactgcctgcttaatcgcaggaatcgatatcagctgctaaccacgctgctgagtaagtattccattctcaccataaaggactcacattgaatgacatttatttcggactatatccagttaatgtcatatccatttcacacggcatcggtatcggatggctatcccccacgctgaggaaacttcagtccgactcacccgcgggtttcgaggtgaagtccgagttcgagatctcctgggtgggctccatgctgggcatgggctcggtgactggcaatatactgattgggtgcctgctggggcgcctgggcagcaaaaggtgtctgctgttaattgccataccacattcggtaatttgtcaaaatcgaacaaagggtattgcaaatgctgataatgtgtgtgcttttagtgcttttggatcctggtctactttgcccagagtgtggagtacctgtacgtgggaagactgttggctggcatctgtggcggcggcatgtacattgttcatcccattttactcagtgaaatcgcagatgccaagtaagtggataatttatggctgtcgcaaggggattttcacgatagctcgctggcaagagattagaatgaacctgaacgttacgacaggaaaagagctgaaatgtttatcacatgttagttatcacttactcatagcatcataaatcggtttactttcccccacagcatcagaggaaccttctctgccatggttatgctatcggtcaatgtgggaatcctggtgggctatatcatcggcacccacttgccgtactactcaattccgcttatggtgttgatattgcccctgtggtacttaatttccgtgttgctattcattaaggaatcacccatgcatctcataaggattggcaaatactcggccgccgagaggtcgttccgctactataagaacatcaaggactctgataacattcacgatcagaatagagccatggaggagtttgagatcatgaagatagccctgaccaagggtgatgccctccaggatgccgtcactttcaaggacttttgtaagtttataactatcatattatagctttactataatgtttattattctgcaagactctcgacctgctctgaaggcctatggacctgctctggtgcttttaattgccaatcagtttagcggacttttcaccatggtcaactacatgtcggacatattcgccaactctggcagcacaatggaccccgatacgtgcaccatcatcattggagccgtccaaatcctgggcacctatgtgaccactttgttgtgcgacatctgcggacgaaagctactcatgcttgtctccacgggcggagtggccattagcctgacggccttcggattctttaccaaatatgccgagagtcacaatatcggtgagtacagctggatacccctgctactcatgtccatggacatctttctgggcaacatcgggctggtgggatgcttctttgtcagccttgtggaaatgttccccgtcaaggtacgttccaaagccaaaaggtttaaaaattatatactaacgattcattgcaatcgtatttgttgtagattcgtgccaaggccgcctcaatggcaattgtggtttgcagcatctttgtgttcctaatgctgaacatattcccgatctgcatgaagcagtggggcatttcggccaccatgtggtcgtgtgcaggtgtcacagcactaagttccctttacttcacgtacttcatgaaggaaaccaagggcaagtccatgttggatgactgagcaagtgaatgaatgtgaaaataatatttcaataaaaacatgcaaatgattgaacagaagtcaatcgtaatggaacggcaaatcgtttttaccatccatttgtagtcatttaaattagcttagtttgtcaaataaaaatcaggatattcatgtgttcagtttacattttcatgtatatttaaataagtttagttacatataattagataatataaacaaaatacgatttatgccgtaggctcaaacattctgatgctaatctattttcattttttaattacatagttggctatacaattcatcggacaagcacaatccactaatgctgcccatttaaaactaattaaaaaactagcatactaaatcacagtgttttttcccaagcgaaaaaaagtttgcaatattctacaaaattactagcatttcattataaacatacaatattgtatatatgtgtgcgcgggtggtgtggaaatagggcagcctgcagcaatatttcttggggcttttaaaacgtacattaaaacaattaaagttgggcattccacctgctctctctctctctttctctctctctctcttgtgtttcagcggcaaaatagcgattaataacataaacggccaacaattaaaatgcgtaaaacaaaacaaagataaacgtttacgaaacagttctttcgcactgccctaccgcagaccacgtttaaactataatagtaggtgtaaggataatggtagttatactcgcagtaattgctaagcatacatggtgtggcttgaaagtaatttaatcacaaaattggcgccctatagcaagtttgttcagttgtagcggcttagcaatggtgggcactactctaattacgtatcactggttcgatgtctgctcaaaatagatatagatatggatatggatatatacatatatagatatcacgtctttttggggcatcgcaggaagcgcaacaccgcgtatcccaggcaccggaataccaggaag

SEQ ID NO: 38525 - DNA, 1401 bp, DROSOPHILA
atgctgatgcgcttatttcaaaggccgaactgcctgcttaatcgcaggaatcgatatcagctgctaaccacgctgctgattaatgtcatatccatttcacacggcatcggtatcggatggctatcccccacgctgaggaaacttcagtccgactcacccgcgggtttcgaggtgaagtccgagttcgagatctcctgggtgggctccatgctgggcatgggctcggtgactggcaatatactgattgggtgcctgctggggcgcctgggcagcaaaaggtgtctgctgttaattgccataccacattcgtgcttttggatcctggtctactttgcccagagtgtggagtacctgtacgtgggaagactgttggctggcatctgtggcggcggcatgtacattgttcatcccattttactcagtgaaatcgcagatgccaacatcagaggaaccttctctgccatggttatgctatcggtcaatgtgggaatcctggtgggctatatcatcggcacccacttgccgtactactcaattccgcttatggtgttgatattgcccctgtggtacttaatttccgtgttgctattcattaaggaatcacccatgcatctcataaggattggcaaatactcggccgccgagaggtcgttccgctactataagaacatcaaggactctgataacattcacgatcagaatagagccatggaggagtttgagatcatgaagatagccctgaccaagggtgatgccctccaggatgccgtcactttcaaggacttttactctcgacctgctctgaaggcctatggacctgctctggtgcttttaattgccaatcagtttagcggacttttcaccatggtcaactacatgtcggacatattcgccaactctggcagcacaatggaccccgatacgtgcaccatcatcattggagccgtccaaatcctgggcacctatgtgaccactttgttgtgcgacatctgcggacgaaagctactcatgcttgtctccacgggcggagtggccattagcctgacggccttcggattctttaccaaatatgccgagagtcacaatatcggtgagtacagctggatacccctgctactcatgtccatggacatctttctgggcaacatcgggctggtgggatgcttctttgtcagccttgtggaaatgttccccgtcaagattcgtgccaaggccgcctcaatggcaattgtggtttgcagcatctttgtgttcctaatgctgaacatattcccgatctgcatgaagcagtggggcatttcggccaccatgtggtcgtgtgcaggtgtcacagcactaagttccctttacttcacgtacttcatgaaggaaaccaagggcaagtccatgttggatgactga

SEQ ID NO: 38526 - protein, 466 aa, DROSOPHILA
MLMRLFQRPNCLLNRRNRYQLLTTLLINVISISHGIGIGWLSPTLRKLQSDSPAGFEVKSEFEISWVGSMLGMGSVTGNILIGCLLGRLGSKRCLLLIAIPHSCFWILVYFAQSVEYLYVGRLLAGICGGGMYIVHPILLSEIADANIRGTFSAMVMLSVNVGILVGYIIGTHLPYYSIPLMVLILPLWYLISVLLFIKESPMHLIRIGKYSAAERSFRYYKNIKDSDNIHDQNRAMEEFEIMKIALTKGDALQDAVTFKDFYSRPALKAYGPALVLLIANQFSGLFTMVNYMSDIFANSGSTMDPDTCTIIIGAVQILGTYVTTLLCDICGRKLLMLVSTGGVAISLTAFGFFTKYAESHNIGEYSWIPLLLMSMDIFLGNIGLVGCFFVSLVEMFPVKIRAKAASMAIVVCSIFVFLMLNIFPICMKQWGISATMWSCAGVTALSSLYFTYFMKETKGKSMLDD

SEQ ID NO: 38527 - DNA, 2261 bp, DROSOPHILA
atgatctataatattccaatttaaattgctctttttctgtatctatttaattagaactgcaaacgccaagtgtatttaacacaactctaagcttcagggacttgccttccatttgcttgtgagaaattttcaggatttttgcggcatctcctatagttgtagtggtgttgagtaatttccagcaacatctgtggccaggccccgcgtttccgcatcctttgcacccttctgtgacttccgtttccgctttcgccctcttatcattattgctcatcaagcgtttctaatgaagtcgtaaaaattgaaaactttcaaggcatgtgagcgcgtcctttatctccttccccgtccatcggcatgtccttttcgtggcgttgcggcttatgtgttttgctttattgcctctccttattttggtacagttttccgagcccgtcattttagctggggattttttatgagtctgccgccattaaacgtttatttttctgcggttttcctcggcttcttttcgatttctttgtatgttttccgcatttgttgtgcaaactcacataatcagctttaagcactctacgcctgcagctttataagctggcacacgccagcaaatatttactggcaaactcggtttgtttgcttgtttgttcggtctcgaccgctctcgatttaatgctaatttggtgtttcgactcgtaaataattacaattgcccatggacaaacatgagcctcaggaattgtttaatttctcatctgtgctggttggcaaacactaaaataattattctccatttaggtgtcaatttacatttttgcaatgcgttctctgagaatttttatttgaatgaaaatttgtatgaaaatttgaaatcgtctgtctaagctatttttgtctcagaaaatgtcactttttggtaaaattttagaaaaatttacagaaattaatttgattaaattgtaagtttccgatctcggatatttccctactttccttcagaatggtgtgccgcttcaatcccttttacattggaccaactccacccagctgctgcacggatttgaagtccgattgcgattgcccgccgtgctcaccggatacagggtatcaggagcctcgacccgttcacgaggagtgcaacccgggtgtgccgaagaaggagaccaaggagagcaagtgcaatcctccttgcaaagaagcccccaaaaaggaaaagaaggagaagaagtccgagaataaagaggctaaaaaaactaaataaatttaagttttgctagaaatttgtaacatagaatagccttttttaaacacaacattgaatcgtgctggctacgaatgagcatcgaacttggcttgttaaaattcaattacacgcagctcgcagctacaaaactgaatccatttatgcaccatatcaaatcaaagtcaaccgcaaaaatatattttcaaattgaattctcccataagagaaaggcacaaacgtgaagaagcggtcataaaaactcaataaacggcaataacgcttgatatacgtatacgtatataaaaatatgccaaagcagacttcaaacaattttctcgagcaaacgttttctctccaagcgatttttcatctccttactgattttcccggtctggcagcgattgcacgtcctttggctcctggaggctgactaatttcatttgccacctccttttgaaggggctggaaaagtgagggaattgattttattaaatcatttggccagcgaagaagaatgaaaattgttagacaatgggaaattactaaattagactccttttttcatacaattcattcgccatctttgatgtgcactacaagttgtggcatgtgtagccagcttttccagcttttccatttcctatttgcatttttcttctgcatttgctcagttatttgcttgcggctgctcagtcataagcaatttttcttttcccatttccgttggaaaatgaaaagcgagtaactgatggttgtttagtcatgtttagtttgtcctagtgagacagattgatgatataaataacttttttatcttttctgatcaacatgttttgaaaacgtcataaatttccttaaaggagctggtaaatgcttctattatttgtataaaatcatgcatcttaaagacttacttatattgcgttccattagtgagctgacttctatgtcccagaatttgtgctcccatttcgtggctcatgtgtcaccggcattgttatcctttcccttcgctttg

SEQ ID NO: 38528 - DNA, 261 bp, DROSOPHILA
atggtgtgccgcttcaatcccttttacattggaccaactccacccagctgctgcacggatttgaagtccgattgcgattgcccgccgtgctcaccggatacagggtatcaggagcctcgacccgttcacgaggagtgcaacccgggtgtgccgaagaaggagaccaaggagagcaagtgcaatcctccttgcaaagaagcccccaaaaaggaaaagaaggagaagaagtccgagaataaagaggctaaaaaaactaaataa

SEQ ID NO: 38529 - protein, 86 aa, DROSOPHILA
MVCRFNPFYIGPTPPSCCTDLKSDCDCPPCSPDTGYQEPRPVHEECNPGVPKKETKESKCNPPCKEAPKKEKKEKKSENKEAKKTK

SEQ ID NO: 38530 - DNA, 2921 bp, DROSOPHILA
ggtcaccattaaaaatgcaggatgcactgtaacactgtgtgtgtgtgtgtgtgtgtgtgtgcgtgcgtgtgcaggtctccccttaaatgcaacaaagatgggaagtggctgccatgtcgagctgctcccaggcaaaaacctgatccttgcagagaactcagttcgctttgtagttacttttcaatgcgaaagtccatgaatttttctgtttttcgaaccttttcggtcagttttccctgtgaaggcgtgagtgttgctgcagccccactttgacccccttttgtactccacctaacgaagcgcttggtgtcccccactcggcttgtgagatgtaattaagcagatacggctgcctttcggatttgccgaaggggatatccccaacgtgctgagtgataccctagttagtggcaggaagcttcagttctagaacgagttttcgagccgatgggcaatcaattaatactgcaaaagtgttcgggcctacactgcctgctaaaaatctgataacgaaaaggcacactgtttcatgtaattgaaattctagggcaggctaaaactgctcagccaaaagtatatcgcaattgatggctgactttgaaagcaaacttgacagcttgagtacgaaccgattcaatcaaaaggaacatagattcgctatcgagctccaagagtagaagaacatagattctccattgagctccaagagtaggagtaatttgctcccgctcgaactgtacaaaacgagctgcaactcactgtcaaccgaatgcaaccggttggaaacgccacatattcatccggagaactgttttttttttttttttggaaaaatcctgatttacccttggatcgcctccactttcccctccttattaagacgaagtctgcatgcaatcagtgcggacacaaaaaaaaaaaacaaaacataacacacacacacctgaatttatgtaggtacgagcttggctcggaaattgggtcaacgctgattgaacactcaccttttggcatcaactaaaatgcttttgcctatattggccagaccattggatgacgttagattatccgtacttggtatcgttgtctgtgatgtgtgcgtaaattctgaggacgttgagctggaagatgacgacgacgtcgaagatgctgatgatgaggcagaggagtcgctgctggccaccgatgtcgctgctgtcgcatccgatgttgcaggcggggatgcaacgcttgctgctgctgctgctgctgcggccactgccgatgttgccggctccacttcgatctggaggcggcagtcggccactattttggccagattgcgacggctggcactcaccaacggtacctgctccgttgtctcgttgtcattgtccgatgatcccatatcgactgcctcaacactttccacgatcatcaaattcattggcattttttcgtaatgagtcgccgctgctgctgcctcacactttgcctttttcttggctttgagctcctcgggttcctttggaattttctgaatttttgccaatttgcgaggagcaacacaggcggcagcaactgcaactgtttcctgtttagctggtagtgttgttgctgctgcggctgttgttgttgttgttgctgctgctgctgctgctgctacttttaatgactcctctacaacttgttcagctgctcctgctgtcgagtttattaccaacgaagtggccgtcgtcgttgttgaatttataattgccggctgttgttgctgctgctgctgctgcgactgctgatgcggctgctgatgcgactgctgatgctgctgctgatgctgctgctgatgttgctgctgggttgccagcgccgcggctccaccttctggtatgattgttgcaaaaatttgttcgccaaatatgaaaagatccttggaaataatcattatcacctttttgtgaacgcttagctggatgttgttggtgttgccgccacagttttaaatatacgtacgtgtgtattggggggattttaaatgtaaatcttgtttaaatatatctatgtgtatatgcgtatacaactttttgctcgtcttctgcctgcactcgccttaaacacgtttcgtttcgtttcgtttattttaatgcattaaacatattttgcggctctgggaacttggcttttttggggatttctttaaaatttcataattccctggcttgtctggcttgcctcctttttcttttcttttcccgagttgtggccgactgtaatatagtaagagcagagaagagtacagatataattaatatgtaagccaagtgaaacaagttgtgatataattttaagatttaagagattacatgattatgaatacacaaaattatttacattttcgacaatgatgtcggaaggtaaaaagtcaggcaagcacggaaacaaagtgatgattttattattatgagcagtttgctttttgctgcacaatcccagtgaattgcattcaatttataatttattgttactaggaattcgttgcttattcaagttgcagtgctaattattcacgcgttattcatgcgatatctctgttattcactggaatcagatgctcgccagctctcaccgaaactattcacttcatttcaggcttcacttaattcgtaaaaacgttctgcaattttaataatttatttaaacttgaaaatgtttgcctcgacttcgaggaatctcctcaaaaactcagattctacacagctttttggcttgagaacttttccgacaatttcctatatgcactgccaccggcacagaaaaagataatgaaaaggaatcgcagaatatcggtgagaattggggagaatcagagagaagtggagacgcctggcgaattttgttatatttgtcaattagcccgcgcgaaacaaagcgccagagcaaaacgt

SEQ ID NO: 38531 - DNA, 921 bp, DROSOPHILA
atgattatttccaaggatcttttcatatttggcgaacaaatttttgcaacaatcataccagaaggtggagccgcggcgctggcaacccagcagcaacatcagcagcagcatcagcagcagcatcagcagtcgcatcagcagccgcatcagcagtcgcagcagcagcagcagcaacaacagccggcaattataaattcaacaacgacgacggccacttcgttggtaataaactcgacagcaggagcagctgaacaagttgtagaggagtcattaaaagtagcagcagcagcagcagcagcaacaacaacaacaacagccgcagcagcaacaacactaccagctaaacaggaaacagttgcagttgctgccgcctgtgttgctcctcgcaaattggcaaaaattcagaaaattccaaaggaacccgaggagctcaaagccaagaaaaaggcaaagtgtgaggcagcagcagcggcgactcattacgaaaaaatgccaatgaatttgatgatcgtggaaagtgttgaggcagtcgatatgggatcatcggacaatgacaacgagacaacggagcaggtaccgttggtgagtgccagccgtcgcaatctggccaaaatagtggccgactgccgcctccagatcgaagtggagccggcaacatcggcagtggccgcagcagcagcagcagcagcaagcgttgcatccccgcctgcaacatcggatgcgacagcagcgacatcggtggccagcagcgactcctctgcctcatcatcagcatcttcgacgtcgtcgtcatcttccagctcaacgtcctcagaatttacgcacacatcacagacaacgataccaagtacggataatctaacgtcatccaatggtctggccaatataggcaaaagcattttagttgatgccaaaaggtga

SEQ ID NO: 38532 - protein, 306 aa, DROSOPHILA
MIISKDLFIFGEQIFATIIPEGGAAALATQQQHQQQHQQQHQQSHQQPHQQSQQQQQQQQPAIINSTTTTATSLVINSTAGAAEQVVEESLKVAAAAAAATTTTTAAAATTLPAKQETVAVAAACVAPRKLAKIQKIPKEPEELKAKKKAKCEAAAAATHYEKMPMNLMIVESVEAVDMGSSDNDNETTEQVPLVSASRRNLAKIVADCRLQIEVEPATSAVAAAAAAAASVASPPATSDATAATSVASSDSSASSSASSTSSSSSSSTSSEFTHTSQTTIPSTDNLTSSNGLANIGKSILVDAKR

SEQ ID NO: 38533 - DNA, 2273 bp, DROSOPHILA
aaaagcaaccgaaatgcctgagttttgaaaggttaaagactgcaaacttgtgcttaattgaatttcatttttgggcatgaaaatatgggcaaatacgcgcggtatttataatctatttaacttttaatttcgaaattctcgaaaacttccacttgctatttaaataaagtcattgtttattttgctatctattaattaaggcaaccgtttttcccctactttgagttcattcacaaattcaactgataacccgcaaagtgcgttgataacccagacacattggctcagtttttccagcgaagaaagcaactgtttgtttactgactcttttcgctttagtcggggaccctcagggacccagaaaatcgatatcctagaacgccttaacacaatgaaacgcaatgtacatacactcgtctccttgcggtggagcaactgttgcgcaataaacgcaaatgctatcaaaatgcacgaaagacgaggtgtggggcaattagaatggggcaaaccgccttatcacggatttggaaaggggttttcacgggcgtgggggtggataactcaaactgaaaggaacaaagaggggcttataaacgacatgcaatatgactagcaacgggttaaacatgcaaaccagcgggcaatcctacaccacaaattaacgcgcttagctcttaggtttccgctgcacggaaagaaatcagttccaagttccgcagtgctggagataatacatacacacaaaaatatttcagttctttagagactgacgacgtttctaagtaaaacgttgagaagcataacaatttctatacagctgatttctacactcgctagacatacatattttacatagtttacataaacgctttactgtagagggaacacacttgatacttccaattggaactttcgactattcgatttctttccgtgcagtggtataactttaggttctagaattgtttccgggcaggtgggcgtgcgggggcgtggcaactcacatgagcgtcgcatttaggctggcggtgcgcttgtgcttgccctgcgtggacgaaggacgatggaagaggctgtgggcggtggccaaggacttgggcagggcaccctggctggcggacttgcgcagggcggcgaaccgcgatgaggatcctagtccgagtcccgatcccgatccggagcacgaggaactggaggccagcgaggagctggacgaggaggcggaggacttgtggtgctgctgttgtgcccgttgctgtgtgacaaaatgcatgacaacacggcgaggtatgccgctcctccttcctgcccttccccttcgcccgttggacactcctactccgcggttttgtttatcgagtctccaccgtttatttgtttatttcacctatttcttttatgtggcacttttcaacgtctgcggaagtcgctgttcattcggttttctagctgctaaaatggtgcactatcactgctacgttggctttttcacgcactttcagtttttgcacgactaaatgcgctcattaagttattggcgaatgagattcatgtgtaaattcatttaaattcgtctgaacggagcaaaatattcttcactttttgcgcataaaaaataggaccgcagcgaagggggtgagaaatactgcttggggtgaaaataaataccatcgtgcactataccattttgtatagtgtggccatatgatgttaagtgtgctattcaacactgactggccaaaaatttggcggcactttcaaattcaatacttgctttcaaagacataactatataatttaaaacaactttattttaataatatcacaagcagactagaatacacaacacttgacttgctcacaacaatgtttgctccacctggcgggagagagacaacgcgagtgctattgaaggcgctggaaagagaaacaaatacgtttcaggtaaatttaagactagagcacaaacttaaattataaagcttaaaataatgtcttaataatactcaagctagaaaaccgtttggtgtcagtacaatgctcgaattgccgcttttgaggagtccacgaatcagcgccaaatcatcgggcgtcagcgaccagccgttcagttgacccacggactgcagttccgggcagctgtccattaataactggaaaaaaactcacattagccaagtatttagatggatttaagccagtaccctacctccacagactgcactgtgagctctggcgctagagtgaaccacacatcctccaaaactttgaaa

SEQ ID NO: 38534 - DNA, 273 bp, DROSOPHILA
atgcattttgtcacacagcaacgggcacaacagcagcaccacaagtcctccgcctcctcgtccagctcctcgctggcctccagttcctcgtgctccggatcgggatcgggactcggactaggatcctcatcgcggttcgccgccctgcgcaagtccgccagccagggtgccctgcccaagtccttggccaccgcccacagcctcttccatcgtccttcgtccacgcagggcaagcacaagcgcaccgccagcctaaatgcgacgctcatgtga

SEQ ID NO: 38535 - protein, 90 aa, DROSOPHILA
MHFVTQQRAQQQHHKSSASSSSSSLASSSSCSGSGSGLGLGSSSRFAALRKSASQGALPKSLATAHSLFHRPSSTQGKHKRTASLNATLM

SEQ ID NO: 38536 - DNA, 3628 bp, DROSOPHILA
gagcgtcgcatttaggctggcggtgcgcttgtgcttgccctgcgtggacgaaggacgatggaagaggctgtgggcggtggccaaggacttgggcagggcaccctggctggcggacttgcgcagggcggcgaaccgcgatgaggatcctagtccgagtcccgatcccgatccggagcacgaggaactggaggccagcgaggagctggacgaggaggcggaggacttgtggtgctgctgttgtgcccgttgctgtgtgacaaaatgcatgacaacacggcgaggtatgccgctcctccttcctgcccttccccttcgcccgttggacactcctactccgcggttttgtttatcgagtctccaccgtttatttgtttatttcacctatttcttttatgtggcacttttcaacgtctgcggaagtcgctgttcattcggttttctagctgctaaaatggtgcactatcactgctacgttggctttttcacgcactttcagtttttgcacgactaaatgcgctcattaagttattggcgaatgagattcatgtgtaaattcatttaaattcgtctgaacggagcaaaatattcttcactttttgcgcataaaaaataggaccgcagcgaagggggtgagaaatactgcttggggtgaaaataaataccatcgtgcactataccattttgtatagtgtggccatatgatgttaagtgtgctattcaacactgactggccaaaaatttggcggcactttcaaattcaatacttgctttcaaagacataactatataatttaaaacaactttattttaataatatcacaagcagactagaatacacaacacttgacttgctcacaacaatgtttgctccacctggcgggagagagacaacgcgagtgctattgaaggcgctggaaagagaaacaaatacgtttcaggtaaatttaagactagagcacaaacttaaattataaagcttaaaataatgtcttaataatactcaagctagaaaaccgtttggtgtcagtacaatgctcgaattgccgcttttgaggagtccacgaatcagcgccaaatcatcgggcgtcagcgaccagccgttcagttgacccacggactgcagttccgggcagctgtccattaataactggaaaaaaactcacattagccaagtatttagatggatttaagccagtaccctacctccacagactgcactgtgagctctggcgctagagtgaaccacacatcctccaaaactttgaaatcgtgctgcataaacatgctgagaagtatttaattgatagattactgcagaaagaagtatattatatgattacctcataatatcatcgtcggtgaactccaccgtgtccaccgccagtctcttcagatcggtggaattgcagaggaaggccttcaaagaactggtcagaatggcgctgctcagaatctccagaccctccagttgctggaacttggcgtgtccggctccgtaggacagactgtcgatcatatagcagtcgagatcaatgagcgagggacacaggcgagccagcttgcccagctcaaggttccccagtcccttgatcatggtgagatgacgcagattcctgccaatcggacgctccagcaggggcagtagctcggccaccacaaatttgtagatcttcaatttgcgcaaattgcgcgtactaagagccctcaggctacccgtcttgggcgagtccagataaagggtctccagcctggggcacgtctgcatgatcacctgcaaggtggcttcatccgtgcccgtgtcgtggatgtacttcagtcggcacttgaagcgatcgtcgacattgtcgtgaataaacttcagggaggcgccgacaaaggagtaagtggagagggtctctacctggggacagtgctccaggatgagggcaatgtccgagtagcagatgttctcctcgcccggcatgcccacatccacaacggttagtgattgtgagcacacgcccttggccagcagatcgatgccgatttccgtgatgtcggtctcgccggaaatgtccaggatctgcagacgggtgcagcagttaccgatctcctccagcagccgatcgttggcaatatagggcacatacaacttgaccagctgcttgcatttcctcactatgtcgtacatgtagtgcatgtgctcctccttgacccagattcccttgatattcagcactctcagtcctgcgccttgggctgcaatcacctggaaattgaacccttgttcaaaagagtcttctatataggattttccttgattacctgcaggatcttctcgtagtagctgaagggaaacacctcggtcatcaggaaagtaacgccacagttgagcagcatctgcaggcaggtgaaccgcatgttggcgtccagatagtccgagctgaggatcaccctgagcagatcctggtatatattgggggttgctcccagctgggccagatactcgttcagttccaccatgacgatgttaatgtccagctgcacgtccggggcatactgcgcgtagctgatggtggacaccaagagattggccagctccgccaaggcgctgtcgctcagcgatcgcacggagcactttttcgacatgtctctgttatggtttcggcccagaggtaaacaaaatacgacgcagaagccgctgggagatgagcgcactagaggaattgttttgctcgtggttacatcacttggtagcaggcgcaatgctggttgttttcctgctcccttagagtatttctaacgttcctcggtaactatttgcccaatatcagctaatggcgcacttctacacatgcgtgtaccttatatttaggggtaaaaatagattctaaaattatataggcgaaggaatcggtttctgccgacgaactagtgaactgctcgatccaacagcacgatgcaaactgagagccatgggacgccaaaatgtttggtttcctcggttccacattctcaattcggcgagccacttgagcgaccaaaaaaaaacaatgcttaactcgtttcattgttattttgagtcgctttacaattgcattatttattcgacagcatcggaatagagacattctatagtttacttaactgattcggatgaaagccagccagttattctgctgtttaaacaatattacaactattacacaaaattttaaaacgaaatcaaagtttttgtttggtattccgcagctttaagccttttaaactagaatttctggcgaatgcagttcggtttacagatattcgaatgtgggagagtactaagagagcgtttttcagtagagattctagggctgcaggtagctgggcagcttcatgcgcatgaacagccaggtggtgaagaaggagaccaggatgaaaatgaatcccatggcggtcagcagcaggcggttgaggttcgtcttgcccggcgtgtgcgtttggtccatgataatgaatcccagtccgccgacggtgaacaggaagctgctggccaggccctccatgatgtactgcccattcacacggtagggcataaaggccactggacgcgagtgtccgtgctcatccaccgtggctcccagactgggcggctccacaatcacgt

SEQ ID NO: 38537 - DNA, 1452 bp, DROSOPHILA
atgtcgaaaaagtgctccgtgcgatcgctgagcgacagcgccttggcggagctggccaatctcttggtgtccaccatcagctacgcgcagtatgccccggacgtgcagctggacattaacatcgtcatggtggaactgaacgagtatctggcccagctgggagcaacccccaatatataccaggatctgctcagggtgatcctcagctcggactatctggacgccaacatgcggttcacctgcctgcagatgctgctcaactgtggcgttactttcctgatgaccgaggtgtttcccttcagctactacgagaagatcctgcaggtgattgcagcccaaggcgcaggactgagagtgctgaatatcaagggaatctgggtcaaggaggagcacatgcactacatgtacgacatagtgaggaaatgcaagcagctggtcaagttgtatgtgccctatattgccaacgatcggctgctggaggagatcggtaactgctgcacccgtctgcagatcctggacatttccggcgagaccgacatcacggaaatcggcatcgatctgctggccaagggcgtgtgctcacaatcactaaccgttgtggatgtgggcatgccgggcgaggagaacatctgctactcggacattgccctcatcctggagcactgtccccaggtagagaccctctccacttactcctttgtcggcgcctccctgaagtttattcacgacaatgtcgacgatcgcttcaagtgccgactgaagtacatccacgacacgggcacggatgaagccaccttgcaggtgatcatgcagacgtgccccaggctggagaccctttatctggactcgcccaagacgggtagcctgagggctcttagtacgcgcaatttgcgcaaattgaagatctacaaatttgtggtggccgagctactgcccctgctggagcgtccgattggcaggaatctgcgtcatctcaccatgatcaagggactggggaaccttgagctgggcaagctggctcgcctgtgtccctcgctcattgatctcgactgctatatgatcgacagtctgtcctacggagccggacacgccaagttccagcaactggagggtctggagattctgagcagcgccattctgaccagttctttgaaggccttcctctgcaattccaccgatctgaagagactggcggtggacacggtggagttcaccgacgatgatattatgagcatgtttatgcagcacgatttcaaagttttggaggatgtgtggttcactctagcgccagagctcacagtgcagtctgtggaggtaggctgcccggaactgcagtccgtgggtcaactgaacggctggtcgctgacgcccgatgatttggcgctgattcgtggactcctcaaaagcggcaattcgagcattgtactgacaccaaacggttttctagcttga

SEQ ID NO: 38538 - protein, 483 aa, DROSOPHILA
MSKKCSVRSLSDSALAELANLLVSTISYAQYAPDVQLDINIVMVELNEYLAQLGATPNIYQDLLRVILSSDYLDANMRFTCLQMLLNCGVTFLMTEVFPFSYYEKILQVIAAQGAGLRVLNIKGIWVKEEHMHYMYDIVRKCKQLVKLYVPYIANDRLLEEIGNCCTRLQILDISGETDITEIGIDLLAKGVCSQSLTVVDVGMPGEENICYSDIALILEHCPQVETLSTYSFVGASLKFIHDNVDDRFKCRLKYIHDTGTDEATLQVIMQTCPRLETLYLDSPKTGSLRALSTRNLRKLKIYKFVVAELLPLLERPIGRNLRHLTMIKGLGNLELGKLARLCPSLIDLDCYMIDSLSYGAGHAKFQQLEGLEILSSAILTSSLKAFLCNSTDLKRLAVDTVEFTDDDIMSMFMQHDFKVLEDVWFTLAPELTVQSVEVGCPELQSVGQLNGWSLTPDDLALIRGLLKSGNSSIVLTPNGFLA

SEQ ID NO: 38539 - DNA, 2546 bp, DROSOPHILA
gagtgttgttactttctgcctttgttttccttttcggtggcttgtgggcgccactggactccctcatcatgtgagctgtgtgttgttaactggttgctacttcgcctcctatatgtacacatgtacatatgtgcggcatggcataatgaacttgaactttatgacgcaaaacacgttaagttgacgtaccaaagtgccgagtgttgggcaaacatatctctggtcttcagcggctttatgtctatttttgtaacattattttcgagacgagcctcgtttaagtgatgttgggtcactggagatatatgcacatggggcttgcgtgtcagttggtcaagtggacagaggtgaaacatttcggttttaaacactctgtctaatgacttgggatcagccaagccaagagactctgtgacctacgactcctaggacttaagaatctaaattagatttcagaatttggacatcgatttcttatacatttttattgttagttcaaagttcatggcagacccattcgacttgctgtatagaaatcacttccccctggcagcatttatcattgttgtgccatttttgggtgtctgctgatggccgcaataggaagcagtccacaaacaagttgtaaaataacaataaaaatcagcaaatcgaaattgaaagtggtccgcaggcaactgccaaaaatatgggcgatagcgatgccagcgtgaccggtttgtataagatatgatatcatgcgaacataaacttattttttaaacaaattctatttatttagctgataagaaacacaaatttcaaaaatatcatttgtacttaacacttgtcagagtcagaaatgtctaccaaaaatttaaatcttgtgaaataatacgaaactcaatatcttttttgctgtgtaaatcgacaccagcaattcagcgaacgcggtggatgaggccgaaagcgaaaccagacgaccttgtctcgatgcgttgggttgcggttaggttacgcaatggatgagggcaagaaaaaagcagcagaagcagccgcagctgccaaagaagctgcagcctcagctgctcaggcggccaagacgaaggcggcaggagcagcaggatcagccaaggaagcggcaggagcagcagccagtgcggccaaggataaggcaggagcagcagcagcatcagccaaagaaaaggccgcaggagcagcagtggcagtgcagcagagcgcatcaagtgctgccattgcagccagggaaaaggctgccaatgcagccgaattcaccaaagaaaaggcgacagccgcagcagctgccgctacggaagctgcaacatcggcggcatcgacagtcagggaaaaagccgcagcagcagcagttgctgtcagggccaaggcatcagcaacagcaattgctgtcagggattcggtgactgcagtagcagttgcagcacaaggcgcagcagcagcagctaaggacaaagtcgccactgcagctgcaagtgcggcagcagcagcaaagtcgaaagtcacaaggcagagccaggatgaagtctagtaagaactgtaaaccgattgggtatatgcgttgcagatagcttgaacaacaacagaagctgcaatataataaaatacaattccacacaaatggctggacatcagcagcagcagcagccgcagcaacatcccccgcagcaacgcaaaaagcggcagcagcagatggtccgatgggaaaccagaggccgcaggcaaatgaaggtacagataaccggttggatccattcaaaaattttatacccatagccggttgagcgagaagattgtcatttgagccaactgtgacctctactctggaccaaagcccaacctccaaccctccaacccgccctccatcccgtctgattccaccaaccacaaattactcaagaaaatcaaaagtcaaaagtctgtctgcagattagcatcgttaattattcatagtaaatcaaagcgttctccaaatgccagagactcaagtaaactttgtaaactcgagttgttcttttggccacgcaggttgtcattggcggccgaaactcaaaaagtccaagataaaatgctaatttatcttgtggccaagaggctgtcattaaatgaggagggttaaattaatttgtataggcctttgagtgatctggtgtatatagattgaaagcaaatcgccatgagcaaacatcattttaagcggttttaatcaattaatagtaaaaaacttaagtggaacagaaaattaagtttctcaacattcttcgaacgatctgatttcgtcatttgctgcacactctaatgacaaaaaccagtttgttttctaagctcgatcatcggcgtctattgaacttaattgaatttaaattcgagtattttcaagagcaaattactttttttgttgaaccgctggcattctttcgatgagttttttgtccccatctgggagttaagtgatgtggattgtcaaccagagcgtaacttgctctgtcacgcaaattttaagtttgctttttttccctgcagatttagag

SEQ ID NO: 38540 - DNA, 546 bp, DROSOPHILA
atggatgagggcaagaaaaaagcagcagaagcagccgcagctgccaaagaagctgcagcctcagctgctcaggcggccaagacgaaggcggcaggagcagcaggatcagccaaggaagcggcaggagcagcagccagtgcggccaaggataaggcaggagcagcagcagcatcagccaaagaaaaggccgcaggagcagcagtggcagtgcagcagagcgcatcaagtgctgccattgcagccagggaaaaggctgccaatgcagccgaattcaccaaagaaaaggcgacagccgcagcagctgccgctacggaagctgcaacatcggcggcatcgacagtcagggaaaaagccgcagcagcagcagttgctgtcagggccaaggcatcagcaacagcaattgctgtcagggattcggtgactgcagtagcagttgcagcacaaggcgcagcagcagcagctaaggacaaagtcgccactgcagctgcaagtgcggcagcagcagcaaagtcgaaagtcacaaggcagagccaggatgaagtctag

SEQ ID NO: 38541 - protein, 181 aa, DROSOPHILA
MDEGKKKAAEAAAAAKEAAASAAQAAKTKAAGAAGSAKEAAGAAASAAKDKAGAAAASAKEKAAGAAVAVQQSASSAAIAAREKAANAAEFTKEKATAAAAAATEAATSAASTVREKAAAAAVAVRAKASATAIAVRDSVTAVAVAAQGAAAAAKDKVATAAASAAAAAKSKVTRQSQDEV

SEQ ID NO: 38542 - DNA, 2963 bp, DROSOPHILA
ttgcaaagatatgcatacatatttataatgtatccaaaaaccggcaaacaaacgccacaaaaaaatagatctttaagaaactgcgcagttgggaaacgacctcgcctttggcccccgccccgccctttaccatttttcttatatatacaaaagtagtgtgctgagcacatgttcgttcagatagaccgatcccttgtggtccaacaactacatccgactacactcgactaatcccggcacgttccagacccatttgaatattgcgcatgaataattacctaatcgcaaaaagtgtttgctcgacaaagatttagcatcgcagtgcaaaaattcgaccgcacgagatagtgcaaatagtggatcccagatgcttacagagttataaatataaggcaaaccaatttaattcaatctgtaaacaaagccagacagtcaaaacaaattgtacaaactaattagctttaagtttgagttgaaaaaacaatggctttggctattaaaacctcaatgaatatcaaacatagccataagttggtagttgcgctaataatatataattatgaagataagaatagttaagaataattaaatattaggaggggtttaaaacttcgcgctacagttcttagtattatttattaccaatactatcattcgacttttaaaattgtagtctacttttcagcgttagcgcataaagttgttagttccttaaacgcccgtttttatggcttttcattatggcgccactgtgctaaatatgaaacttgaaatttcatccaattaaaattcgtatcacttaaccatatttatatttatttgatcaagtttcgatgtttcgcataggacaaatgtacaagaatctcaaatagtttaatagcaagcttacggtctacacaaaaagttgtttaaacttgtttaattacatatttacaataaaatatacatattttcatagacgtaggtgcggatgtgtgcgcggacaaggaaggtagcctctctacttgaacctcagcaggttgtccactccgccaagcggaccatgaccgaagtgcagggcatccgacgtggattccgatcgagtgcgtgcctccagaacggaggccacccgctgctgaccactgatgtagcccagggatccggagccgagatacacattaccgttgggcaaacgcacaaagcccaggccgcccgatcccaaggcaatggcatcccctcccgatgcaccaccctgggatctgggctggatggcaagctgctgctgctccagcagcaaggaattagcccgtgagtccagctggattccattggcggatggagcaccaacatgtgctccatagcgatcgaagaaactcgttccggacaggaatggagccggggtctcgtctatgtcgttgtcaataatctcgatgacggcatattgcttcagctgcctgccattggccacgtaggattctccgggcgagatcaacgcctgcttgccgaagggaatgcgcagatttcctcccgctgtcagtggagctggtcccgtgggcggcaccacgatgggcgtggcaagagaagtccttgccggcggtggaggtccgtagatgggtttgaaagtgggcgttccgtggaaacttatagatgagatgggtgcagcagctggcggtggaatatatgtggagaccaccggcttcggtggcagataatgactaacgatgctggcagccggagctgagggacgactcctgggtattggaactctggccgtgggcagtggaggaagtgccggaatcggaggcagtggatggatggtgggcagcgcactgaactggtgacccgtatacaccgatcctgcgcccgaaggtgccgagggagccgtgggtctcgttggtctgctgtaatggtagcccacatccgccttggccaagaccaaagatagaatcaacagacccaaaatattcagtcggtggtaaggcatctggaattggggaacaagagggaatttcttcaggaaggtgatcaaatgagtaattcaaaggggagacataaagttggtcgaggtattaaatcttggcacacatgtaattgcttatgtgacatcacataaccgctcaatcaattagataaatgtttaatgagcagccgtaaacataattgaaccgaaatcactcaactccaacggttgccggtgtctataaaagtggataccctgtacattgtacgggtatatttacactatcaagcttaggtttaaaggaggaattgtagttatgtttgagtagtaatatttctatgttaactgtaaccacttttgttgatatcttttgtgtttattgttttatgaatgagtaaccgccattcgcgctgctttcaatctctttaactttactttttgataaaattgatttaattttgcggtgtaccgagctaaaactaactggttgtggccggccggtaaatcggtggatcggtgaatcgctgagttgctggatcgaggtaaccgctactgtaattggcgtgatatttcatgcggagatcattgcccaaggcggcgatcgtaatggaaggcggtggtcaggggagagccacaagctaattagcaaatcggatcgcaaacatctcgtagtcaccgggggtcttgcctccattcactccccacagatccccctttcgcaaatcgccagccaattaagtcaaatggctgcacttaattggatatttatattcattcgtcctattaacacttcccacacaaatagccctccttggtgccgcattatcaatcttcttgggcgcactaaacaaaggcaaacggcaaggcgggcggattaatgatatttatcaactggcagtcgccactactgaacaaaatacactgaacaaaaaaatttgtatttttttgtcaatgatatgtagatgttaccaagagttcaacgtgattttggatttatattaagaaatcctttatatacttaaat

SEQ ID NO: 38543 - DNA, 963 bp, DROSOPHILA
atgccttaccaccgactgaatattttgggtctgttgattctatctttggtcttggccaaggcggatgtgggctaccattacagcagaccaacgagacccacggctccctcggcaccttcgggcgcaggatcggtgtatacgggtcaccagttcagtgcgctgcccaccatccatccactgcctccgattccggcacttcctccactgcccacggccagagttccaatacccaggagtcgtccctcagctccggctgccagcatcgttagtcattatctgccaccgaagccggtggtctccacatatattccaccgccagctgctgcacccatctcatctataagtttccacggaacgcccactttcaaacccatctacggacctccaccgccggcaaggacttctcttgccacgcccatcgtggtgccgcccacgggaccagctccactgacagcgggaggaaatctgcgcattcccttcggcaagcaggcgttgatctcgcccggagaatcctacgtggccaatggcaggcagctgaagcaatatgccgtcatcgagattattgacaacgacatagacgagaccccggctccattcctgtccggaacgagtttcttcgatcgctatggagcacatgttggtgctccatccgccaatggaatccagctggactcacgggctaattccttgctgctggagcagcagcagcttgccatccagcccagatcccagggtggtgcatcgggaggggatgccattgccttgggatcgggcggcctgggctttgtgcgtttgcccaacggtaatgtgtatctcggctccggatccctgggctacatcagtggtcagcagcgggtggcctccgttctggaggcacgcactcgatcggaatccacgtcggatgccctgcacttcggtcatggtccgcttggcggagtggacaacctgctgaggttcaagtag

SEQ ID NO: 38544 - protein, 320 aa, DROSOPHILA
MPYHRLNILGLLILSLVLAKADVGYHYSRPTRPTAPSAPSGAGSVYTGHQFSALPTIHPLPPIPALPPLPTARVPIPRSRPSAPAASIVSHYLPPKPVVSTYIPPPAAAPISSISFHGTPTFKPIYGPPPPARTSLATPIVVPPTGPAPLTAGGNLRIPFGKQALISPGESYVANGRQLKQYAVIEIIDNDIDETPAPFLSGTSFFDRYGAHVGAPSANGIQLDSRANSLLLEQQQLAIQPRSQGGASGGDAIALGSGGLGFVRLPNGNVYLGSGSLGYISGQQRVASVLEARTRSESTSDALHFGHGPLGGVDNLLRFK

SEQ ID NO: 38545 - DNA, 4734 bp, DROSOPHILA
gtgcgaagaatcatgcacgtgaggatcaatgggacagactcttcgattcccgtgccacatccacatggaaatgtttccagtttcactgtcctttacggcaaccccgtagaactgcaccgaagtcagcgatctttagccttgataatcgtgtttatgttgcccctgggcatcgcattcctcttcctgttgctatatctatacctccattgcgagcggctcttccacttgtcctattacgcctcgggattgccctgttttggtggcgaaaaatcatccagtgggccgaggtttgtggatcatgtggacatagtgcgctatcccattgctaatggcggttccagttgcccagtggatgtggaaaccgaattgccagatggatacgagactcctgtaagtggaggtacctcgatttgcaattgcactggtcacagagaatccacctgctcgaggacccatcatgtcacctacgagtccttaccagctgagctgccctatcaactgtacgcagagatcaaggagcaggcggatgagaatggggatgcggatgaggtgctggccgtgactaccggccctacggctcccatctacgatcatctgtcgtttgtggaggagatgccaaaactggatgaactgagagatatatcctaggtagaatccatctttgatatacttaattccttaataatttctaggctttgtaaatttcagttgtctttgaatacgtaaatagagaacacgaatctggatggattattcttttacagtttaaggtcgcacaacagcaaaggtactgctggttacacctagggtagtttaagtaagctcaactgtattaataaagagttgatttgtttttattgctaagtttttttttagttcgtagtgtatttgtaaagaataaagtctctgcaccctgatttgctgtgccctgcgttgttattatttgttaagtttttataagtctaaattcgatttaaaatttccattggaattcatgcaatcatttcataattggtttacgagagctcacaacaatacgccgtatgatgtttggcttcttaattgtgggttttacgtcctggttgtcttcactttcctttggcttgtcattttccttggtggtttccccatttggacatctctcaagcggactcaaattgtgaacaatgggatcgttcgcgctaaacttcacagccttttgcgaatcttcggcgaagacttgccgttttttgctgaggatagagcggatattttcgttggtcgagtctttgatgacgggaatcctcacaggagttcctttgcgctgcggtttttgtggcgttggactgtccagaatttccacactcaatgtcccatcttgcttgatgggagattccttggccgcctcatcgctgctgtcttcagtttccgtttccagctttatgagcttcacaggagttcctttgcgctgcggtttagcaggcgttactgtaccaggcagtcttgctcccagcagttcttcgttggacttcacctttatccctcccagtcgctgcttaactggggtacccttcatcaaaggtttggctggggtttccacggaatttagacccgtttcttcgttttcatcttcttgtatattcatttgaggtgttactccatcgtttttggctttgactggagtgcctttcagctgcggttttggaattaattctggagcttccaactcctttttgatatcaaccgcgtcctgctgttccaagtttaagtcgatttctcgttttattttcatacccataattgtcttaataggtgttctttttatacaagccttgctttcggatacctctagttcctgttcgacttttacggatgtgtcttttagtgctggttttaattcttggctaagtggctccactacctcttctttaatggcaggctttaagggcgcatcaagaacaataatttccgttgcagttggaaaagacttgcttgtggtttccgcagccgatttcaaagatgtttctggatgtgtatgtagttgagctgatgatgatggagattgtgccgctacactgacaatgcggggcaatgcagttttaagttccgcctccttgatgttaaactccatggcctgcatgggcttgaaaacgatcttatgctccgccagcagattttcgcgatcaatgagcacacagcgggattttagggactcaaagcgccagctgaaaatataaataattataaaataaatatagctttgaaaaggaatatagtgtatataccgtgccatttcctgctgaacgcatcgcatccgttcctccagtccggccttctggattcgcatgctatgcagctgcgccttcagctcgtccgtttcgcgtctaaattgggatgatttttaggaattaggggtgtggaggctacctaactggtcagcaagaacaggccgtagctggtgaggctcagcaacttattgccgagcgatgccagcgcggtgtcgaccaagaggggcaactcatacttgcagaaatccagcatcgagtccagccaggtgaccgacttctcgctggccagctggcgcagccgctcctgggagagattaagctgccgctctaggctgtcgttggcagtcatcagttgccggatgcgctcattcagcttatctgggggaatactcctatattaatcttctttacagaccaatgaatgtggattactcactttgataggtcttgtccgcactgcaaaagattgtgctacaggcctgcagctccgtgtgcatggccacgttttcccgcttgagacgtctgatctcaaattggctgtccgtgaagatcttcttcatatccagatagctttttttctgggccgccaggatctgcttcatcgcttgcctttggtcgtccacctcagcgaacagagagttgcccttgcggtctataaaaatagtgcataaagccctttttaaaacaaattttagggtgccatgttaatcttaactaccattgttttcaggggcggaggtaagcagtgctatcttggcattggcatccaccagttgctcctggcaactctccagcaattgcagcttttcctccagttcatcccgcttgcagttcagattctgttccatgcagctcacccgatcttgcagacattcgatggttttctgggaattcaggatagtatttaaatgatgtagttgtttagatacttatgaggaatatttctacctctttttcagccaccgccagagtgtttgcgatgcgcaagtcctcatactcggccagcttttgcaacagctcacagttttcgagttctagggcattcaaacgggcaaaaaagtcatcgtgaagctgatttgacctggaggcggacttttccgccagattcttttcagcggcagtcagcttatctttcagtgatctggtctcctccaccttggcgtcgtagtcttgctgtaggacatcctgttcctctttcagggtcttgaactttcgacgcagctcctccagttcctggccattccctccagacgcgatggccacaggctggctactcagatgctccagttcctgggtcaaatacgattcggcggcgagggcagtgtccagattcctttttagctcataaatcctttgcgcatccttttcgctctggtctttcagctgctggtggcgatcgtgcagcagcttgtactcctccacgatgtcatccacgctaagggtgtcaaggtccaagtttttgtacatttggtttgcataaaaaagacgccaattttttatatttttcaaccgtcaatcgatatttgactctaaagtaatcggtatggattgctcgcattgttgatcgattacaaataacagggagacttgtgctggtaagcgcagactaacagtgttgttacattaacggttagcgccatcttccggaagagaaatgcatttttaaaaattttgactaaaatttcactcagttttaagttttaagctaaacaatctttcttttattctaagtagaatattacttttgcctttgcaactttttacagcaaacttctatacggcaagctatgttaaccgcatgctaacattcaactcgttgccgccctcttccggtaattcaaagcatttttaaatattaggcaatattaaaatttttctttattctagtaattaaatgaatgaaaaatgagctgatactaaaaaaaatagtataataaaatagaaataaaagggtataagctaggacgcatgcgctcggtgtgtttacacacatatcgttaccttggcgacaattttgtttccaaacagctggctcacacttaacactagtttatttaggaacacaacaaataaaaattgtaaaatgcagcaagatgatgaacaggaaaaatcccagcagctacaaaactttcaatccgatgacttactggaaaaattgaagttactcaactacgaaaaacatttgctcaaggaattcaaactaaaaccgctgtcgcgtttctatttcgtaaaggccacaaatcccggagagcaattctatatgtttactttaatatgctggtggctatgcaagaaactcggaaaggatatggagcggccacaggagtacgatgatccaaacactgtggccgccaatatcattaaattgcttggggagattgtgagtactaggactaagttgtattactacaatactacaatattttcattgtaggatgtcccagtggatttccagcccaataagctg

SEQ ID NO: 38546 - DNA, 2424 bp, DROSOPHILA
atgtacaaaaacttggaccttgacacccttagcgtggatgacatcgtggaggagtacaagctgctgcacgatcgccaccagcagctgaaagaccagagcgaaaaggatgcgcaaaggatttatgagctaaaaaggaatctggacactgccctcgccgccgaatcgtatttgacccaggaactggagcatctgagtagccagcctgtggccatcgcgtctggagggaatggccaggaactggaggagctgcgtcgaaagttcaagaccctgaaagaggaacaggatgtcctacagcaagactacgacgccaaggtggaggagaccagatcactgaaagataagctgactgccgctgaaaagaatctggcggaaaagtccgcctccaggtcaaatcagcttcacgatgacttttttgcccgtttgaatgccctagaactcgaaaactgtgagctgttgcaaaagctggccgagtatgaggacttgcgcatcgcaaacactctggcggtggctgaaaaagagaaaaccatcgaatgtctgcaagatcgggtgagctgcatggaacagaatctgaactgcaagcgggatgaactggaggaaaagctgcaattgctggagagttgccaggagcaactggtggatgccaatgccaagatagcactgcttacctccgcccctgaaaacaatgaccgcaagggcaactctctgttcgctgaggtggacgaccaaaggcaagcgatgaagcagatcctggcggcccagaaaaaaagctatctggatatgaagaagatcttcacggacagccaatttgagatcagacgtctcaagcgggaaaacgtggccatgcacacggagctgcaggcctgtagcacaatcttttgcagtgcggacaagacctatcaaaataagctgaatgagcgcatccggcaactgatgactgccaacgacagcctagagcggcagcttaatctctcccaggagcggctgcgccagctggccagcgagaagtcggtcacctggctggactcgatgctggatttctgcaagtatgagttgcccctcttggtcgacaccgcgctggcatcgctcggcaataagttgctgagcctcaccagctacggcctacgcgaaacggacgagctgaaggcgcagctgcatagcatgcgaatccagaaggccggactggaggaacggatgcgatgcgttcagcaggaaatggcacgctggcgctttgagtccctaaaatcccgctgtgtgctcattgatcgcgaaaatctgctggcggagcataagatcgttttcaagcccatgcaggccatggagtttaacatcaaggaggcggaacttaaaactgcattgccccgcattgtcagtgtagcggcacaatctccatcatcatcagctcaactacatacacatccagaaacatctttgaaatcggctgcggaaaccacaagcaagtcttttccaactgcaacggaaattattgttcttgatgcgcccttaaagcctgccattaaagaagaggtagtggagccacttagccaagaattaaaaccagcactaaaagacacatccgtaaaagtcgaacaggaactagaggtatccgaaagcaaggcttgtataaaaagaacacctattaagacaattatgggtatgaaaataaaacgagaaatcgacttaaacttggaacagcaggacgcggttgatatcaaaaaggagttggaagctccagaattaattccaaaaccgcagctgaaaggcactccagtcaaagccaaaaacgatggagtaacacctcaaatgaatatacaagaagatgaaaacgaagaaacgggtctaaattccgtggaaaccccagccaaacctttgatgaagggtaccccagttaagcagcgactgggagggataaaggtgaagtccaacgaagaactgctgggagcaagactgcctggtacagtaacgcctgctaaaccgcagcgcaaaggaactcctgtgaagctcataaagctggaaacggaaactgaagacagcagcgatgaggcggccaaggaatctcccatcaagcaagatgggacattgagtgtggaaattctggacagtccaacgccacaaaaaccgcagcgcaaaggaactcctgtgaggattcccgtcatcaaagactcgaccaacgaaaatatccgctctatcctcagcaaaaaacggcaagtcttcgccgaagattcgcaaaaggctgtgaagtttagcgcgaacgatcccattgttcacaatttgagtccgcttgagagatgtccaaatggggaaaccaccaaggaaaatgacaagccaaaggaaagtgaagacaaccaggacgtaaaacccacaattaagaagccaaacatcatacggcgtattgttgtgagctctcgtaaaccaattatgaaatga

SEQ ID NO: 38547 - protein, 807 aa, DROSOPHILA
MYKNLDLDTLSVDDIVEEYKLLHDRHQQLKDQSEKDAQRIYELKRNLDTALAAESYLTQELEHLSSQPVAIASGGNGQELEELRRKFKTLKEEQDVLQQDYDAKVEETRSLKDKLTAAEKNLAEKSASRSNQLHDDFFARLNALELENCELLQKLAEYEDLRIANTLAVAEKEKTIECLQDRVSCMEQNLNCKRDELEEKLQLLESCQEQLVDANAKIALLTSAPENNDRKGNSLFAEVDDQRQAMKQILAAQKKSYLDMKKIFTDSQFEIRRLKRENVAMHTELQACSTIFCSADKTYQNKLNERIRQLMTANDSLERQLNLSQERLRQLASEKSVTWLDSMLDFCKYELPLLVDTALASLGNKLLSLTSYGLRETDELKAQLHSMRIQKAGLEERMRCVQQEMARWRFESLKSRCVLIDRENLLAEHKIVFKPMQAMEFNIKEAELKTALPRIVSVAAQSPSSSAQLHTHPETSLKSAAETTSKSFPTATEIIVLDAPLKPAIKEEVVEPLSQELKPALKDTSVKVEQELEVSESKACIKRTPIKTIMGMKIKREIDLNLEQQDAVDIKKELEAPELIPKPQLKGTPVKAKNDGVTPQMNIQEDENEETGLNSVETPAKPLMKGTPVKQRLGGIKVKSNEELLGARLPGTVTPAKPQRKGTPVKLIKLETETEDSSDEAAKESPIKQDGTLSVEILDSPTPQKPQRKGTPVRIPVIKDSTNENIRSILSKKRQVFAEDSQKAVKFSANDPIVHNLSPLERCPNGETTKENDKPKESEDNQDVKPTIKKPNIIRRIVVSSRKPIMK

SEQ ID NO: 38548 - DNA, 2228 bp, DROSOPHILA
tttaatttttgcaagtgcatccgggatcgtttgtcggtgtcccgttgtttcagctgggtcttgaagtgaacctggctgtgatcttgcagctccgtgtagatttgtacgacttttgcgacattttgtatggggcgatggatcgatccgtaccgatctgctcctccctcccccatttttgcactgttccggatcccgtcccgctcccatgtcgcctgctatgtacaacatcaagttttatcgctgatcgtgatcatgtaattccagcccacgcatgcgcactcggcgctcgcttcgaaggaatcaagtttagcgcattcttattcgactgagacgcagatggagctgaagatggagttggagttggagatggagacttccacttcggctccgatgcgacttcgactggaactgggaccttgtgacagatggttgtgaggcttcaaggcattccctcggatcgccccacccagctcggcccaggaaaggagccgaaaggaagggcaaggatagggcagccaggagcaggagggactggtttctcctttacccttgcacttaaaaaaacatctatgtatatgggaaattgttcttgaaacctatctgttcataactggggagttctcttctaaaaggattcagttaactaatctttcgacaccattgggttaattatttcttaagctattgatacaattttttattgagtttgaaaatcattaaatacttttttcacagtgcagctagcttaagcctgtgcgatctttatgtaaactggtacttgaaatttgaaatcatgtaccatttgccttgagactgacaacgatacttgggatgggtctggacactggggattggggacctgccagtcgaagtggaagtggagccgggcaatcgatgatcgtgtccctgaagaggagaacctccgattgaggcggcacaggaaacgagcatttaaaagcgcgactatcgaaatataacgacattaagccgaggctttcatttaaaggaagcttgtgtcaataccactgagcttgccttggaatgcgcaatcccgattgcagatcttttgatggcgccgccattcaggatgatccagggatccagcaatctccagcaagagatcatcctcgcgacgatcatcatcatccgtaagccggccactaagcgacataattgctaccgtgggactgaggatctctggtctccagactccagactcccggatcattaaatgccgcgatcctaatgcgctccaatcaaacacacacgaaacgagcgtatgacatgtttgtgcattattaatcacgataatatctgtataaatggtagaaaactgagagtccggtccaaattgcaatttaatgcaaaaataaattgcactcggtgctggactggctctttccagcagttttttcctgcttatttcgtggccaaccaaccggcagccggagagctggcagctcccatgattattggtcatttacttgggccgtttagcgcattaagtccgagttcccccactggacactcgcgtctgggggctttgcataaagaataaggaaataattgacagttgaaaagtctcagctatgattgcggctgtgattcgaattgtgattgggtttgctgtgccagcgtatttttgattcttctggcagcattcttctctcgctctttcgtctgcgattctgcggcgatgagatggcgtgcgatgagaatcatttcaatcaactggctgcgcttggggctgaagaaatcaacgcgttgactaatggccacaatttgcaagtgctagcaggttgatgcactcggaaaaatctccactattgcaaatggattttaagtgtaataatttccaggaaaccatctcaaggtgtttcaatctgaccgccaatccaaagccttttaagatcgttaatatttaatagattagaccattgttccatattccttactaggaactccacggtttccttagatgtctagaaaacatctggcttgtaattccttatcaggcgatcgcaatccttttatggccgccgatcacatttgattttagtgaattaagggatgttcgcttaaagttttcttccctctatacaatgttttcttgatatagtaataaattattcgtatgaataacttgtaaaaatagctataatatgagatttcttcttattggcaagttcataatgtaagctgcatctgttacttgtgcctaaatctat

SEQ ID NO: 38549 - DNA, 228 bp, DROSOPHILA
atgatccgggagtctggagtctggagaccagagatcctcagtcccacggtagcaattatgtcgcttagtggccggcttacggatgatgatgatcgtcgcgaggatgatctcttgctggagattgctggatccctggatcatcctgaatggcggcgccatcaaaagatctgcaatcgggattgcgcattccaaggcaagctcagtggtattgacacaagcttcctttaa

SEQ ID NO: 38550 - protein, 75 aa, DROSOPHILA
MIRESGVWRPEILSPTVAIMSLSGRLTDDDDRREDDLLLEIAGSLDHPEWRRHQKICNRDCAFQGKLSGIDTSFL

SEQ ID NO: 38551 - DNA, 2358 bp, DROSOPHILA
ataaccatgatgtgcaacgcaatgaatttattaacgagtttataactattattttataatgaggatatatgtgtctagttcgcttggaattgatgtaaattgtaagtaggtctgtgactctgtttcagagctctgttagccatgtgcattgtataaattcagctatttgtatctattaaatatttttaacataattattacacatcattgttaaagcatacaaatcgggttgccttatagtctgtaagagaacatttgaaagcaacatttgaccaagatcttccgtcacacatttcttaaaattctatgtggcctctctactgtctttcattagtcttagcgatcatgtctattatatttacgaataacatgcccttttaattgtcttttttaagtaaatcagctagaaattgaataaacaaattgatccgataaatttttttgtatttatacactattatcacaagaaattgtgaaagatactgctggccattgctgccctcaatgggtttcttcggttgtagtagataagatatttaatattaccaaattcacagtacacttcttaatttctttaagtgcattgtgaaatgaacactgcttttacagcatgtaaaaccgcccactcaacttgacctttttcaaggtacttcctatatgggcgcttctctgggcacacgttttctcttggcaaatagtgctgtggaaaatatgcaataaaaagaggaaacgctgaaatgcaaacgaagttggccaaaaacgaaacacaactacgtgacgaacggaagacgaattgccatgcagagaaagccgagaaaaatcagtcaaaatgctacaaaaattaaataagaacattctgtcactgacgttagtgcagatcgcaacggaaaactgaagctctgcaattggagtacgaaagtgcaactagaggatcgattggatatataatttatttcgcaacttagagagattgccgccatatgttaatgaactgaacaaaatggtttggatttcgagctgggggcaactttggctggtgttgctattggttgtgggcctatcgttgggtcttccgagcttggaaaaccagacacacgaacaaatcgaacagataataggtgagtcgtggatttattcgatacgaaactagattttaataactcttttctattctacattcagcctgcagacagccaaaggcacctggtttgtgccggggtcaccagttgcgatatgcctacaacaagaagaccggaaactgcgagagcttcatctacacgggctgtgcctccactgagaacaatttcctgaccttcgaggagtgtcgcagggattgcatgcaacgtctgcgctactgaagtcgcttttaacgatgcttaatatatatatttgttgtcacagaaattgtcaagtcatgcgtaaatcttagtagactacgatctctttggcttcttgccaactttcttgtgggccaacttcgatggattccgtttgcacagatagcataggactaggatcagtaaaattaaaggtaacaggatcagggctacactatccagtgaatggtagacaaatccattcagttctatgcctggagattgaagtagtctggcggcaatcaatccattgctaatgacgtgttccacagaccaaatggctgattccagaggcgtctgctgacgctcattgaacaccttggagacctcaagagatcgttgggcatagctgcaaagaaattggttaaaacaactttgcttatttgaaaagcattagaaaatcacctgtttttgctgagctctgcaagagctttctttaggtttggtacagtgatgtcttggtagtccaacttcagacccattccccgattttgcaccgagaatgcattaaggaattgatctccgtagattggggtgactagtaggggtttgccacaatgcaccgattcagtggttccaagtaagccgccatgggaccaaaacaactttacttttgggtgacctaaagtagaagcgatcttaagtaagaaaatgtaaatagctctcgtttgcgtttcacggcataactggttttaagtccattaataaattagaaacctgcttagggaatttaaacttacatagaagcgccaattggggagcccatttgacgaagagaaacttggaggcatctgtatcgggagtctcatccgcctcccatttccagatgatcttcaagggctggctttttagaacttctagtatggctgacagtttatcttcgtcaatacttgaagcccgcaccattgaaccccagcttatgaagatcacaccctctgctgattggttaaggaaattggcgatattctggggtaactcctgc

SEQ ID NO: 38552 - DNA, 294 bp, DROSOPHILA
atggtttggatttcgagctgggggcaactttggctggtgttgctattggttgtgggcctatcgttgggtcttccgagcttggaaaaccagacacacgaacaaatcgaacagataatagcctgcagacagccaaaggcacctggtttgtgccggggtcaccagttgcgatatgcctacaacaagaagaccggaaactgcgagagcttcatctacacgggctgtgcctccactgagaacaatttcctgaccttcgaggagtgtcgcagggattgcatgcaacgtctgcgctactga

SEQ ID NO: 38553 - protein, 97 aa, DROSOPHILA
MVWISSWGQLWLVLLLVVGLSLGLPSLENQTHEQIEQIIACRQPKAPGLCRGHQLRYAYNKKTGNCESFIYTGCASTENNFLTFEECRRDCMQRLRY

SEQ ID NO: 38554 - DNA, 2174 bp, DROSOPHILA
ccccctctatatagtaaatatatatcaaattaaagctttcaaccgaactgcccctgccccacgagaactgattgggggcagtagagtctttacacaacgcataaggaactggcaaaccgagttgtaaagcattttggattatttacactgcttgtcgatttaatatctatggcttatatagaaaaatggatcgttagcaagcttgcaatcggtaaaaacactttgtatggttaaaaacatggtttccgctctgtcttggttaactctcgatgataaattgttggcgtcaagcaattggattatctatatttagcaaatgcttatgcttaggttcgatattgataggtataggtatgtcgtgatatggtcaacacaaattgcgagtctaggtatcagagatggatagatcattactagagtacgaatatataaggttaaaaacatattttattgctggattaaacagaatggtaatttttagctaggtgtataattggtcttgaaccaaagtattgctttaatattggccttttcatttcagtgtgagatattacataggattcgatatataaaagtaagcaactaatatataataacagtcaaatggcttatatagagtaatatcctaaaccccttctgaaatcaaagaatacttttcataatatagcatcacaatcgatatttgatttaagattgatctccagctaattctgatccattgtagactcgttcgtgaatatatgatattcatttcgatatttttcgatatgaggctttgcgaaacacagtgtgtgatgatatgaggaaaacaaagacgatctcaagtgatacgagtaggttaggatccttttgctaactttgaaacacaccatctttgttcttagtgaatacgtatgcgaaggctctgtatgacatcgaatagatattgcttattggaggatatggggatcgtggataaatataaatagcaggtggctgaatccttggctgggctgctcctttagaggaaggccttcttgctggtctcctgggccgtggtggtggtggtcgagatgcccaaatccttgcccacactcgctgtggtggacaccgcaatgctgggtagtggtgttgctggttgtggtgcactagtggctccagtggctgaagtagttccaattccagacgctgtcatccccccagcggaactcacggggggagggggcgtggctgccaggggggtgggtatacggggctgaaacgtaggcttgcccatcgccagggcaggattgagatccagcattgtccggggactcatggccacaatgcttgcgcccagcggacctgcgaaaagttgagcaactttttgttttaaccccgccacagaaaggattatcagtttcggtttcgggtggataggaagtaggtggagtaggtggagttatatagccggaaacaatagatagatatagcagtgggaagtccgggaagagtaagagaaaaacagagaaagaaaaagagagagagaaataaatattattttcattaagtcggttagtcaagctggagtttccaaatctggtaaactttgattttcatatggcaggtgggaggcaactttgttttcttatttttttttattttttttcaaaattgctgatggtatattactgggtgcacttggttactacgatatacgagggttggtggtggtggtattcttgggaggggtaagtgtaacacgaacatgattacaaacatcacacacaactatggaaacactaatcacactccaagactcaggtcaaaatcgggtcacatgcagcatgctcggcaaataaacacacacataaggctagatacaatatctgcaaattacgttcggccaagatttccgctcggttggataagttggactcaggcagagtggggggggggtaaaactttgtagaatcaaatgctgggaaatcggatttgtgaaggtggctctaaactctagagtttctgcttgctacgaactagtttccaagtttttcaactatttgacacttttagttggggatttttcgggttggaagagagcaagaaagttggaggttgttaggggtagttaataaaggtttcttaaccaacacacacccgcccagcagagtccgagttttggttagctgatagttagatgatagatgaacgaa

SEQ ID NO: 38555 - DNA, 174 bp, DROSOPHILA
atgacagcgtctggaattggaactacttcagccactggagccactagtgcaccacaaccagcaacaccactacccagcattgcggtgtccaccacagcgagtgtgggcaaggatttgggcatctcgaccaccaccaccacggcccaggagaccagcaagaaggccttcctctaa

SEQ ID NO: 38556 - protein, 57 aa, DROSOPHILA
MTASGIGTTSATGATSAPQPATPLPSIAVSTTASVGKDLGISTTTTTAQETSKKAFL

SEQ ID NO: 38557 - DNA, 8123 bp, DROSOPHILA
tttatattcgttgattgtgccagacaatgactcatggcaggctgatatcgtaaccccaaaataaaatccccaattccctgcaatgctaatgagacgatggatttgattggtctactttaaagacaatcatctacatcggtatttcccaaaaactgatataaccagtgaataattgagggagtgactgaacctcccaaatatgtaaatacaatatcactatgtgatgtaatgcaaattattcattgactttgggtgcggcttttatatatatttctttgcataaagaaacattttaatattatggttcagatttaatgaatattttcattaatagttattacccaaagatattttaggcatccagctcgttaaaaaaagttttgcgttataatttgtaatacctttttatttaaatattgttctatatctaaatcctctatatcctcacttaaggcagggtattaacaagtctggtaagctgacattcatagcccagtaataaacgaaaccataacacattcgctcagctgttatcaggccgagttctctatttctctccccaaaaacacgaaaactcaatgggttctccgagttttctctctcggtgagacaggttctcgtatttcgcggcctcttcagtcagtgtgccatcgatttttcccgctggagcctcgtattgcaaccgagtgtatttgttgtcctaggaccgtgagtcagctggtctgcactcggttttcccttcggctgccgatttgttgtgacacttcatctgacagctgcagttgcattttcagcttttcctgcgctttgcaattaaatagtgaataacgcggtataatgcgccaaagaaaagccataaacgcgcaacggaaacggatattgttggattgtagaactaatcaaccgtatttcgagtgaaaccccagtgaaaacaaccggaaatagaaaacctcacgaacctgacgcattagcagaaacagaggggccaccacccctcgcaacacaatcaaaataaaaataggaaaaaaaacgagtgaaagagagaaatttaagtttgccgcgcccgtgaaaaaaaaaaaggaaaccagatttgtccaacaaattgcaccggaagaaagagagggagaatcgcagctgtagctctcccttttcaactggtgggtgtgagttttagatgcgtaagctagtgccttaccttcatatacatgtatatatatatatatatatatatggacttttgtgcgccttactttcgttttcatttcccacaaattgcacaaaattgcgcttttgacacaattaagaaaatgtgtttcgcgtgcttttcctttgtagaagtctcgtttcacttcccccaccgcttatcccctcattacactttacgcttttattttactcataattgaattctgatttatgtgaaggacaacaagcattgaaaagctgtgaaaaagaaaaaaccattctaaacatccgagcaaactaatttttttctgtgttagaaatcttagaattttggattgcaaatcggaattaaatttgatgataaatatattttaaatatattgttgaataaatgtattacattttaataaacaagtacagcccagctaattagggcagatattttaaaaattctataattcacacttatacctaacaaaaaagggtatttaaattcatgtcctgccggtagacattatccctaaaggaagagagaacaacaagtcagaaacaaggagctgaaaatgagtcacgtgggcggacaacagccagcaatttattgcagccaattaattttggctaacaatttttaacacctctccctttttccccttggagtatttcaattagtcgaccatttttcgaggcctaataaaaccaaggtggcttctcttcgcccatccgataaaaaattttctaatttgcttttattgtgatttatgagagatccgtgagcctcaagattttactacctccgtttttctccttatattatgtttctcactttacgcgtttcataaaagacgaatattttaataaaagtgcgaaatattatgtcattgaacttgaatcgtatgatagccacaacgatcaaggcgactttatcgggtgttaaccgtggacaaacgtgcaaatttacctatatattcaatgagagataagaaagcctatacattgataactaatggggcgtgaggcaaacagttgaaattatatggagcttatattgttgaaattttttttcttttttacaaaacataaaggtcaaataattcattatatacaagttacattgtcatattacatttgtaatttttgaaaaccttgaaatctaaaaacttttgcaacatacaaatgaaattcagccaaatcgatcgcctgaaaggtgaccaacaaaggttttaccccgaccttttgtaaaagaagcccaaatccgtctttaatgatcattatcggtgcgaaatttctccaactgttgtccaaacttgccaaaaagtaaaagttcaattttcagttgagcaggaaaatgaggagcagaacaacgatttctcattcagatgcacctgcaatttcgatggcctcgggtgccattcgactattgagacacagcaacagaaatcggccgcaaaagcatctcagcgccacttttccccattcccgggaaataaacttggctttagaaatcaaacaaataaaataggaactttttgtcaaccgtcacagaccagacccctttagctatacctgtgcaactaattcatttcatatttctgcaacattttcgcaataaaaagttttttacctctcgaaagtagacaaaaaggtacgaattttagctgttttactaggcgaatattaaatactttaaaacaattaatttatataattttttaaaattaaattttatatcctccttttctttattcggctaattatttccaagagattttaaatgtaacctatatttgcttttaatttatttcataaacttattttaaatcacgctttttcgcttctcttaaatttgcacttttcaatccttcaaaagttcatggagtgtatttctgatcaaaataaatggaaaaaaattgttggaagcccagagcaaacaatgcgactgattgaaaagttttttaattgatttttaaactcccttcgcagcacgaccacatcaacatggggaattcgcaaaatcgggctgcgaacgtcgatgagaagtcaccgccaggtggcgccagtctagtgcgaatgggaatcacagggggcggtggcgctggcgaagtgggcgtggccctctcggaaaggcgtggcagtcgagttcgcgtgctcagccgtttgatgggtcagaagcgcattcgcgaggcattcctacactctccgaaattgggatcgagttccgaggtcaatttgcagggcgctggcaacggaagtagcgattggatcgcggcggaaacggaagtggagcatggacaactggattgcagcgccgagccagcagattttcgtaagttaattcacaaatatcccctagcaatgtacagagaaaaatatcacttaaatttggcgagaaacaaaattcttcagcgtccattgactaatatataaaatttctccttaaataactttatgcctatgactaggcataaaaacaaattaacaaacgtaattttttctctgtgcaaccagttttctttgtcgttatttatatagttgactacccctgtgtataacccaactttatttgttgttgtaattctggatgtcattgtcggtgtgcatcaagtttgttagttttttttttctatttgtgaaaaaactgttattcccccttatttcctcctagcatttttcaataagccaactttatttttcaccattgttgctacggatgttctcttcttttatattcaactttttgttgggggacttttgttttaaaatgaaactccacagcttcagggtacagtctgtctgggatccataggtcaggtcaattgccaactgacggcaaaggaaaactggcccatggcgaatttgacaccttttgagtacaaaatcggaccacaacatttgttacaaatggcaaacgtaaataactgactattaaaaatatttaattttctattttgatcccaattaaatttgggttttaaacaacatttcgtgcatttatcagtgggtattaaattattaaaacagactgtatatcaaactgttttcaactcgactttattgcacttgaagcggagtttaaataagaatttttcgaaaacttttacaacaacaaaatagcgaacaaaaaataaacttttcatagaagttttttatgaaattttctacacccttctgcacttcctacatttttctcccccgtctcccttccaacacttgactcttccgaattttccagctttcctcagatgtttttgttgttgctgtggcacctttgtatgttgcacaactccgcctttccccccgttttccacgcccttgtatacgtttatcatccctcatcgaagccgaaaactctcaagtttttggactgcttgtaacttattggcatttcgccttggcaaaataatatttttacttagagcgctcttgttttcccgctcctttctttttttttttttttgcaaagtgaaatcaaaaatttatagattttagttattcatgtgaaatctttaagatgccccctttaaaaatattaggccaagcaacacacactcacaaaaacataaacagaagctcagaagcacgtttgccatcataactcagcaactgggaaagctggaaaagcgagaaaataaaccgaaaaaaaagcatcgggaaacacaaaacagaacccaaaaacaggacgaagaaacagagacccacttcaaaaactcactgctgtctattaacagccataagaaaaacgcgtcgagttcaaaagctgcaggcgtctcgtaccaaaaaatgaaaaaaaggaggaaaaacaagcgccaaataaaatcactcaaagctgggaaaatatttcgatgggaggaaaagggttaggaaaagctgaactcctaatgctcttgttagcgaagaaaatagtttcgaatggcaggacgccaataatttgatatcaattatattaaatgatatattggcttatcaaattatatattaatggaattatcgttaagctgaaccgagcaagagatagttacctcatcttagatatgcacaggatataatccttaagtagacttacaacttacgtcgtaccttgaacaccatttgttttccaaatgcattcaaatttgaggcaaactaacttgccaaccatttttgatggtctattttgtttggcttcggttttttgagcgcatttacaaaaatgcgaaaatcgcgttcaaggctgtgacgcatatcaaaaagcaattcagagtggaaaagagatgctccatcaaaaccacctcctttagcccacccgaatgcaagaagctttttggcattgcagcggagcaaagcctaaaatcaaatcaacgaaaaatcctaaacgtgctgcgccgcgggtgaagtgcggtgggcaggggaagttcggggatcaggatccgtggaggagctctctatatcaaaaattccctttcagcgaggagcgacgatacagctatagctctggagattctccctttcattcactcgcacccatgaacccatctgttttggggcctttttcaatgcataaattcataattcatggggccaagaaagagcgcctgaaggtggtgcagattggggcaggaaacccctcgaaaatcgcataaggctcaaggaataaagtactgccaaagcttccctttcgaccacaatgtgtaccctgtaaggcaacatacctaccactatgattccaagtggttctaagaacaaaacgaatcatttgtaatggtttctcaagagacccacgaattgttttaccaacaaaaactagctaaactaatgtaatattgccaaaatcgaaaagtaaattgtatgaaaataatttgcttttgacataaatacgatttttgcccgtttaaagaaatcaaatccacaaactctacaaacgaaatcaaataccccagagcagatgtgaaaaaccatgaaaattttggaaatttgggcgggttagctgaattttagcttaggactcctttttttggtgtggtgggggagggggaaagtgcagcctttggcggagttttggcaacgtgctcaattaaactgccacacccaccaacacaaacacaacaataataccaacacacacacacccacacacatgtatggccgttcgcattatggtggaaaagtttggtatggcatggcacgtggctggccgctaatatttatggcaattagttttattagtttcgcttgtacatttccatgtaaagttgtaaactaactcatccaccatgccttcctgcctgtctatgtgtgtagttttaacaactgcttaatgttgtttacaatttgtttataatgttgcaataattgagcattttaagtacccagcattcaaagcgaaaaatcgtttgcatacttttgggagcgcataatgacattttattgagctgcatgtcaaatgtagggccaattaatttcgtaaaattagtcaatatgccattggattaataagttctaattcctctacctttaataaagcgtctgactagaactaaaatgtagccttaccctagtagcatttatcaaatttgtcaggctgtgtgaacatttgtgtaaaaccattcaaaattcttcgaaatttctatatcaccattagagccatgaatgtgatttagaatgtttttagaactcattaactctaggctttaaacatagagttaggaaatgatattattcatttgaagagagtttagcagccacatatgtatgtcaacgaaacatacttaaacatattcaacaatgcagaccaaaagtatgcaaactgacattgttttttgtaaagcgcctgcgaaaccaccgaggctaagaaggcagctccaaactccagtcgaaagtgaggatcattgcagtttgagtttgggccaactttgtcagctacagctacagtacgataataagcgccatgaggaggaatcccagaggattttaatgcgagagaaggaaagggttcagaacacgcccccactaaccaagcagccgcgaaagagacgaatagccccacaacctccaccgaaacccccaccaaaaccgagaaaaattcgtactgagaaaaccaccaacgatgaccactgtgcgttcattgagcagctctttttcgaaacaactgaggcaaaaccatcggctacagtggttgcgggtaagctcagtgccggaaaaaaacacacgatttttgccctcgacgtcgctgctttgctaattaataccctcaatattttaagtactgggtatgttgggtttattgcagggtacgaaaaagcgaaaccctattctgaataggcaaataataaaatgaattcttcattgacgtaaattcaatttagataaaataaataatattactatattttcgcaatctagtccgcagctgttccgatctctaaacgcaacgaataattatagtaggaaaagtatttaaaatacataccttaaaaagttcatttccaattaagttgatttctaagttaattcttagttgtatcattatcgaaggtattcaagctgtcgatcatatctcgtgtgatctttttcacgtttctgctctgctttcgtttcatgtaactcgagcttaagaccgtcaacaaaaagcatacataaatgcatatacatatgaatatatttctctgtcggttctctctctctctctctctatatatggtcgctctctttctccgcttggtgtgcggcttttgactttccagtgggttttaattccaaaccagttggttgttagtaacgctttgaactcgcttccgcgcagatcggtccatgttgaaatcgaaaaacgctctggaaaatagaaaagttgaatgtaaaacaaatagaacagaagggcaattgcgagtgcagtgtgaaaaagtgtgaaaagtgtctgtttttgaggaaaagttccttgccaatgaccggattagcaatctacaggt

SEQ ID NO: 38558 - DNA, 637 bp, DROSOPHILA
acacaatcaaaataaaaataggaaaaaaaacgagtgaaagagagaaatttaagtttgccgcgcccgtgaaaaaaaaaaaggaaaccagatttgtccaacaaattgcaccggaagaaagagagggagaatcgcagctgtagctctcccttttcaactgatggggaattcgcaaaatcgggctgcgaacgtcgatgagaagtcaccgccaggtggcgccagtctagtgcgaatgggaatcacagggggcggtggcgctggcgaagtgggcgtggccctctcggaaaggcgtggcagtcgagttcgcgtgctcagccgtttgatgggtcagaagcgcattcgcgaggcattcctacactctccgaaattgggatcgagttccgaggtcaatttgcagggcgctggcaacggaagtagcgattggatcgcggcggaaacggaagtggagcatggacaactggattgcagcgccgagccagcagattttccgtccattgactaacgcctgcgaaaccaccgaggctaagaaggcagctccaaactccagtcgaaagtgaggatcattgcagtttgagtttgggccaactttgtcagctacagctacagtacgataataagcgccatgaggaggaatcccaga

SEQ ID NO: 38559 - protein, 113 aa, DROSOPHILA
MGNSQNRAANVDEKSPPGGASLVRMGITGGGGAGEVGVALSERRGSRVRVLSRLMGQKRIREAFLHSPKLGSSSEVNLQGAGNGSSDWIAAETEVEHGQLDCSAEPADFPSID

SEQ ID NO: 38560 - DNA, 2669 bp, DROSOPHILA
cacacaaaaaactaaaattcaggcagacaaattaaaactaagcgctgcatgtgcaaacaaccgccccaccaacccaaacccattttccgaccagcactcgacccaatggcgtccactcgaccatttgctccatttagctgaatacacactcgaaaaaaaagggaaaactgcccaaactaaactgcgtgcttagttttatttgaccggtgctgctaaaactgtaaagcgaccacaagtaaaagctccaaagtttcacttcccgcgtaccaaaaatgtgtaaaaacaaataaaacgaacaaccaattgcagccggcgaaatttgattggaattgttttcagaaaacttattttggaaatttagcaccatcaattatgtgaaaatactttcgagcttatgaaaaacgcggaaattctcatgttgaaattttattgaacgcccacaaaaagtcttcgtatgcaatataaattacttttttggtactatatgcctgcaataaattttatctcgattatttccggttaatttggttcagtcagagataaaaaattttggaataatatgccatggatgcgaattaaatttttttacattaatggaatatttttatgaatgaaatatacgattaaaatatgcaatgcttggaacttaaattcaattaaaataatttaatttccgatcgatgaagttaaagttaaaaataacttttgcttctatattatcaactaaataaaatagaatttctaagcggactttatgggtaaataatcctccaatttgtgtggaaattcttttcgggaacacaaaccaatttggatgcagttcttccaccgcctggccattgtgttatggttggcgtggcatgtgaattattcatttttgtggtatagatttacaatttctacgagctcctacaaataccattctattttttttttttttttttttttgtctttattttttctggcaatgttgattcttttatttttgctgcatataccaatgcttcagctctgtgatggtattgattttcgtttttgctctgctgcgttaataatagtgaaacaaaataaatcaaatcagtttagcagcaaggatatatcaatgttgttatatgaatttgtgttggatttcgacgggttcgctcttaattaaatgtatgcaggctgaaatttgcacaaggtaattgaattgccgctgccagttatccggaaataaatggtgtatgcctagactggaagaaaccattgtacaaaatattttgtaatgtttcgaaaacatttaagatttcgagattttaattactcagatgtgccatttagtacttaataaccagtcatattttaacagtataagagtaccattaaatgatttattagcatatatatttttgcactcttttgaatttatttagccgtttttgcgtggtgtattcaagcttgtgtatcattctgtgtcgttgcaggtcaactttggctctcgattggcctgatctccggggacgattcgctggacacgcgtgagggcgtcgatctggtgctcaagtgccgcttcaccgagcattacgactcgaccgacttcaccttctactgggcgcgatggacctgctgccccacattgttcgagaacgtggccattggcgatgtgcagctcaactcgaattatcggtaagtttgtgcaatgggccgataaatcacggacacaggcctggcctcataaattccgcgctgatggctgatggctgattgctgctgcctgatgcctgatgcctgatgcctgatgcccgatggctgatggctgtcaatgaggcagccgggaacgtcgagggctaaggacatttatttaattgctgtccagggcaggattgttttccctcgcgataaaagatgaaggatgcgccacccaagtctcgggccttcgactgttaaatttattaaaattgccaacgacaacgtcatcgatgccattgtacatcattaaatgttcatctggctggcgataattcattgccaacaagttgatggctccccctttttatcccttcgtgtatccttttcgtgcctttcggccatctggcgcatctgttgacccatgatctaggctggttggcgaaaattgttgctatacaatggcaggatatcggagacaaaagatgaaaacttattacgaaagttgtaactttgctaatgggaacatggaaaatcattaaacgtttattgaagttctgtgaacaatgcttgtactgattataaatattttgaacgaaaatacgcatacaaaaagcgcagcgactttgtacacaaccggatggtgattgtatttggttactggtaacacattgcgtatacgcaatctatgaaatataaatacaaatctgaaaagcagaaagcgcgtccgaaacttttcgaaccgttcaaataaaataagttgaatacttctcagagacctgcaggcatatttatttattaatcataataatcattttccatagcattttgagcgtgaataaacaacaacaaaacagaggcaaaaacacaacaaaaataataataaaagatgaagggagtgggaaaagaacattcaatgcggcgtatgctgcaaatcgtttggaaaatttcaacaggccattcaaaatacatgccagacaaagagcccatcacaacgttaagag

SEQ ID NO: 38561 - DNA, 219 bp, DROSOPHILA
atgcttcagctctgtcaactttggctctcgattggcctgatctccggggacgattcgctggacacgcgtgagggcgtcgatctggtgctcaagtgccgcttcaccgagcattacgactcgaccgacttcaccttctactgggcgcgatggacctgctgccccacattgttcgagaacgtggccattggcgatgtgcagctcaactcgaattatcggtaa

SEQ ID NO: 38562 - protein, 72 aa, DROSOPHILA
MLQLCQLWLSIGLISGDDSLDTREGVDLVLKCRFTEHYDSTDFTFYWARWTCCPTLFENVAIGDVQLNSNYR

SEQ ID NO: 38563 - DNA, 2252 bp, DROSOPHILA
ttccgacctcgttcaccactgcggatacggtggattgttgtagggctgctgatactggtactgatactcgtacgcctgctgctgctgctgcggatagtatccattggtggtggccaccgtgacgccgccgtagggttgcggcattatcacctgtgtgccgggcacataggtagccgccggggtcatgtagactacctcggcgggccgaggcggaggcggcggcggatagtagccgccaccccaaccgggaaccacatcaatttcgatatttggacgaccatggtgatggcgaggaggatagccacatggatcttcatagtaccgcatagttgattaactagccaaataatcaaccagccaaccgaaccaacttcaccacccagcaacgcgttgaatactggaaagtccgtggcacaacacgtctagctcgaaacaaactggaactgcgaagctccatcaatcagggtttgtgggaattattccagtggttagaggcaaagataagatggcttagtcattcgacaaggtctgataacagcgaccggacagttgtgcatttacaggtgatcgggtttcgctattttactcgcattttgtttactatattaactgattccggcttatctatgggtaacgcgttattatttctgatataggagcatagaagcattgacagagcattggtgaaaatgaattaaagttttgctagacattaacaaaacaacaagtgattgccgtctaaattaaccaggtgttccgataaagacttaaaaaaaaaaaacacggattagagattttgataataaaaagagggagtgtgtgtgatggaatcaactcgattgaaactcaaccattactcatgacaaatatgcaaaaaaactaaaaactataaactaaaacttagtttataaggttatactttattgaggacatatagttgttaagtaaggctacgtggtataaattcattgtgaaggattttacagatcaaagttccttctcaatactgtggattgtggtagtggctgctgccgggcggtggtggtggtggtggattttggtagtacggtggcggaggcgcctgttgcaccaccatgactggtggcggtggcggagcctgctgctgcaccaccacaacttggggtggtgggcggtgatggcggcgtggccatggtggtgcaatctgtaccttaatcacgggtccacgacgatgaggcggtccgccgcaatgatcgtggggtggtggtggcatagtggtgcactaatcttctgtagaaagtccgtccaaatgtgtcgacttatcgctggtaactgaattaagcgaatgcccaactcatgggactgactaaccaaacaaacgccaaaatatttgccgtcataaaaaagctcaatatcagcatttgctgatagcgaataggtaggtaggtactcttaattatttctattgacgaaagtattgcttctagagcaaagttatcgataaataaactgaaaattggcaaatggtaaagcttttttcgaataagcttttcaattcaaatttgagcctgcatatcaatagattttcctcgtttctttaatgagtcatgtttggttttttccggggatttctccttaacttacatatagtcatgtaaatacttgtttaaagttttaaaaagaaataaagtatttcgttgtcacgaagaaaggaaatgaaccaacgtgcaaatatttgtatttggttaaatgcgattaaattccttaactctagtgaaaacaaactttagcttgagaaaatgttgtcaagccacaaatatttatccaattttcagccccgaaaaattcccaataattctttacacattttccttagccggcaaatatttggcaaacatttgcacgtctattatgcaaagtttgcagacacgattttgcctcgaggggcgacgtgggtaaatattaaatgtatggatagaaaaacatggtaatttctgacggtcaatcaagaaaagtctctcgggactctctgaatctcaatcacttgatcaaataaaattcggaatattcgatttgacaaccaggagagcggcagcctttttggctgtacttaattgagtggttcgtgctgcatttcgcatttcattcgctctttgaattgtcacttcgatcaaggaactggggttaagggttacggcttaagggttaagggtgcttgccctaaaaagttaaacatgcacaaagtggcaaacgagtttcgggcaaagttttca

SEQ ID NO: 38564 - DNA, 252 bp, DROSOPHILA
atgccaccaccaccccacgatcattgcggcggaccgcctcatcgtcgtggacccgtgattaaggtacagattgcaccaccatggccacgccgccatcaccgcccaccaccccaagttgtggtggtgcagcagcaggctccgccaccgccaccagtcatggtggtgcaacaggcgcctccgccaccgtactaccaaaatccaccaccaccaccaccgcccggcagcagccactaccacaatccacagtattga

SEQ ID NO: 38565 - protein, 83 aa, DROSOPHILA
MPPPPHDHCGGPPHRRGPVIKVQIAPPWPRRHHRPPPQVVVVQQQAPPPPPVMVVQQAPPPPYYQNPPPPPPPGSSHYHNPQY

SEQ ID NO: 38566 - DNA, 2315 bp, DROSOPHILA
gccgatgttgaactcgatgaagggagctcttggtggcaccacatccacctcgataatgggtcgtggtggtggcggctggtagacggcagctggtgtgatgacctccaccctgggcggtggtggtggataccggccgcccactccgatctcaatcactggtcgaggaatccttggcggcacaatgtccacctctacaattggccttccaccgtgatggtgatgatggtgatgacgacgttcctcctcgtagtacggcattttcttcagaaactatccaagtattgtatccttagtgggtgaagtgaatgcctttgactgctttctcgaactgaacttgcttcttcgcctgcttaactatttaagtcaatttttatcgctaatgagggggaattttttttcctaattttgttatgtgcgttttgcacagtagcttagttggttatcttgtcaggtggaataaatgtgtttttttcgataaaaaaaaaataaaattgataagtgccatttgataaatacgaaattccgaattgaatttcatgaggagagttcaaggtttccatgaatcacaattttatatttaagaggaaggacttaattccatgcttctgattgatgactcacactaaattacataaacataaataaaatcgataatgcagtatttagaatatttttagaattaaagacgggtaggttttttgaagagcaagatattttatttatttcgttttaaggttatatagcacaattatattttctttgaaacggttaaagttaaattccagttttgtttttttgtaccttcctctggttattaacttgttaactttgtggtgcgtaatgtcaagaccattgcaccatttgcgttgtcatttcaacttaagattaggacaaagtgatatttgttttgatttcttgttatctatcccttccttcactccatcgatagtatattttttttttgttagtggtgatggcttcgtttccattccgacctcgttcaccactgcggatacggtggattgttgtagggctgctgatactggtactgatactcgtacgcctgctgctgctgctgcggatagtatccattggtggtggccaccgtgacgccgccgtagggttgcggcattatcacctgtgtgccgggcacataggtagccgccggggtcatgtagactacctcggcgggccgaggcggaggcggcggcggatagtagccgccaccccaaccgggaaccacatcaatttcgatatttggacgaccatggtgatggcgaggaggatagccacatggatcttcatagtaccgcatagttgattaactagccaaataatcaaccagccaaccgaaccaacttcaccacccagcaacgcgttgaatactggaaagtccgtggcacaacacgtctagctcgaaacaaactggaactgcgaagctccatcaatcagggtttgtgggaattattccagtggttagaggcaaagataagatggcttagtcattcgacaaggtctgataacagcgaccggacagttgtgcatttacaggtgatcgggtttcgctattttactcgcattttgtttactatattaactgattccggcttatctatgggtaacgcgttattatttctgatataggagcatagaagcattgacagagcattggtgaaaatgaattaaagttttgctagacattaacaaaacaacaagtgattgccgtctaaattaaccaggtgttccgataaagacttaaaaaaaaaaaacacggattagagattttgataataaaaagagggagtgtgtgtgatggaatcaactcgattgaaactcaaccattactcatgacaaatatgcaaaaaaactaaaaactataaactaaaacttagtttataaggttatactttattgaggacatatagttgttaagtaaggctacgtggtataaattcattgtgaaggattttacagatcaaagttccttctcaatactgtggattgtggtagtggctgctgccgggcggtggtggtggtggtggattttggtagtacggtggcggaggcgcctgttgcaccaccatgactggtggcggtggcggagcctgctgctgcaccaccacaacttggggtggtgggcggtgatggcggcgtggccatggtggtgcaatctgtaccttaatcacgggtccacgacgatgaggcggtccgccgcaatgatcgtggggtggtggtggcatagtggtgcactaatcttctgtagaaagtccgtccaaatgtgtcgacttatcgctggtaactgaattaagcgaatg

SEQ ID NO: 38567 - DNA, 315 bp, DROSOPHILA
atgcggtactatgaagatccatgtggctatcctcctcgccatcaccatggtcgtccaaatatcgaaattgatgtggttcccggttggggtggcggctactatccgccgccgcctccgcctcggcccgccgaggtagtctacatgaccccggcggctacctatgtgcccggcacacaggtgataatgccgcaaccctacggcggcgtcacggtggccaccaccaatggatactatccgcagcagcagcagcaggcgtacgagtatcagtaccagtatcagcagccctacaacaatccaccgtatccgcagtggtga

SEQ ID NO: 38568 - protein, 104 aa, DROSOPHILA
MRYYEDPCGYPPRHHHGRPNIEIDVVPGWGGGYYPPPPPPRPAEVVYMTPAATYVPGTQVIMPQPYGGVTVATTNGYYPQQQQQAYEYQYQYQQPYNNPPYPQW

SEQ ID NO: 38569 - DNA, 2324 bp, DROSOPHILA
ttaagtggttttttaggatacatttttacttgctattctcgatagtttaagaatccaaaaataattatcttgactcttctcttcatgagtaattaattcttttttagatatcaattcccgaactcttatcatgaaaaatatttttcatttgtatacatatacattttaagccatagttggatatgcaattcttatttaaatacggcaagaatggtataacttttcatataaaatcataattcaaattttactttgagtccagcaagatcttttatatttattacgccatttaaattgagaaaactattgcccagttttcgttataataaagcttaaaatatgtttatgtactgacagcactagttgtacaataattgataagctggctacgaccagaggacatcaatcatttcccaccagtcagatagcaaaaccgaagccaaataatatatacaaaaaccacaaaaaatccacgaaagcaattacccgtacggaaaatagagagtggaaaaggaatcatgaccatgaccattgtttatgtcgttcgcctgcagttcaattttcatatttgtaccattaacattgcaaataaatgcaggcatatatattcgcaatatgaaaatgtgtcacagcaagaaccgacattgaaaaccaatcaagtatatttcaattaaggtaaagtgcatttaagttatttaagcaaatatttcgagcggatttacaattgcattggcaataagattgaggcaaattaaaatgtcagcttacatgaagaaatatgtgcgtaatatatagtatactatagtatatagtagtataaacacgaaattcaaacatgaaggagtgaactgtttatttattttttatttttattatacaagagcttaggttttgtaaaaagttagtttatagtttctatttgcagaaatacatgaagtttaataaatatttttaaagttttttacttcgttgttgaacgacggtcatatggagaccacgcctaccacctgggcggtgggggctgctgaacgatgatgacctcttccctgggaggtggacgccgaccgccgatgttgaactcgatgaagggagctcttggtggcaccacatccacctcgataatgggtcgtggtggtggcggctggtagacggcagctggtgtgatgacctccaccctgggcggtggtggtggataccggccgcccactccgatctcaatcactggtcgaggaatccttggcggcacaatgtccacctctacaattggccttccaccgtgatggtgatgatggtgatgacgacgttcctcctcgtagtacggcattttcttcagaaactatccaagtattgtatccttagtgggtgaagtgaatgcctttgactgctttctcgaactgaacttgcttcttcgcctgcttaactatttaagtcaatttttatcgctaatgagggggaattttttttcctaattttgttatgtgcgttttgcacagtagcttagttggttatcttgtcaggtggaataaatgtgtttttttcgataaaaaaaaaataaaattgataagtgccatttgataaatacgaaattccgaattgaatttcatgaggagagttcaaggtttccatgaatcacaattttatatttaagaggaaggacttaattccatgcttctgattgatgactcacactaaattacataaacataaataaaatcgataatgcagtatttagaatatttttagaattaaagacgggtaggttttttgaagagcaagatattttatttatttcgttttaaggttatatagcacaattatattttctttgaaacggttaaagttaaattccagttttgtttttttgtaccttcctctggttattaacttgttaactttgtggtgcgtaatgtcaagaccattgcaccatttgcgttgtcatttcaacttaagattaggacaaagtgatatttgttttgatttcttgttatctatcccttccttcactccatcgatagtatattttttttttgttagtggtgatggcttcgtttccattccgacctcgttcaccactgcggatacggtggattgttgtagggctgctgatactggtactgatactcgtacgcctgctgctgctgctgcggatagtatccattggtggtggccaccgtgacgccgccgtagggttgcggcattatcacctgtgtgccgggcacataggtagccgccggggtcatgtagactacctcggcgggccgaggcggaggcggcggcggatagtagccgccaccccaaccgggaaccacatcaatttcgatatt

SEQ ID NO: 38570 - DNA, 324 bp, DROSOPHILA
atgccgtactacgaggaggaacgtcgtcatcaccatcatcaccatcacggtggaaggccaattgtagaggtggacattgtgccgccaaggattcctcgaccagtgattgagatcggagtgggcggccggtatccaccaccaccgcccagggtggaggtcatcacaccagctgccgtctaccagccgccaccaccacgacccattatcgaggtggatgtggtgccaccaagagctcccttcatcgagttcaacatcggcggtcggcgtccacctcccagggaagaggtcatcatcgttcagcagcccccaccgcccaggtggtag

SEQ ID NO: 38571 - protein, 107 aa, DROSOPHILA
MPYYEEERRHHHHHHHGGRPIVEVDIVPPRIPRPVIEIGVGGRYPPPPPRVEVITPAAVYQPPPPRPIIEVDVVPPRAPFIEFNIGGRRPPPREEVIIVQQPPPPRW

SEQ ID NO: 38572 - DNA, 3003 bp, DROSOPHILA
ctggtaaaattctagcatattcaatattcagattcaaagactgtagtgatttgaatacatgccaaactgcgagaataaattcgcacattttttcgccaagtgcataggtgtaggcccaaacagtcgattgccttgccacggcggccgaggcaatatttcactttatttgccttttgattagccctaatagccagcgttaacagctagcaggtcacacacacacgcacgcacactggcgcagttacactaatacaccgccacttgttgcaacagcaacaacaattaaacaacaactgcgacgacgagtggcacataaatttgtattctaattacttgcgttcagtcagcagcaggtcgacggtttaggtcagcatttgtaatttatgtggctgggttttgttgcctttttaaaaaagatatatgcgattatgcgattgccggtcgttctgctcgtagctgctagttttgtggtgtggctggttgcatctaaatactttaaacgaaatgtgtcatgtgcatttgcgaggggaaatgcgaaaaacagagggttaaacgccgaggactggctgttcattgtctccttccttcattatgctaattttcagatattcagatggtgttgtaattgccgcatagcatgcaaattaagagaaggtcgacttgtcggatggatgattccgcgtggaaaagcactacaaaataccaagactccaccatccaatttggctctaattagcaatggtcaagactggccatttatggaaattattttccatgtcagactgtggaaattattaatgatgctcaagtggtttgggtgcgagtaattgcaaagattaccaggggattgagagtgggcgcaacgtatatctatgctcatattgaggattggttttaatcgcgatttaaatggactcccttgttaatttcaaattcaattcaaagcagatgctaacgccctgagtatgccgtaagtattaagagtatatctaagttcggtctactcacagttaacattcaatgtggcagtggcctccaatcgctttccctcgttcatggcacgatttctgactacacacttgtacttggcaccgtcatcttctctgcgaggaattatggatagcgtggcattggtgggctgatccttggtaccgccctttaacaccgtcgctggcaggggcgtattcgaaccctcgcgataccaactgtataattgatttaaatataagtaaacttatagtagtttcagttatattccgaacttacgttatggtgggatcgggggaaccaccgatgctgctgcatgtcagctccatgggcttgtcctcggtggccacggctatgtttccgggtgagatcacgggtggatgaggtggcgtgagcaccgtgagattgtggaactcctgatggacgtctgcgcccgttcccttggccttgatgcggcactcgaagcgtccattgtcacggttataggacacattcttgatctgcagatcgtaaatgccacgctccggttgaaagtcgagtctggaaggaaggaaggaaataaaataaaatgaattataggtaattaataccaagatctgtgcattaaaatacttaaatatataaattaaactgcgtattgcgtgtatttttcggaaaagcgaaaaaggaaacaagcttcaaaagttaaatgtcaaaattcagtcaatcaatttccatttgcctcgaaatcaatttatttttatttgaaaacttccaggcgacttctgtgcgccaatgccaggactcctcagtggccgtcactaattgtgctaatattggattttcccactcttgtccttgattcgcttcctgttttctgcccgcaggtggccaaactttaaacgctcgtaatataaataaatacgaaatggtaatatttgacgaggggggggggggggcgacacgacaaggcgttttcaggggtatgcacaaaggaccaatataaataaaatcaacgttcgaataaatgtttgcatatttttcctagacaattttcaataagaacctgcgtcccagacactggcaactcgagtgaaatgtaaacagggaacgaaggaaagtaattttcacacagtctttggaattttaccaatgtttaccttattgttatttttatgtgccggactattaagctctgagggttcttatggcgtaattgctttgcagcctcgtaaaccaaattaattgcaaaaaaaatgtataattggaaaatctatttcatttattatcatgttgcatattgagctaagcaaacgttctttgtttcttactaaatatcatttatttttcgtttttggaaagttgcaagtgttctttttttttataacattctaaattaatgaataactaattcggaatacccgtaatcttaaagccttaaattcaatatgaaatatattgaaaattcgctcccttttatctatccaaagcaaaaagggacaagtttgtcaattttctgcttttggcttctgtcagacattcattccccctccatcatttatcttgacttcattttgccaatgtcttaatatttcaaggccacttcagtgtcctccatttgcgatttttttttttttttgtttggtgctgccatttttcacaatttctcaataggatgatgatgattatttggtcgtcatcgtcgttgtcgtggacaactactgaaaattgatgccgcccgaatgcgcttcgctggattctcggcttttcctcgctggccagtcagcagtttattagattggcaaacaagatgcccctcctcacactgcctactgcccacagctgggagataaaattttcattttccatttgcagagacttttccgagttcatttgtcaagctgcaagtggacttttgactgacactgaaattgcttctcatcttgaggatttttagcgaggtatttttgccatccgattttctgagacatcttagctttgtgcacttttggtctagacaattttgcgattctaatt

SEQ ID NO: 38573 - DNA, 486 bp, DROSOPHILA
atgcaaacatttattcgaacactcgactttcaaccggagcgtggcatttacgatctgcagatcaagaatgtgtcctataaccgtgacaatggacgcttcgagtgccgcatcaaggccaagggaacgggcgcagacgtccatcaggagttccacaatctcacggtgctcacgccacctcatccacccgtgatctcacccggaaacatagccgtggccaccgaggacaagcccatggagctgacatgcagcagcatcggtggttcccccgatcccaccataacttggtatcgcgagggttcgaatacgcccctgccagcgacggtgttaaagggcggtaccaaggatcagcccaccaatgccacgctatccataattcctcgcagagaagatgacggtgccaagtacaagtgtgtagtcagaaatcgtgccatgaacgagggaaagcgattggaggccactgccacattgaatgttaactgtgagtag

SEQ ID NO: 38574 - protein, 161 aa, DROSOPHILA
MQTFIRTLDFQPERGIYDLQIKNVSYNRDNGRFECRIKAKGTGADVHQEFHNLTVLTPPHPPVISPGNIAVATEDKPMELTCSSIGGSPDPTITWYREGSNTPLPATVLKGGTKDQPTNATLSIIPRREDDGAKYKCVVRNRAMNEGKRLEATATLNVNCE

SEQ ID NO: 38575 - DNA, 8678 bp, DROSOPHILA
ttaagagttcttaattcgttttttcgctttattttgtggcatttgctcttaaacacttgcttactaattaaattcatttcaaaattgtttaaaattaactacaatttaatttaagttgccgctgctgcttatttactttgcaagtcaagtaaatatatacaattacacatgtatttacatttaaatcttagctacataaaatgttgttctctcgatcttctcactttgtgtctgtgccattgtcaaaaagttgcaaaacacatgataagggttaaaaacacaacgtaatgcacaaacaaaacatttatattaacttaaccaattcatttctagtcgacctaaagataattacaattaaaattttgaatttcaacacaaagttcgaacaaatggaaaacagaacaaatagtttcgttagttggtacattttgtaaattaaattaaagttttcagaatggaggagccggtttcttttttgttttactttttatcttaatatttttcaattattttcaataatttttttaaagttttctgtacttttttttgtgttttttatatatcttacttaaagcaacgttttctttttttcgtatttatttaaaagtttaaaattaggttaaggtaagttttgtttccttttgtttcgatttctttttatatattttcttgattttttttttttgtggcaggtcgtactgtttatgtatatattttatcttttgtcgatctgtgctggtaatattgcacagaaccaacaagaatcacttacgagttaattagcctaagcctaggtgaaaagtgagattttgttttcgatcgcctgccctcggaaattccgccttacaatttaaagttcgtttgtttgcaactgggacctagatgaccattattattaactactacttagccctatgctaaatggtaaatcgtaacatttagtgctcgtccagtgatggttttaatccgtgtgtgtattttgggctgtatttctctcagtgtattatgtcaacaaagtgctgaactagagcaatgatagatcggaactctaatcctatggtatatggtattcgtttcgttgccaataaaactcaacacacgtttgtcgtattcctcaaactaagcttacatcgaagtaatatattaaaaagtattcaaaatggccacttttcaaaagatctgctgctggcagtcgagcgggaagttaaaatgataattagaatgggtttacagtcgatgatcatggaatttagcgtgtgagtggaaaatatttgagtgctgattttcagttgtttatgcgatttcccaactagaatttcctagacaataatctcgcgtatgacgcgacggtttctggcattcggcgttgtcgaatattcgccctcgaagctgtcgtcgtagctcaaggacatgtgctgctgcgggggaaggacctcgtcctgttccaaatgctccatgttgtagggattgggcagaccgcttacgtcgtgatatggtgaatctggcgagtgaaaagattgtggaaattgtttaaattagtttaccaaaatgggcggaaaagaggcaaagtcatgcgcaaacaattaaaaacaaaatgctaatcaaaacagtgtttttttttttttggaggggagtgctgggctgtgtactaggctgtctgtgaaaaatcatagcaaactaaggcaactcaaaaattctgcatcatcacagtaatggaaccaaatttttgttttttttttttgattttcgtacgaaatccttgccgactttaacttacttcagcctgcgcgctccgttagagcgtaacatcctgtataatgtccgctatagatttgtttatggtatgtatacatttatggtttttttttttttgatttatgagtgggcaagacatgtgtgagagtagtagagaaaaaatagccatgttagggaaaagatattacacgctaatacttaaggtctagcttagaatgaaagcaaactcacttaaagactcaaaaacctaagagtgcagcggtgtttttcaattaactattgcgtttattgaagctttaaactgtcagcggtttttttttttttttggttcgaaaagcaattgttttaatttaccagttgattggtctcactaacgacattcaattgcagtgcagattgctgcatttgtcgcccccattgaaatcgtaaacgaattagaggcattttctggcatttggttggtgctggtcggacactgtccctggtaaacaggacattaatttataatcaaaggacttggctgttgaaacggcactgtactcaaccccgccactttggcaaacatctttgtctgctacaaattgttgcatatttaagcgcatacccatctccacttcgagccatgtccgcagctcttttggccatgcaaatccatgcaaaggattcagcactaacaacccccacgcattcccacacttaagccccccttttttttggctgccctgctttggattgctttgtgtgccaaatcgttggaaaatttattggaatttgaatttcaaaataaggaaaaaagaggagctagaacgaaatcgccgcatcgaatggtttttttttggcaaaatacgaatgtgtgaatttctcactactgcttatcttttttgacctatttgtgcacggagaaaaaaacgagggatgttttgttgcagcatgatatttttaaaaatgtaaccggatgtaaggtttaagatttatgcgtatgagaatttgcgagactttatattcaaagaaatcgttcttatctaaatcaatacagagctctttgcaagaaataataaataaatattcagtttattacatagtttcgaatcttgataaataaaaaccaaaccattttacagtaatttgtttcaaaatctaagaacaaacattcaggtcttttctccctgtgcttgcaaatctaaaacgtaaatcctttttaacaactgctctttaacatatcccatctcgttcgactagcttttcttcaccgaacttcctcccgttttcccgtttttcccagcttcttggtcgtgtgaaaattcctaagcgcgtttgtcgccatcgccccaacgcttcggattttttccactccactttggcatctgcataaacttgacccaaaaagcgattggggaaaaaaaagggaaagccagctagccaggaaagcgaatcctttctttcccaactatttcctttcgtagattttcaactgttcaaagatttggctcctgtttgcaatcctctcctgcccgcattttatggccaatacgtgagctgtggatattatgcgcataactttattgtgcccatacccttaccctttggctagtggtttttcctgctgtttttcaatttccattcagactctctctctcaacaacttaatcgtttctgcgttaagcatacgcactgttcccttttttcccagctgtctttgcatgcaaattgtgttagtatgtgtgctgcttttagccccttttggccaagtttttttgcccagctaagctcgtaataacccattcttttttagtaaattttcggaaacgtcgaaagtaaacaaattgcagatgagtttatcccagcaacacacaaacagcaaactggctagctgcctggcagcaacattttctcatgcatagaacaaggggttaaaacgcttatcatttgttgccttttggacagtggctttctcctatcttcccaccgattcttctgggctttaggcccctttccatttctcaaatctacttagtgtgtgtttagtgctgtggagtgttagtttcgcctcctgctgcttctgcctcacttttttcatgttgcgaaaatcctgactcatgtgatttatgtgtttcccttttcccacatccttgcaagtatttggaagctatccaaaagcaaggagaaagcgaataagctgcgccaggactagattcttgtggcactttgaataagttttcttggcatttattgctcagcccaaaaggaaaatgcattatgagcctttcggcgaaacgataagaaggcagaacgatgtcttcgaagtggcgaaaacagattttggcggatataaatcagatagttggcaaagaccagtaacaggtgactcatagaattgaatatagtttcgattttataaagcacgaagccatcgaaataaaatctctgattttcctgagtcatacatttgccccaattaaattccaaaaaagaaatgtgtcatgcatatgttccggtattaatcaaaatcgtttatgtatattcatgaagtagcaatttgaataatctgctaaaagcccggaataatctccgtcttgttccccatcttgtggttggctttctctacatcttgctttgccttaatgatgaattaaagccatttcctctgggccactgtatgtgcaaagagagtgtttgacaaaagaccaaacaaaggcgctcaaccaactgacacaaaagtctgcataatcaatcagtcggtctgtcggtcggtctttctgtccccccccccaaaaaaaaatccccctcacatacgtacatatatgcatgccccaatctttattctgtgcagccttctttgcatgttaacagatgagcaaaaaatttgcttacgcagctttttggcgccttccgcagacttcctttcggccatggccagcacccctcgatcatcccttatgcatccaccgagcacaattttacactggaaaaaatattcaacctttctagctatctatatttaaaaaaaaaaaccctaagaatatgtgaggttattatggcggcgttacattttcacagcagacttttgtgcttaacaaataagttgcaagcacaggacttccacatagtttttatcgcactttaaagtgcacattttttctttccgtgcaatctgactgcattttgcatggcgcaaaagtcagctggtgggttttgcaagtctggggaagggaatagcaggtcgtggaatgagcgatgaggggtctcaaatgtgagtttggcaagtgtaaaagcttttaaacatacaaacacagacaggcggacacacattctcccagtcacacacagacacacacacacacacacacacacacaacgagagacgacattcagttgcatttgccagctgtgcataagctgacatcaatgtaatcaatgtaatgaagatgtatttgcatattgtagcactgtcaatctgctggctgccccactcttccactctaagtccttcttgtcctccccctgccctactcttaacccccgacattctacattaaccctcttcagaggcacttccccttgagtttgctttgcttttgatggctctcatgggggatatatcttctatctgctggattgtaaattgtggcttgcgcttcttcgatagtgctgttttaatttattgacgcgagcgaattttgacaccagtttttcgtacagttaagggttcgtgcaaaagtatgagcgttaaaatcttgggaactattaagcatgtaaattttagagattctacataaaacaagaaaaaaataaacacacacttaaaaatgagatcactataccctatgcaagagtataaaaacgagtaagacacatagagggaagcctccagtgttttttgcctccctttttattgcattttatatgcaagaagtgagtaaaagcagaacggaaaaaaaggcgagcagtattcaacaacagcaagcaacaacaaaaacaataataacgtcctgcgagtccagggcaataaaaaacggccaagaacaacaagaagctgctaccaaaaatgtattttttttcgagctttggtgctcataaagcgtaaagataacacacaaacacaccgctcatagttgtggccaacacatacacacagagaaacacacacacacaaacacaaaaaacgagggggatattacgcatacgacccgtgggcgctttacagtcaccactgctgctgatccaactcaaaactctcacagtggctgttcatcttgggttttcattcggttcggttcggttcagttcgtttcgttttttattatttaatattttaaaacacttgcggtgttattggcatcacaataacaacaacaaataatatggaaagtaagttacgggtgtatacaacatttgattactctagtaattttgcattaaacaagtttcttcaaaatatacgcagatttttcgaattaattcagaactgttcagatattatttaaatgtatataagatattttttcctcatcgaaaaactagaggaaagttaagttaggccatgctattattgaaggcattctagaaaatacaatgtatcttggagtaaagtagagtatacaaataataaaacacacataacaacatgggccatgcggcagaaatggattcgaaaaaaaaatcgagtacacacacacacacagcagagacacactcgcacatctatagacaatcccaaaaaacaagctgtggatgccaaagggcatactcatcctcctcgaccacatcctgccacccacttcgtccttgctacttttgctgcggttggtgttttgtgctcgggtgaactttaagcaagctctacgaagactttaagccgactcgaaatgttcgaacagcacgttgccgaataatatttatttgcaacatgtttcgcccccttgaactcctataattagcatggaaaagggcgcaaaacattttagatgcccagtgcttaacttgtcataactgaaagcgagccaaagcccaaaacgccaacagaaatgttggcccaaaatgttttcaccccccacacttcactgtgttcggtccacagcttctgacataggctaacgaaaacttacagaatgtgaaagccaggaccttactcttttcctaggacgggctctgaaagtctaccagcttaatgtgtcagaaaatagaaactttgggtagacgttggctggttcctgggctcgacaaaagtttatcaatcaaaatgaggcaaaagttactcgaacaaatctctttcgcaatctatgtgtaattttctccagtttgctttctttctcattatttcatcggcatttgttcactgcgtattcacacagttctgatcaacgagtgaaatttgtgctaataagtttcgttatccatgattcaacggattttcctttggcaagttataacacagaggcaaacatgattttgcaaaaactcatttctacacatttacacagaatggaaattgtactgattctgaatcactatctcgattagactaatccacattatgaattggatcttagttaggtggcttacctaaatgctgatcgactcgctttttgggcttttgcacggatgcatagggatcgctgcagtagtcctgccgggacggattctggctgttgcgcaagttgtggtactcatcgcccacctggctgggcgtggccgtgaggtgcggatagggagcgtagtcgtccaccgccccatagccaccatgggtcaacggatcgtatccgtaggcgggctgctgttccacatactgattcattggggcctgcaccatgccctgctggttgcccaccgccgcggctgacatcttcacctgccacagtgagtcctgcgagttgacactgccgccgttgttcgaattcgaatagttgttctccatgtagcccatgttgacccctggaaaagcaagaacaaaaaaaaaaaacaaacagataaatgatgaatggatatttatcgaacaatgcatgaattcataaaggagttgtactcgttcgcagaaaatactgcgatacaaacaataaagtttattcataatatatatttttaaagaattaacgttgggcattactcagcggactccctacttttgtaacctccattgctctcacatgtaaaacattgactatttggcctttggccaggaaaactttccctcgttggcagtaaaataaaatttaattaaaattaagcaaaagtttggtcccaaaataaagttgaagttctcttttggggccaacttttgggccggatttttattgattaacacataaaaacgacatcggcatacaatttatgaacttcggagtcgtagacaaggcgtaattaatagtttatcacattgcgtatacgccgcgtgcgccacttaaaatccatcctaatgtcgtaaatccttgaggagcaccgaattcgaattatacttttccttcttcttccacttccacctgccttcagccattttgacaaatttttatggggtaagcgaatggtgaagcctttgtccttcaacaaggagcagctggtgttcccattttcccactcctgccaaccgatttttccattttcattcattgttccctatgccttggctggtgcgtgctcgctgcctggacgcatttattattatttttatatcgtgataaatcactcataaatattaaacgcacgcttgccggcaaacaaaaacttttcgagtttagagctgccagcggaaaatgtgttcccaaaagtaaataatctacggcattttaggggatttgtcacttttgaaaggatgtgatgacttttcattttacgcaaacggtatttcacgttgcgtgttcacgcagaatccctcgttatttaattatttaaaaatataaattcgtattttgttctataacaaaatgaat

SEQ ID NO: 38576 - DNA, 862 bp, DROSOPHILA
atgggctacatggagaacaactattcgaattcgaacaacggcggcagtgtcaactcgcaggactcactgtggcaggtgaagatgtcagccgcggcggtgggcaaccagcagggcatggtgcaggccccaatgaatcagtatgtggaacagcagcccgcctacggatacgatccgttgacccatggtggctatggggcggtggacgactacgctccctatccgcacctcacggccacgcccagccaggtgggcgatgagtaccacaacttgcgcaacagccagaatccgtcccggcaggactactgcagcgatccctatgcatccgtgcaaaagcccaaaaagcgagtcgatcagcatttagattcaccatatcacgacgtaagcggtctgcccaatccctacaacatggagcatttggaacaggacgaggtccttcccccgcagcagcacatgtccttgagctacgacgacagcttcgagggcgaatattcgacaacgccgaatgccagaaaccgtcgcgtcatacgcgagattattgtctaggaaattctagttgggaaatcgcataaacaactgaaaatcagcactcaaatattttccactcacacgctaaattccatgatcatcgactgtaaacccattctaattatcattttaacttcccgctcgactgccagcagcagatcttttgaaaagtggccattttgaatactttttaatatattacttcgatgtaagcttagtttgaggaatacgacaaacgtgtgttgagttttattggcaacgaaacgaataccatataccataggattagagttccgatctatcattgctctagttcagcactttgttgacataatac

SEQ ID NO: 38577 - protein, 180 aa, DROSOPHILA
MGYMENNYSNSNNGGSVNSQDSLWQVKMSAAAVGNQQGMVQAPMNQYVEQQPAYGYDPLTHGGYGAVDDYAPYPHLTATPSQVGDEYHNLRNSQNPSRQDYCSDPYASVQKPKKRVDQHLDSPYHDVSGLPNPYNMEHLEQDEVLPPQQHMSLSYDDSFEGEYSTTPNARNRRVIREIIV

SEQ ID NO: 38578 - DNA, 3413 bp, DROSOPHILA
aatttagcaaaaataaaaagaaaaagttgttaagcgaaaggtaaaatccgtaaagtccctgcagttctaagattcgatagtgcaacatcatagatatgcttggaaactgatcagtgttaggacattcatattttctccagagtagttagccgtcaggtaggcggcacattcagcgccatcgttggagttgcctctttccacgacctagattcccgcaaacccaaacttcaattcagccattcaaccagcaagtcagccagtcgccatctagctaaattaatttattggccttcctcgcaaagacctatacggcagcagtttgcataatcatcgcacacacactcgcacgaaattggacagcttataaaatatttattcaaactgcaagttgccaggcaacacttgctaaagtctgaattgcagactgtccaaccatgttcatatatcctttgatggagagtcaatttgtttgaccaccgacaaggtcttttttggaagaagggggagcttgttatcaggaaacgagaacataatacaatattggttattaacaataagtttagttcaggtttcatatacgtaagccgcacattgtaaggtctgtcctcgagttctgagaccctcttgtgaactctgatctacgcctccgtcgatgtgttgaacctgccaaacgaacattaagttcatggcaaatgtcattaaaaatcgtttaacgaaacctaaagtttaattacgagcacgcccaatttgccacgcccctacccaaaaacgttgcctgattgggggttaacaatttgtaaaacttatcgaactatgagcaaggacaacgcccagctcatcaattatgctgctcaagtgctttgtgtgattctccttatataatatatacatgcagttccaaaggctataaaggacgagggtcaaaggattatgggctgaaaagtgtttggtgtcctcggagagaaagatgttacctcgattcctgaccgcctcctatccaatggagcgccattatttcatggtgccaaagtttgcattatcgctgattggtttttatcccgaacagaagcgaacggttttggtgaaactttggagtttcttcaactttttcatcctcacctacggctgttatgcagaggcttactatggcatacactatataccgattaacatagccactgcattggatgccctttgtcctgtggcctccagcattttgtcgctggtgaaaatggtcgccatttggtggtatcaagatgaattaaggagtttgatagagcgggtaagatttttaacagagcaacagaagtccaagaggaaactgggctataagaagaggttctatacactggcaacgcaactaacattcctgctactatgctgtggattttgcaccagtacttcctattccgtcagacatttgattgataatatcctgagacgcacccatggcaaggactggatctacgagactccgttcaagatgatgtaaggaaagggaagaatggtttatatatacttttggaacgaaataatgatgtgatctaaacaagatgcacttttttttaggttccccgatcttctcctgcgtttgccactctatcccatcacctatatactcgtgcattggcatggctacattactgtggtttgttttgtcggcgcggatggtttcttcctggggttctgtttgtacttcactgttttgctgctctgtctgcaggacgatgtttgtgatttactagaggttgaaaacatcgagaagagtccctccgaagcggaggaagctcgcatagttcgggaaatggaaaaactggtggaccggcataacgaggtggccgagctgacagaaagattgtcgggtgttatggtggaaataacactggcccactttgttacttcgagtttgataatcggaaccagcgtggtggatattttattagtgggtatttacatttgattagatcctttcgatatatgttcttaaattctagttttccggcctgggaatcattgtgtatgtggtctacacttgtgccgtaggtgtggaaatatttctatactgtttaggaggatctcatattatggaagcggtatattcataagaaactactataaagttacttttaaattcattgcatttcttagtgttccaatctagcgcgctccacattttccagccactggtatggccacagtgttcgggtccaaaagatgacccttttgatggtagctcgtgctcaacgagttctcacaattaaaattcctttcttttccccatcattagagactctaacttcggtaagcttatgcgaaaatgttatggtacacacaagtctacattttctatgaggtcttgtagattttgcgcttcactggatctctgattgccctggcaaagtcggttatataaaaggattctgtggtgttctctcaattgatacaaaaataaatgaataataacaactgcaactatatatttgagctttaatacaagatggaaagaagttgaaaggttcgttaatcaaaagattacgcaagcaaatgaaaggtgtaaatatggaactagtttaaaatgtagttcaactttattcttattttgcataatgtttcacaatttacaaaggggatcggtactgcaatttacttttcctttattcatttgcgaccctctcagcacctgatttccatcttctggttgaatatatccggcattgtttttccgtactctttctgtctgcgtgtgcgttaattcgaatatcctttacaacaatttcggttttcttttcattttctttggggcgccaccattgacccctgattgttgttgtcgaattaaagctgccctgttgttaaacacttccttggatgtccttctgcttttcagctgctcctgcaaattgctttctttgccgttgctcatcacgtccaccccgcaaccagccagcctccctcacaccatcatcctgtttggcactttcctcttggccattccacttggccattttcagttgcacgcttttccaactgcagttcatttccatacctcgtgcactgaaggaaatgtgctcacttggcacataacatatatgttttgaaacttttattttataattatgtataattatggataattaagtcttaatattttgtattcattctattgattaagacattatacaatgtcttaattaaacggcgatgatagatgtgatacttttctcggagtgcacacacccacgtgcaccttaatgacatccggtctgcgtctgtgtgggtagggtacttcatatccttgacgcagttgttgatttccccgctctgcccctttgaagacaacctcttcaatgagtggatgttgtgtgttttttggggttcctctcggctgatttttgtgttttatttttctgtct

SEQ ID NO: 38579 - DNA, 1110 bp, DROSOPHILA
atggagcgccattatttcatggtgccaaagtttgcattatcgctgattggtttttatcccgaacagaagcgaacggttttggtgaaactttggagtttcttcaactttttcatcctcacctacggctgttatgcagaggcttactatggcatacactatataccgattaacatagccactgcattggatgccctttgtcctgtggcctccagcattttgtcgctggtgaaaatggtcgccatttggtggtatcaagatgaattaaggagtttgatagagcggaggttctatacactggcaacgcaactaacattcctgctactatgctgtggattttgcaccagtacttcctattccgtcagacatttgattgataatatcctgagacgcacccatggcaaggactggatctacgagactccgttcaagatgatgttccccgatcttctcctgcgtttgccactctatcccatcacctatatactcgtgcattggcatggctacattactgtggtttgttttgtcggcgcggatggtttcttcctggggttctgtttgtacttcactgttttgctgctctgtctgcaggacgatgtttgtgatttactagaggttgaaaacatcgagaagagtccctccgaagcggaggaagctcgcatagttcgggaaatggaaaaactggtggaccggcataacgaggtggccgagctgacagaaagattgtcgggtgttatggtggaaataacactggcccactttgttacttcgagtttgataatcggaaccagcgtggtggatattttattattttccggcctgggaatcattgtgtatgtggtctacacttgtgccgtaggtgtggaaatatttctatactgtttaggaggatctcatattatggaagcgtgttccaatctagcgcgctccacattttccagccactggtatggccacagtgttcgggtccaaaagatgacccttttgatggtagctcgtgctcaacgagttctcacaattaaaattcctttcttttccccatcattagagactctaacttcgattttgcgcttcactggatctctgattgccctggcaaagtcggttatataa

SEQ ID NO: 38580 - protein, 369 aa, DROSOPHILA
MERHYFMVPKFALSLIGFYPEQKRTVLVKLWSFFNFFILTYGCYAEAYYGIHYIPINIATALDALCPVASSILSLVKMVAIWWYQDELRSLIERRFYTLATQLTFLLLCCGFCTSTSYSVRHLIDNILRRTHGKDWIYETPFKMMFPDLLLRLPLYPITYILVHWHGYITVVCFVGADGFFLGFCLYFTVLLLCLQDDVCDLLEVENIEKSPSEAEEARIVREMEKLVDRHNEVAELTERLSGVMVEITLAHFVTSSLIIGTSVVDILLFSGLGIIVYVVYTCAVGVEIFLYCLGGSHIMEACSNLARSTFSSHWYGHSVRVQKMTLLMVARAQRVLTIKIPFFSPSLETLTSILRFTGSLIALAKSVI

SEQ ID NO: 38581 - DNA, 2704 bp, DROSOPHILA
cgagttttcgcgaaattagttaagtttagcgtgaattttattatgcccgatggtggatggtgaactgtgcccccgagtgagcaaacttcttaattaaaagatttgcccactgattggctgtttgccaaaggtgaaaggcaaggtaggaatttatattcaatttgttaaatgcattcgagtgccattgtctgcggcgataattgccaggttttgaaactctgcggttgactggcttgccggatgaactgcggccaccagttggtgaccccgacggatcagagccacccactcagccaaactcacacctggccaaacaattcctggccataaatctcatttcatttttgcactgtgagcgccaaataaattcatagatatgagccaaccgaatgaccccaactgaccattcgacattgcactttgaacgaatttatttacggcagttgttagttttacgagagcctctccacacaaaatgtagctgctgtgctctatgcaatccaacacagagttgaacacagtttactaatgcaatttcgaaatttaatttgagccacagctctggaatctccatttaaatcaatgttgatgtttgcctttgaggccatttaaatgtgcaaggtgaggatgaagcgctgaagcgaaggagtttgttcattagacagcgtttgcaatttaaggacttaagtttcataactagattacccaaaacgcacaaacgaagctataaaattacgtttaattaaatttacctaaagctaaaacggaaatgtcaataacaataaccaatcactggatttcatctcgatggcatattgatacagtggaatttagttattagttggcttaaataataatctatattttgttatccgattcacgattaattttaacatggattccataaaaaagtcaaaaatatttattccaaatttacaactgaatcaattgaccttcttatagtattaaacagtttgacatggtggtttccaccttttttttatgagctcttgattttcagctggttaaagttgaacttactcatgtacgtgggaccaagtttggtactggggattcgacagggtccccgtttgctaaaaaaaagatgaaggatatgggattggggcttacagtatgtcctttttcaacttaccaagcactatgaaattggctcagactctcgttcgcctcgaacctggccttctctgccttgcttaggaactggctcgacctgtggcagtggcacctgttcttcagcaaggatctcaattgagagtgttctcgacaacaccgaccaccctgtcgtacgacctcagtaagcattttcgtcagcaattcctccaaaaccttttccgcgctgggtggattgcgcaaattgggattcacgtactgcatcacctggttgaccgtcctctcgtaatccaccggaagtcctgtattccgatccatgcgaaatagcctggggatctttgtttttattttcggcttggtctggaccactgtcctgcgccagattcgctggctaggaggcacggttgattgttttggacgaggacgagttgcattgaatctgttttttaagtaaaactgctgctgcggatctgttctgggcactttacggccagtaatctttttcttggtcacaattttggcacgagctcgccgtgtggaattcataatggtctatgtgattatttttaaatgaattttgttttatcacaagttgatttttcctaataccaaatgtttgctaaactgatactgagaaagcatacacaaagccggctgcatatgtagaaatattaatatttttctccgtgttttttaaggatttacaactacgtgtttctgctcgtattaaatatttattggaaggaactgccgctgcaagcagatgcaactactatttaactgctcacgttagctgaatgtcgggaacatgattacaattgccgtgccagatttatgatttcattgcccagcacgcacacgactgtttcagacttgcataagttgtgagtcgatgtggccacagcccaacttaacttttgaaacaatgtcaaatacaataaacgtgtgtgtgtgtgtgtggagtgttaaccgcattgtttgaatgcagcgctggcgaacaatgtacattgcacatgcaggagcacagggatgtaacatgcagtacataagtacgcagatatgtacgtataaattatgcgagatacgggttggttggttggttggttggcccacaaacttgtcacacccacacgagcgcgtacaataacaaatagtggcacactcagttggattgcaaaagacgcagcagaaatagaacaaaagcaatataattaatcatcgaagagcaggccaagcagaaacagcatgctgttgaggcagcagtcgagcagtaggaacagacacacagaaactgaaacagaagcagaaacagcatcccgccatcaggatcacatctagaattagagccctccctcgtggcaagtcttggaaggacatttgcggggcaaatattgttgcaacattgctaacaacataattcacattaacagcttgccgagtcgagtggcaaatgctctgctgcagttgcgcatttatttcgaatgaaaggtaatacatttcaaatgaaataatgattacccataccattgttatgtcagcagtttgttacttaaatcgaaagaaatatgaatct

SEQ ID NO: 38582 - DNA, 645 bp, DROSOPHILA
catttaaaaataatcacatagaccattatgaattccacacggcgagctcgtgccaaaattgtgaccaagaaaaagattactggccgtaaagtgcccagaacagatccgcagcagcagttttacttaaaaaacagattcaatgcaactcgtcctcgtccaaaacaatcaaccgtgcctcctagccagcgaatctggcgcaggacagtggtccagaccaagccgaaaataaaaacaaagatccccaggctatttcgcatggatcggaatacaggacttccggtggattacgagaggacggtcaaccaggtgatgcagtacgtgaatcccaatttgcgcaatccacccagcgcggaaaaggttttggaggaattgctgacgaaaatgcttactgaggtcgtacgacagggtggtcggtgttgtcgagaacactctcaattgagatccttgctgaagaacaggtgccactgccacaggtcgagccagttcctaagcaaggcagagaaggccaggttcgaggcgaacgagagtctgagccaatttcatagtgcttgcaaacggggaccctgtcgaatccccagtaccaaacttggtcccacgtacatgagtaagttcaactttaaccagctgaaaatcaagagctcataa

SEQ ID NO: 38583 - protein, 205 aa, DROSOPHILA
MNSTRRARAKIVTKKKITGRKVPRTDPQQQFYLKNRFNATRPRPKQSTVPPSQRIWRRTVVQTKPKIKTKIPRLFRMDRNTGLPVDYERTVNQVMQYVNPNLRNPPSAEKVLEELLTKMLTEVVRQGGRCCREHSQLRSLLKNRCHCHRSSQFLSKAEKARFEANESLSQFHSACKRGPCRIPSTKLGPTYMSKFNFNQLKIKSS

SEQ ID NO: 38584 - DNA, 23659 bp, DROSOPHILA
accgagtgctccttctgctggttgttctgttctgttctgtttagctgttttgtggggggtgtggcggtctgccctttctggcatgcaaaaatacgggccggatggaggccacatggcggcacaaaaagtttcacgcttgttacggcttttttttttttatccgtttttcggcctgctctgcagtcccacggatccggaatcggaatctggacatggtttggtctggtgatttctgaagccatttggctgctgctctccaaagcccaaatcccaaagcccggagtttcggagtgattgggtctgctgtgaatgggattcggtagccagctgagggcttagttaatgataaagcgttgaacagtttatgcagtatgcggaatgtggagtccggaatgcaaaatgcaaggagcgattttcagttgggacttacacgtatggtcagcctctcattcacaacattcgatttggacttggtgcgtgtgtgtttgtcgggcgccgccttatcctacgggttttttatttggggaattggttttgggggtatttaacgtggatggggattagagaataaaactacatattagtaacctaatcgaaccctggtttttatctgccaatgctcatcacctcctcccataatcccagcatgaactttgctcctaatactacttttgaatcggttgggttttctatcgggggcgttccagaaatctctgatggttttcggtagagtaggttggaattcatgcgaaaaattcattggtatcacagaatttgttgaatatttcaaatattttcatagatggtgccgcataaatcactataaaccatgcatagtataaagtatttatgctgcatactcatagacacgttgtgattctgatttcaccacttatacgacaaatttaaaggagattgctgcgaaacatcggatggaattatgtcaggacgagatttctgggacagccccttatgtatctcaaaattaagtgatttgtatttaggtttttaccatgattacagcgccgcccgcgattataacacgggccgtatgggagacttgtccctcaccattgcgtgcaatgcaagtgtactctccgatgtcctcgtgccgaatggtagagatccgcaactcggtgccgtcgttgaagatgcccaccgtgggcgagggatcgacgggattggcatccttgtaccagagtatttccggcgtgggcgtgccatctgcctggcaattgagtataattgaatcacctgcaaggaaatgtgatgccagaacgaaatgagaatgagaatgggcacaagaacgagagcgaggaattaataaggtaagtggtggcaattgttacgctttttggtttcaacgaggagacgacgagcaggagtaggagcatgggcgggtaagcccacagctcgcctccttccggctcggcagtcccttatctattgtccttcgtcctgccaccatttgcggcagacaatgaaaccgggctctttgttgcagttccctactcgcctcactggccccgttgttttctgaatcagccgttgtgtttgtctgatttatgcgctgcagcgccattttcgctcaacgcatttccggccctttcaactgccttttgtttcgccgcctgccacttggacttgtaaacattttaactttgattaagcgacggaaatttgatttgatacgattgcaagcataaagagcctatcgattttcgtgaaactcttccactttggcagcgtcttccatcggaagatgacaaatgggcggccataactcgtttcgtgtggctggtggcactttttacgactcctgggaatacgagttctcaaggtgacaaactcattcgggcgctgcaacaaatggccggccatttgacacactcgaaaagtgggccaaaagcgtacgggggtcgcactccacttaattctgtgagatgacaggccccaaataagttggccagctgaatatgcgcttatttatgaccttgctatttgtcaggcagcaaagcgccaggttttgagcactagcgatggtacaaaaatccgataagtgtgtcgatggatatcagtgaaagtagagagtagagtacttaacgtttcgtatcgataacccttcgataaatacgataacttacattaccacaactttgccgataactttccttcgattatttcgatattttaatggtttcctcttaaattaaaacattattagctcatactcacctaaattaacgtatataatatcctctggcgtaacactaaagcgcggcggtgcatgtacgtctaagtggaaccatgtaccgttcttatgctgcttggggtcccgattgaggaagacgaccttgcactcgtaccatccttggtccgattcccggatgttggtcaggttgagcgaggcggagccgaagggcgagtcctgcgatacgcgggacacgcgtcccttgtagccctcctcgatatgctccggatagctctcataccagatatagatgggcagatcggagcccttgatagaggaggatatatgcgcacattagtttgtttctatgggctggcaagtgattagagttgattcttgattggtctgtctggaatgcgttatatgcatggaatgtgccatggcatttgtacatacgacaaacgagagtctgctttctggtacgcttcaacttggaacaggtacacatttacaggtacagacagtatttaacctagggttatgattcggtttatgagtcgcgagttttttggggcatatacataaaacaatgtgtgctttggggctagggtcatgcaatgttctgcaatacattaaaacactcaagtcttggcggtggcatgcaggtgcgggtgcagattaaagctaatcgggaattctcgaaagtttcccgctgagacaacgcaaacaactaacaactgtcgcaaataaattgagctgcgacatacatacatggctacggagaacataactgcgttctgtctgcaaaagtaaaatctacagtcaaaacaaaaactcatcacgttaacgtggagaaattgcgctgccgcatggtaaacatgccagcaaacaaacaagcgctctcgcagatacacaaactatatatatacagacatggtcacacattttcactgtcaacacaaactccccagatcctgtgctcaccacttgtgcctcggccccttcgtcctttttgcatgctcatcaacggccggagggaaagtggaaaagtgctggggcggtggaaagtgggtggcatctctgcccccccccccccctcacacactcatacataggattttcgtagtgtgccagggacacgctggcaacaataaatcatctgtctcgttgcgagtgtgtgtgtgtgtgtgtgtgtgcttgtgtgtggcacagcaactaaaacaactaaaaggacgagggccaaagagatacatttgaaattctagcttgtgcagataaaaaatgtgcatgtaaaatatatatatccaggcaggcaacaaaaattggggttaacctgcactcgcccccaaattctcctttacccttcaccaccccccaccaccccaacccaaccatgtgcaacttggccttttgtttattttattcacagcaccccaccgaatgcattgaaccgagtgcattttcgattcgaattctctcgcatgaccaacaggacctgggtctggacctggccaagcattaacacttggggacaccagattgtgctccctatctctgcggaaagtactaaataccgagatgtgggccatagatagcggcataattgcgtatacataaataattggtaagcaaattgcttatacgccacgttatcccaggcagagctaatcgatttatttccctaattagacggcagggcagaaagatgggctgtacgtcgcttattaaaacttatagacgttttaataatttcctcggctgacgtatgaaataatttgcgttggcagcacagcacaggacggcaaaaacaaaaaggggcagacattcagggacacacaggacgacgcagacgggcgagatcctttgacccgggccaaaattaatattcgcactcgcagaagcgtcataagttggcttggcaaacatttttccgcttaatttattcagtagcaattaatttagattgcaactaaggcaacgccagagtctcacgccccttcaatttcgtcctcctgggatttctctttaaagagcgagatatatatataaagagacagagagagagagagagagacagagagagggacagagagagtgtccgcaaaagtaggcaacctttaatgaatgccaactgacaaaagcgaaattctttcgcatttatgggccagcaacgtgtgtttttgcagggaaagtggggggtgggggcaatgcgagcaggagatatacgagcgcataaattaaaagctaaagccatgttaatccctttaattcggccatttaccgactctcccccccccccgctgtggtcagggtatttttatcgcgacaaaacataaacatactttttgcagtacttataactttgtttggcattaaaattgcttgtaaaacttttaagttggcacaaaaaacaggagacgttatctgcccaggacaacacatacatacatagtcgcataactttggctgcattacgctaagcgaaggacagtcgtgactttgacgcccacgacgccgtcgtcctttttatcctggctgccattgctggcattttccactttattatccttgcggttctccttgccatttcctatcagcctgcagaccaagctaaaactgaagctgaagctcaagccgaagccccgaagaaagttggcttaggcgtgcttgaaattatggaaagtaagttgtttgaggtcggggtttagttggaagtcgcttagctgaggttgcccacgttagttggcttcatcaaactttgccggttaaaagatacactgctatgaaaatattcgaagccaacttaaaattaagtttacaaggttcaagctaaacatattgatagaacacaaatgaaacactactttctaccagtgtagttggggccaggtaaaatatttagttcactacacactaagcatgcagaagaggctgggaaaataattggattacattacaaaaacgccaaaatgagaaagatgaatggagagaaagacgtgactgggtggcggtgctcaatatgtgatgggagtttcgttgcgccttttgcgtattttgcttatttgatttgaattaaatttgcttatcctacgggaatgtgcagcggcagttgatagtgccaaaaatatggcagtgaggccatcaatcggttggccgagcggcagagttgaaaagtttgtgcactcatactgctggcattcgttttatctgcggctcaactttgccaaacattagcatatttctgcaaactccaactgccactttgggtggttcggtggttgggtggcatgtgggtggcttttgggtggtgcaggcagtatgatcgagcttcgaaacactcgcaactaaagtcttggcaatgtgactaatttgttttcaatattttttgctcgactataaatggctgtggctaattgttggggatttgcatggctcaggaataaacgggtagtggaaattgtattcattttgtttgcagtgagtgagcagtgagcagctaagctagatttttgtgtatgctgtcgattgcgaacgaatttcgatttgatttgatttgcaaatggaatttcattttcgattgctttcattggtggattgtgaatttttcgtttttcgactgctttcttctctttcgctctctttggtccgggtgctgtgaagcccgttccttcaattgacaaataatttgattaatttcatctttggtgttttcgaatgccgcaaaaataattcgattcaaagtgttcaagtattctgatgtgtcttctgtgtatgtatgtgtatgtgtggctggcttgtgggcgaacttaaaggaggcgcaaagaatccgatcccaaaaccgatcagaagcagccgctggaaagccaaaagcctgcctaattcaaatggtgtttggttggctggtgattttgggttcgtgtcgtggttcaggatcaggatagtcccccgatttcaggccggaggatattggggctgatggttgaatgagaaccaaggcaaactgaaaccaaaactgagggaaatcaagtccaaattcaaattaccaatatggaaacacataaacacatacatctcaagctatatttgtatatagttatcggtatcgcatggacaacaacaaacaacacgagcattggcaatagttcggttagttcggttatcggatcaacttggttaatttggtaggggctttaagctttgaggcacattattaaatcaacttaaaataatgaaactcaggcggagtaactgatttttggggggacaagtactactcatacgagtagagatggtattgtacgtattagttgagagaatacactgaataggctggtagttctttatattcgtttactgcgtgggtctgtctgttctgactgactgtatcttactttttcttgcttgtttttgcgtatcggaacaacaatgtaaaaaagagagtttagagaagaaatgttaactgtgatatcgtaccgtttcgctcaccttcttgtcccactgcaggacatatggcacgggatggtcgttggggaactccacatggcagttgaagatgacgccctcgccgaggatggctgtgatgtgcacggcgtcttctgaaatggacaaagaaaagggatacggcattcagatacacgatatacacaccacttgcaacttttgtatgcggatcggatcgtcagcaaccgcagcagcaaggattcgccaacgtgatgcgcccataatacggccaattccgcagccgcagtcccgtcctcgttattgctttctatttagacgtgacattcagcacgatttacgtggaccgacaaatgtcctgtgcctgccatcccatggcatcctctgccatcctctgccatcccatgcaatcccattccgtgcccatttcgctgacagaaggaatggcaaaaccaacatgccaggggttacttttaaatggatttgttgatggctatgtcggtcacatgtcaagtgctggtcattgactgatgtttttgccctcccatctctctcaagggaccaatagctgacccggcttacattttggttttcaaatcagttatcccattcaaagtcggtgaatgtgtgcggtccggaaactatggttatgcagaggaatgcactcaggagtcactgagagaaattgtaagcgtcagcttaatggcccccaccttgaatggataaaattataaaaattttctaaatgtggaattgaaatttttcctcagaatatatttaagtacttaaatattcgtttcacttataagctttggcccatttccagtacactttttcccaaatacgagttgacatcttgaccagaagcgcacacagagagtgagaaatcagtttgacgaaagtttcctctagcattttaacagagtattcctgccttcctgacaacgagtagtgacatttcattagcgtttgtcacctgtctgcggctgggagaaaggtggcaggattgcaggatggactgcggtgggcacttgacaggcgctgattaggctccttgttcctggctttgacggacgctttatttctgtgctgtggtaactgccccgaggtgtgaatgtgccgggcattatttatgtatgcaacgccccttaaaacgggtagtgggtgttctctccgctcctgcagagagtgagtagtgagcttttctgagccgttgacatggtcaaccaagctgaaaatttcgtttacaattggagcagagctcaaagctcggcaagcggcaacggaaatgcaaatgaattgtcggaaacagcaggacaacaacagtaaactgagaagcaatccaatccatatgggagcatatcctgttacacacatgtgggcatgtgggggcgtgggtgggtgtggatgatgccacttgaagatggcgatggtgccagcagtgcagctgctgccgagcacccggactctctggccctggcattctgaccctaaacttgttaacaaacaacttctgacccgcctgcacatgccatcaccatccccgcccctccattgtatccgaatgcccgtccagatccaactgtatctgtatctgtatccgtatctgtgtcggtaatagggttaagcaaactaccaatgtccgaaggcaattgttcgggcaggcaaaccgctcttgattggaacgttgtccggcaaaaaatcaacttaatgcgttttgcattaattcccctaccagctctcgtcctcgcagatggggaaaaagcctgtcaaggacttggtctccagctacatgacgtctttgttagccgctctccaacagacactcaaccagtcagtcactcactcatacactgaatcactcactcactcgctgggtcgctttatgcactctttgcttgttgactttggcatttgcataaatttatgttaacttggccagctttggcagactatttgcatcgacactcagcctccagcctccgttttccggcttccgaaaaaatacagagcacaacatcaggagcgacacaaaaacaataacgacaacgacttgatggggttggcaatgggtgattacgttgagatgcctgcacggagacaaaagagtgataagttatggaggatcccataagaagaagtcaccattgaaagtacttgaaactatgcagcattacttttgcttaatgaagttcgataattgcctttaagatacccttttgaatgaccaacgagctaatggtaattgcaagttttttctttctgtgcacactgccaaggcacttgttcgtctattgccctttgataatgttgcaggcatgtcgccgagagccaagtgaagtactcgacggtagcaggaagtcaggaagctagaatgtcaaagtaaccgcgtgtgtttcgcctctgtcgcgccttttaatggcgttaacatgcaaaagtggtttcattattccatttagaatgtccttcagccaaaggcagacgttttcccatacccaagcctcgtccacttcactaaccacccacccacccaacgccaccgagcacttgacacgagttttggcttgagctattcagcgaggcgcattttgttttcattgatttgagccaagtttagaggccttcgagaaacttatttggctctttccccatcggggcagggtcacgcccctccctgaaaatccatggacctgccgttgacctttcgaccgttttgcaaagtggccattgcgctgccatggcaaaggaatctcaagcggtttttccaattttcggctaaattaaatttaattaattcactcgacgagctcgcaacgaagaacgtcacggtacattgagcggagccagtggcaacttttaatgtcctgcttcggcaggacagaagggactatcaggaaatagcgcagaatattcgactgtttagacgaaagcggaagttcacaaaaggttctgtgacgggcagttaacctaaggcattccaaagaaattttcaaagttctagataaccatcatccttaagatcggagtcacgtaactaaatttggccaaaaacgtagtaaaagtatcatttaagttacatttaagcgcagattctaaattctctttgattttatactggaatctctataacggctatcgtaaatggtttaagccagttattgaagctcacaatcacgaattattgtattttagggccacctattgtgctggccacgaatggggaacgaataaatcaagaggcctaaacaaaagctccactctctctttttttggccaatggccactggcttgccggtcggaactcggtgctcgatggccggtgctgctgtcaactaattgccaaatgtaatcagctttgggcgcacgtaagccgcttattgtgcgccattaaattttcccgagcgccgagcagtgaacaccagataaaaatcaagttccacacatgcgcatttttcgccccacagctgatgaaaagagcaataggagcgtcgtcgtccatcaaattttcatatgaaatttttggccacgcatagtcgaggctttcgagcgattttattaagcaactcgattgcattgcactcacctggaatattgtgcgcctgggcatttttcgctagaagggccagcaatgagaccaaaacgaactggagcacctgtatcgttggcgttggcgttgacccttgacccctccggatgggaacgcagatggagctgccttctgcccttcgtcggcttcgtcttctcctcgtcgttttcactgtgaatgctgccgttttcgctggcgatgccgtcagcgttttgctagcgggaatcgtcgttgtcgttgtcctgtcaatgtctcctcgacacttggaagcacgctgctctgggatctccaagggctgggattgctgctgctgctccttcgatttctcggtgttgtgctgggtgctcaatgcccgacaccatcgatgagacccgaggtccgcgcacacgcccatgcctctgttcccatagttcgacgccgctcctaacgtatccttctcaccggcagtggcgtcatctggaagagggattggagaaagaagggggagattctgtcagtgggattgcattgtcgctgctggattgcggtaaatgttgccatcaatgaacgccttgcagtcgcacctggctgcacttgatgaagctgtcacgttcctcagccgtcatccatcacagccgtcagtgtcagacgtcaagtgtcaccaggaatcctcccaagccacccacattccccacatccccatttccgcttgaatctggatcaactcacccacctagaacaaccatttatcagatacttatgtacaagttttatcctaaaaccctttcaaaacaactataaacttgttttatattagctgtatcagtttctaatatttataatgtcctaccagcggctttcttgccaaaaacctctcaccgtcttacaagaagttttctctgcagacaggtagaccttatcgaccatcttggacaacctgaaacagcgtcctaagcgccgttgacaaattaataaacaaaagttttccatttcaacacttcgggcgtgtgtgtgtgtgtgcgccacacacgtccgtgaaattaagcagctaatatgttgtagctacaactgataaggacaccacttagcagattgagatgggggtgctggtgttggtgctatacccaacaaaagagcggcccagaaacttacaaggctcctcctatacaaatagagcaaacttttcctcggctgtttggctgtttggcaataaaactttgcgttttaatgtaaaactcgtgttgaaagtcgatagaagaatggtggggtgggctacgtatttgtgttgcctttgttcgatagttttccgcccggtactttatctcagaatcgtgatctggggcccattttttggggaccgctgcagttaattgaaatggcagccgagcgtttattttatgagtcgccgcccacacaaatatgcagtatgaaataggtgaggtttaaggaaattccctgtcattctcggtggagaacaaagccagaaatgtgcttttaattaaattattcggaatgcgttaaacggaattcgctcaattcgtacaaaatgaaactttctgtctccgcttttcccggactctacgccattacatggccacgtagatataagcagctgccgtaaaactcccccgcacagaaacacagaaaaagccacagcagccacccacccacacagacattttaaattgcaggcaaagcatttttgtagcgattttcattcctgaagggatgccagaggaaaaacaagatgaagggtgaaaagcctttgctttttccttactcaatgttgtcactgcaattaagtaactcgagcaaagctttcccccccccccccccaggatgtgtttgtatgtgcgaggaaagtttcgtggctgacagagctgtataaacgtcattagtgccattttaatgcataacttaatacatccggtgagagagtggcgaacagaatagtacacacacaagcacacactaacacacatacacacacgcactgggagtccatgtgcgttgaatttaatcctttctggcatgacatgtaaaattttaataacgtcaaggtttgtggagcattattaaaactttttgcgctgccagcgccattatgacaagtttattaaaacgaaatttatttatagagcgcactcgaatccctcagcgccactgggctcgtcctgcggcccacatccacctacatatcatccgcccttttgcaaaccacacccaaactaagagcccaggcaacaagcaagcagcaaaaatcgcattaagtgtgcggtgcccgttcgtcctgttcgccacaaaaaaggatgcacgggcatgggcacacaggcacagccaaaatagaacaaaagccggaaaaatgatttcccttatgactgaattttcattaccgaaatgcccgccatggcgtatgatttcatttgtaaatcagctcaagttgagctgtggggacagccggcataccaaacaatgacaaatcagcaaacgaattgcatttgctgataccccaggaccagaaaggacgacaaggaatgagtagaaggacagggggccagcccatcgtgcactaaatcagttgattggttcgcccccctctcattgccatttttgtttttgtgtgctatgctggttggtgtgccatgagacccataactgaattgtcggccacgtcgatgtcattaaaatgtgtgtgtgtgtgtgtgtgtgtgagtgcctctttcccacgcaccagcattcgtcacgaagcccgctgcacattcccatacactcggaaaaaaatgtatcttatcttaacgtatcaaccttttatctaatacgaattatacaaacccatttttaagtaacaaacccttgtttaaatcgctaaaatctcaatattcctattcctaaaaaatgccctttgctcataattttgcgctcagtgtagttctccatgtccgccgcctcctcgcacggcggccattttattttcgacccatgcggtggcagcactttatggcatccgcttccgccgccgtttgctggtgctttttggttggctgcacacacggcgcagaattgaggattcgggattccgccgtaaacacagccaccacatctccgttgcggatcttccgtccacggacgacgggctacttggcgctcatttgcattgcgttctggggattgctgatgatggatggggtcggccaggttggcgggcagcagaggcacttttaattaaaaaccctcgctgctggccaaccgaaactggaagccgcaaattattttcacttgactcacacatggctaagaattgccacgccccgcaccgcccaacgacctctaaaccctggaccgcagcccctttggtttcagaaactaattaagcatgttgtgcgcaacaacttggcatcaggacgggcaccagactacagctcattgcactccaataaagccgagtgcctagtctacggacctgggaataaggactccggaccgaagagtacggacttattcacggacttgtcgctgccacaccccaagaaatttcgacaggccctcggcttcttgtttttgccccaagtgctgtgtatgtatcttggatgtgtgcctttggcgcaaaacaacacaaattttacaacttttgcacactgcgttgaaaactgctaagaagagggccatttcgtgtgcgagttttccatccttgcacaggaagaaaagaacctttaatgaaatatacaagtataaactttaagtgctgtatactattgtattaaacacctgcacaagtgatttttaaaacctagtatccactaatttttgtgtttacaatgtagcttcgtttttagtatcactcatacgcagcgtgtcacgccttgaaacattaatgaaatggaacgccccttgccactttacattctccgcttgtttggattacaattggggaatgaacccgtaggctatccgtccgtaagcttgttagcgaagtagaaaaaccggagagggcctgaataagtaggccaaagcgagagaacaatggaaccagttgcaattcccgagctgcattgacagtgctcggcaatttggagcagctattatggcagagaaccactttcattcgattattctttaacgtttttttttttttctttctttttccaaccatccagcgtccaacatctttggctatttttcagctaattcctggcaagatatagggccataaagagaactgctatcacttaatctaatgagttttaccttcccgccgcgggcaattagaccaagaatggccataaaagtttgaaaaacagcagcgggcgcaggctaagtcaatatatcattaggcacttgtgcggctggctaaatgatctaaaaaatgcggccaaatagactgtggccaagtttttcgatgggccatgcaaaatgccccggccattgtacaattttaattgctctaaaatgctgtaatacaacacgaaccacaaataaataaaatttgctgacatcaacaggatgtttgcgggttcctgtccagcccccgaatgtggtgggcgggggggtggtgtggggcattcttctcgaagggacagggccggcacagacaggacctctggacaaaaaaggaggccagtaatgggccgtctaatggtcccggtcctttgaaatttaatttcaaacgatgtgcgatggcaacgggcaggaaatgagtcgagcattggtgttgtgtgtcgtttatgcccactttttacaatttatttgtgcttctcatttagttttcactttcttatcgctgacccattacgcaacaaaattttcattcacatcagcccttttgtgcgcaacgattccgtaatggattgtttcacttgtgacgcttacttattgaccattgtatttggccatgtgactcggcaaatttcttggccgcaacgatgcccgcttatgcgctttacagtttttcgaaattatcctggatggaaacgcccagcttggactgggaaaagttggcgctttgaagcaattaaattcttaataatatttcggaaagtgcagaaaactttgcgctctgtttctgtagcaaaaagaaaccgccatcgccgtccaactttttcttagaaaacattcggcggagtaaaagtgcaaaattattccgcgaactaaaaataaaggaggaggacgggggaggtcagctgggcgttaaggcaaaagaaggagtggccgaggacaacgaaggaaaacttttacgcttcatgcttaattgcggcatttcgattaagcaaaattaataataaaagtttgtgttattatttatgcagtcggcgaatggacgagtgaaaaggaatatcaaaggcgcaaaagaaaagcggcggcggaagtgaaaatttagcaaacttttccatctcggtttgcttcggctttcgcgttgtattcattttccctgtcggttctgtcgggtctgttggctcataaatcctgtaaggatacccagaaataaaaaccgcaattcaactgaagacacgcaggtctaataactgcagacatgcgtgcagaggaattttctttgactttgagccgctcaaaacctgattactgtcctagagctgaattctccactcctactattatgcgaagttcgtgtgtctcatttaacttttttaaaacttgttgaaactaaagctctcgcactaactaaagtggactttagtctctctgcttctctgctctgccctgctcacgacttttcgtactcactgtgaagggaaggaagggaaggatgccttctcatcgctgtgccagtatatcagacatcctgcgcacagcgaaacagaacggaatgaagaaaaataaataaatgtaatggcaacgctaatgaacggccacccctggaaactcccgcctcccgattttcctcgcttttccgacccccggccagcggacatgaccataaactttgctgccgttgcctcggcataaagttgatttcgagttcgggcgggtgaaggaaaacaaaaaaaaaacaaacgggattcgggcaaaaaagtttagcactcgacgctcgacttggctaaaggatcccagggtccctggatcctggccaccctgtttacgcacgtcttttggccgctgcatcaaatgaaatgctgcgagttgaatagcacaagatggagacgagcatggagtgggacacggcggggcaaatcatgactgaagtgcaaaacttttcccattatgcaataaataaatttccatgctttaaagtggcaatcggaggggaacgcggtgtgggaggggcggcaatgtggcagcgacaaacgtaattacgtatacgccatggagcacgtcgtacactcgatggctggcagggcaccttgtaatgggcatatcagcgcagttcaaacagctccaaattgaataagtaaacaacaacgccccagagccaggacctccactcccgaccagatgcaaatgtttgttttgtacagagagagaaataacgagatccgagctaaatatatttgccacttaagtcatataatcgtagtttgtaaggcatgacttttacatgttttccacataaaagttgaatgtcttctatagaaaacttcttacaatcaattaatttttaatttggatcaaaagaacttgaaacgaagtcctaaaagtgcgcacagatatttcaaaaataaactgaatgaagaaattggaaatgcgttttccttgattcgctgccctctcagctttgcgtagataaatccttggaatttaaataaagtatttcatatctttgcgccgtgcaggcaaagcggatgaatggacacttattttttcagaactcaaacatttttcagcgagcgcaggccaacaaaggagcccaggaccttgccaggatattgattttcccggctaagctggggtaaaacacacaccaatagcaagacgggcgatttgacgagtccattgaactatttgccgctgtggcctcaatggccttattaaaagccagtcccctgctggtcgtcctggttcgtcctgtcgatatctcaaaactaataaaaagggtttcgtgcagaggcaacactttggcaactttttggttcgttctgcaaattgatactcgagtattggtcaaggagtggaagggaaacaagatttctgattgcgctttaatggggcctaatggccggcgacaagtgtggcaaattactttaatggtcgctacgaaataatgaacagcaaaacgggcccaggaaaaagtgtttagggctccgccttttcgtgtccttcgaattggttaaccaacttatggttgcccaatcccgctacattttattcaaatgcagtatggaaatattttaatttccccggctttgcacttcaactttcagcttcttgccgctcgacaattcccctagcagtcccctttctcttggccagaactttggcccaaagaaaacaaaaagcagccagcatagttattaaaagtgaagtaacaacgagacaaaacgagggacggccaagttgtctctgccagagttttcttacgtttcctttttttttttgtgttttgttttttatctgggaagaggagggccgtccaccatataaaaaaccagtacttattttttatcgtaagcacaaaaatgcaaacaattttcaacttcaactgcaaacttgctgcctctcagccatctcgtctccggaatttttcagccagcaaattgaaaatgcattcgtgcacggagctcgagaccttaaagcgattcattcgttttccttctactcgactcgcctcaactcaactctattcgattcgattcgagtgaagtcagatcgtgctgactcctcgaatattcggaaatgcgagtttcatgcatttaaatgggaacgcaaattcggattgttttccgctttttcctgcatttcaatttgaattattttttgccagtccgggcccgggccatcatccaattgcaggcgaaacgccacaactcagtcgccttgcattgcccagcccgaagagcagtaaaaataaatcaacaactgggtcaattttaacgcttcactgccaatggagtgtaaagttccaacaaaaacagaaaaacaagaggccagaacaaagcgtcaccaggatgtgggtgagtggtgccgagaggtgcgatgagtgcgggtctgagtggtgcacctacaggcgaagccctgcatgtggtgccattactaccaacaaccaccattcaacgttcccgcccaacttcacctgagcgacttgtgtgggaatgtttggaagttggtttccctgcactggcaaaaaaatccagctaacaactacattttctgcagccctttaaccaaaacgaatagcaaagaaattagatttttcattattcaaaattgtaaggagaggcatctattgtacatttttctttgttgtactattagttttctctccgtgtttctacctgtcctctgttgttgccattgcaccaagatcgtcgactgcaaattgcattcggtgtttccatctgacgtcaatacaggaacaaacggctgctgcaggaaattctgtgtatctatcgtggcaaaagaaaaacaagttcgagtcgtccggctctcttatacgtgaagacctgggacctgagaacccaggctgagacctgaagtccgatgatgtagatgtacatagcccgtatgtaccagttagccccaagtgtaaaccgatctcgagaccccaagcctcccctgccatccgacgacatccaaacttctacgccttcatctcgaactttttgtgctttgtgttttgggctcgagtttcgctcggtcccattatgtgcgccagttttttgggcgccaactctggagttgtccgatcgagatggagatggaaatggagatcgagagagtgcggagtgtgtgtataccacaaacacagagtggctgataaagttctcaggcccgatgttgttgcttttgcgtccactctagttcacattgttggataatctggctcggatcccgaagccaacaaattccagcgaaaacacgaaaaaacgaaaaaaaaaaaaactctaagcagactcactgactgactgaccacagcttccgtaccccgcatggcttttgttttgatctttcgtaacgaaaatataggtacactttcttttcagcagaatttggtgagccaagaaatcattaaaacagtttatatgataactgattcaatttaaacttgcataatctcggacatatcaagattcggtaagtaaaagaaaagctgcctttaaaattttaaataagctcaaaaatcatgtggaatataacctatatctgctgcaaaataggttacaggttaggaaatccccttgatagattgatagaacaatatgtaaatatttcgcttccattgaataatattttgtttataccaaacaggaaaagagtatatacaaatctccgataatcgaagctgtgaccccaatttcttgtttatgtttacacttatggcgcgtcgcttttgcctgcattcgtgtgcgagcatagttatcgctatcgttatcgttatcgccgctaagcgaggtcgtaactcgtttgaataggttaccaagtgaccttagtcggcagtcacgcaagcacccacttacagcctttatatatttacatgtaaatatctggcatgcaccaaatgtaatggtaaatcgatccaccgatgattgctggcatttcagggacccgtcgacagacaggcccaaatttactccgtatttccttggagtgggcgtagtaagcccattttgtgtggagcgaaatgggcaaacaactacttcatttatcaatattaagcatttgtggggcggggtggaaattcgaatattcgaataaatgactgccaagaggcgagtggagcgattgaagcgaagcgcaaagccatggatccgtatccgtatggtgtgtccctctatgggaattgcaatttcctggccaacggaaccactaataaccctttgtctttatcatctgtccccgtctttgtcgtcatcggttacacatgtttgctgctttgttatttcgaactacagatggtcagatctagccacgctggaagctcctcctagcaagatacaaagccacaaaaccaatcaagcccctccatccgtttcgagccaccgaaactgcaatcccctctcgaaaaccgatcccttcgattcccgcctggcatttgccgtttgttttctgctttctggcccagttcagttcggttcggttcgattgtttgtttttctgggccagagtacttttttctggccttttgaaaatttcgtaattgaattgggcccgtaatgctcgcaaccgcacttatttacacttgccgatgtaattgaaatttcataaattttaattaaattcttgcctgcggacattggagcatttgattgttctgttcgatgtgtgtgcaattggcgatgttttagttttagttgctgctgtagctgttgtagctgcagtagttttccccgaggatttcgcttacattacaatttagagtatatcgacattttggaccctaatgggtggtgactcacctcacttgcgcaatcattatacgacgtgcccagatccaattctatagttgtgtactggccaattccaagagtcctgcactcctggagtcctacagtccgggagtcctcaagttggtgagtgaccaggcgagtttgattgctcaagtcgtaaaatccgggagttgtttgctgttcgcctttcgttttcggcgtttactgggcgcgttttacactttgtttacaggataatcgcatactttatgacactttccacttcgagtacactgggcgtatgcgtttgacgaaggactttgaaaccgttgacttttacgtggggctgcacaaaggatttttatgttattccaatttgattgggggaaatggttgattgagtgcttcagaacaaaggcaaaactcataagacataaggcgtaaaatgaatggcgatgcgaggactctgcgtataaacgcgccttttatgcacaacaaataaaatcaatacggcgtaaaatcaaaaatatgagcatgggttgtggcaattgtcaccactgggtctggtcaacaaataaaggtccttcggcatttgtggatttcactgcggcacacactccgaaacacgtgactcatgggtcaatgcggtggctacgccttatatgtacgccctatacgaactatacgccttatatgcattatataattgtcacttggcgagctgctttattagcatcctcccactgttttttccacttggtcgggccaaaatcacaggtcgaaaccataaactgaaactcacagctgtgcgtcgccgccacaccaattgcctggcgttttttgaaaactccgactgacgacgggcctgtcgaacagctcgctggaaaatcgcgacggctgcacaggccaaaaagcagaaacagagagaaccagttttccaaggcagtggggaaaagtgctcagcgggaaaatatggggtttaattttttggcaattttttgagcaagctatgctcgaaaagttatcaagctggtgctaaaacattaggataggaaacttgttgttttaatattttcaacgctgcctaacatcattagatatttccataaaggatattggtattgataaagttttaaaaataaatatttaacagactctttgttgaaactttaaatatttttaaaaattaaaatattcttaagtttctatatgctggtatgtctgttggaaaaggtccttctattttcccttccaagcaatcagctgatgcgtaacggctatcttgttggccaaaattccccaataacggtaactgctcacttgcgcaactgtcctggcccgaaaaacccccccattgagaactttgcagccagtacaagttttcagaaatgtctcttataactctctgtcactctctttgcgatcctttgggaaactggaatttttcttgcagcgctgtttttcttggctgttctgctgctttttttttcttccccattttcaagttttgcacccgcgcgggtgtggtcctgtttttccgattctggccaaaggagcgtgaaaagcgccgaaaacgcgagcgaatttccacttcagcacagacacacacacatatgtacgcacacacacgcacaattgggagagcgttttcccaccccttttccggtggtgatttgaatttgtgacgttccgcttgattgccgcccgctttttgctttgtttttcttttattcactcatcattttccatcaatttgcgtatccataacttgaacaattttcctagtcgcacacaaacacacgcacacacacacagagacactgggaaaaggcgagagcgagacagcacttacggccactgaacgctgcgattgaaatgggatttctgattgctttggactctacggatttcgtccgcgttcacgtacgccgtggtggaacaacaattgagtactgaatctgcgtcaggagtgctcgatttgccactcgaaaaagagacggcatttgctgcacgaacagagagattgcgagagagagagagagcgagagagcgcgctgcttcggcgagaaagagagagcctatactctcttatactatatgatgctggctaatgccatattccgattcagcttcgggccgagcgaatgtggccagcgaacctgtcctaaccctttgacatggctttccgacgacgacggaccggacagcagagaaccacgagaattcaggggagtgcagtgcactcgaaacaaatgcggtgtaattcaggccaggaatatgtttccagcaattgttcttgtagaaatgagacctaagaaaacacctaatacattcagatatttgcatgatttccaaggcttgcttgaatatttgttttagcgctgcagttaccaaaactctttggtcaacactttaccaatgtttttttttttttgtgtgtgggaagcccttctgcgcggccgctcggcttcattgaataattatctcgagtttacctgttctcaactgtcggcgggcccttcgatgtgactgtgacccaaaaaccagtttcaccgccaaactcccaactcgtttggcgctcagaaaaggcgaaaagcgcctgcgcagcccgctcaaagttgaaagagtgaagccatgtggaaatgtgttaagtgccaaacacccaaaacatttctgtttgagtagccaaagaaccgtagcgtaggcccctgccatgggccatataattggataatgcgagcgaaccccccgcttaaatggctttttaattatgcccaagaatgtggtacatcatcagcgatgatctatgatttctacctgcatttggtggtccgtgcagcctcgacggtccattcgcatcgtcacttttggccagtcataaagttcccacaactcagggtgagcctgacc

SEQ ID NO: 38585 - DNA, 1507 bp, DROSOPHILA
aaatccgtagagtccaaagcaatcagaaatcccatttcaatcgcagcgttcagtggccccccacgtaaaagtcaacggtttcaaagtccttcgtcaaacgcatacgcccagtgtactcgaagtggaaagtgtcataaagtatgcgattatcctgtaaacaaagtgtaaaacgcgcccagtaaacgccgaaaacgaaaggcgaacagcaaacaactcccggattttacgacttgagcaatcaaactcgcctggtcactcaccaacttgaggactcccggactgtaggactccaggagtgcaggactcttggaattggccagtacacaactatagaattggatctgggcacgtcgtataatgattgcgcaagtgaggtgagtcaccaccagatgacgccactgccggtgagaaggatacgttaggagcggcgtcgaactatgggaacagaggcatgggcgtgtgcgcggacctcgggtctcatcgatggtgtcgggcattgagcacccagcacaacaccgagaaatcgaaggagcagcagcagcaatcccagcccttggagatcccagagcagcgtgcttccaagtgtcgaggagacattgacaggacaacgacaacgacgattcccgctagcaaaacgctgacggcatcgccagcgaaaacggcagcattcacagtgaaaacgacgaggagaagacgaagccgacgaagggcagaaggcagctccatctgcgttcccatccggaggggtcaagggtcaacgccaacgccaacgatacaggtgctccagttcgttttggtctcattgctggcccttctagcgaaaaatgcccaggcgcacaatattccagaagacgccgtgcacatcacagccatcctcggcgagggcgtcatcttcaactgccatgtggagttccccaacgaccatcccgtgccatatgtcctgcagtgggacaagaaggtgagcgaaacgggctccgatctgcccatctatatctggtatgagagctatccggagcatatcgaggagggctacaagggacgcgtgtcccgcgtatcgcaggactcgcccttcggctccgcctcgctcaacctgaccaacatccgggaatcggaccaaggatggtacgagtgcaaggtcgtcttcctcaatcgggaccccaagcagcataagaacggtacatggttccacttagacgtacatgcaccgccgcgctttagtgttacgccagaggatattatatacgttaatttaggtgattcaattatactcaattgccaggcagatggcacgcccacgccggaaatactctggtacaaggatgccaatcccgtcgatccctcgcccacggtgggcatcttcaacgacggcaccgagttgcggatctctaccattcggcacgaggacatcggagagtacacttgcattgcacgcaatggtgagggacaagtctcccatacggcccgtgttataatcgcgggcggcgctgtaatcatggtaaaaacctaa

SEQ ID NO: 38586 - protein, 351 aa, DROSOPHILA
MGVCADLGSHRWCRALSTQHNTEKSKEQQQQSQPLEIPEQRASKCRGDIDRTTTTTIPASKTLTASPAKTAAFTVKTTRRRRSRRRAEGSSICVPIRRGQGSTPTPTIQVLQFVLVSLLALLAKNAQAHNIPEDAVHITAILGEGVIFNCHVEFPNDHPVPYVLQWDKKVSETGSDLPIYIWYESYPEHIEEGYKGRVSRVSQDSPFGSASLNLTNIRESDQGWYECKVVFLNRDPKQHKNGTWFHLDVHAPPRFSVTPEDIIYVNLGDSIILNCQADGTPTPEILWYKDANPVDPSPTVGIFNDGTELRISTIRHEDIGEYTCIARNGEGQVSHTARVIIAGGAVIMVKT

SEQ ID NO: 38587 - DNA, 3763 bp, DROSOPHILA
ttgtcatatcgaccgcacacaacctgcaagacacggacaacaaacacacacagaacagttgtaaaaacagttcaattaatttaaataattaaatgcgggaccaaactgttttaattacgcacacacgcgaacggagatcaacgcagatagtcctcgcggtgtgcgtgagacccacaaatataatatttcgtatccaggccaaaggacgcgggaacgcagaatcccgaaaccccagatccgaggcccgagtccccggcacatgtgccaaattatgccccatgggaaatggcgcgaattcggggcgtgctttggcagccaataaatggggagccgtgtataattggtttgaatatttaattgttgcttcttttttcccatagtcggccccaaaaagccaaaatgaatattgaattcattggggagatggtggaatatgggatctgcggtcgccagaaagggagtaagtggatggaaagcctccagtcggctggaaaattgttttgggtgttaagaactcacacttttcaagaattttgtgaaatatcgaaagaaataaatgtggctatttacagttctggattttcattcaagcctcatgcagtctaggaaatgggtcggagaaactattcagctgggtttgcaatgtgctttcgaatggatttatctcacatctattgctttctacaaactatagtctaatacaaaaattgaaaagaaatcataaaatcaattaaataacactgttttagagaagatcaaattatagtggtctataagatatattggttatcttcttggtttctaaattgcacaacaattggggagtcaacaagagcagctattcaatcatgcattggatttgtataaaagaaaccttataatttgaaacccccatttgcgattctttatgttttgtgtatatacatcattcagtcttaggtagtaaaaaggttggaaaatgctggcgcaactacataaagatttcagatttcagcgagatttaatccttgtacgtcgatggcagcgattgctgacggttcgcatccgattcttatatacaactaagaattctagggatttacggtgggattctttttggttgtttgtttgtttttttttttttttggtattattctcttaccagcttcgtctggcattagctgaaagaatgagtcgggcggttgtgttgcagccttgacattacgtggcgctgccggagcgtcttctattgaacccgaattttccgtggttcccaggaaaaattcgtggtcgcggtttggcatttgacagtttgcatttgattgcgcgcatgattagtatgagaaagttagatcgagtagcggttttgttttttttcgatggaggtcggtgaggaaaaagagaagaaaacgagagaaaaacaagagcgttatgttagagccaatccagattcagtttgtgcagaggtttttctcatgagattatgtgcaggatatgccggggagcgactgcagcaagaacccaaaaacaaaagaaaaaggaaaaggagcaagcgaacgaaagacagatatgcgtagaggatccagaggacttacccagtgtgcgcacagtcatcactttgctcatcattccgtcgcccaggacattacggcccaccacctggaactcgtaggtggttccggaggccaagccattgatggtcacctgggtgctgcccgagggcgtcacggaaatcgtttgccagtcgttgacgcccgcctcccggaaccagatcgtatagtcctgcttgtattccgatccgccactgtatcctggcagccattgcagcgttatcgaggactcggtggccttgcccgtgatattgtagggcgcatgcggctgggtgccctcgattaccagctgggtaacggccatcagggtggccacttcattggagaccacgcactgatagtagccaaagtcctccctcctcagattctcaatggtgatattgcccccggagatcttgatgcgattgcgctgtgactcggtcagctgctcgccctcttgacgctgccacttaatggtgggtcgctccgtgccctccgcctccaaggcgtcgcagtgcatctctacgctgtcgcccaccttgcgctggtagagcgtctccggctctacggtgaaggcgggcggcttccggacgagcacgtccatcaccccggaagctccagccgtgccctgtgcattgtacggcgtgcaggcgtactggccctggtgttcctcattgacccgcgtgaacagcagcgacccgttggccatcaccacgatgtccttcatctggtacggctccagcaggcgcttgtccttcgtccaggtcacgtactgcagctgcggactcgacttgatgtagcactgaacaacgccggctaggcgaaacggcaggtattgcaccgtgggcgtgaaggtgaccttggcgggatctgcagaagaaatgttgccaaattagataatgataatcgagttgtaaattaagtaacatggatttatgagtgtaactaaaagaattaatggagttactcacattcgacgctgaggtaggcggaggcgctctgcggatcgccgatgccgttggtcacctcgcagagatactggcccgagtcgtccggcttgatgggattgatgatgagcgagccgtccttgcggatggtcaccctggtctccagggcggccacttcccggacgggtgaaccctcgcggtaccagcgcaccgtgacgttgccgggcatggccttagcctcgcaggagaatatcactttttcgccctcgagcttcgtttggttggtcggaggcacctgatttgggtatgggaaaatgggatgggatggtatatttagaaaagagggttcaacgatcgggtaacgaactgcaaacttatgacggttgactgtggactgttgactaattcaaatcgtgaaaaggaaccacccctggccgttgcctttttggagactggagcttgacagctaatttttggctgtcgccgtcatcgatatcctttgtgtgcactcgctcccgagaaataacatttctgctgtcacagctatgaaatgtgccccgctttccgcctcctcaagtccctcagtatccccaaaatccccgctacccccgcttccctgctcgctgccattgacaacttgtcagtcaaatgtcaggagccaaacattacgatccgaaaccccttttcgtccttcccggtaattgcatgagtgcattctgggccgttgtgtacggcttggtttatttaatgggcacatttgctggcgctttgctttcgggcaatttgctggcagactgtttcatttgaattagttttagttatggccaaaattgatgtgggttgactccgactgctggtggccgaaatgggctcgtaaattgaattggctggatttgcctttcggtttggcttcgatttcccttggggtcatctataaaatgtccactttgcctgcggtcagataaatgttattgcaatatttatgcgcagattgctgcaaaacggttgagctgtaattgaagcacaagctatgtactatatgtacacttcccaccctgctgctgcatgctttccttggctggcctgaaaagccagcaaaaggtcaaagttcaagcgctccaagacggcaagccgcttgtgcatgtagggcggaaaacgctaagccagcaaggatagaccaaaaggcaggattgcttgtgaggtgcagtgacaaagatttgcgatagtttcaaggatcaatctaagttc

SEQ ID NO: 38588 - DNA, 1222 bp, DROSOPHILA
ctcctgcgaggctaaggccatgcccggcaacgtcacggtgcgctggtaccgcgagggttcacccgtccgggaagtggccgccctggagaccagggtgaccatccgcaaggacggctcgctcatcatcaatcccatcaagccggacgactcgggccagtatctctgcgaggtgaccaacggcatcggcgatccgcagagcgcctccgcctacctcagcgtcgaatatcccgccaaggtcaccttcacgcccacggtgcaatacctgccgtttcgcctagccggcgttgttcagtgctacatcaagtcgagtccgcagctgcagtacgtgacctggacgaaggacaagcgcctgctggagccgtaccagatgaaggacatcgtggtgatggccaacgggtcgctgctgttcacgcgggtcaatgaggaacaccagggccagtacgcctgcacgccgtacaatgcacagggcacggctggagcttccggggtgatggacgtgctcgtccggaagccgcccgccttcaccgtagagccggagacgctctaccagcgcaaggtgggcgacagcgtagagatgcactgcgacgccttggaggcggagggcacggagcgacccaccattaagtggcagcgtcaagagggcgagcagctgaccgagtcacagcgcaatcgcatcaagatctccgggggcaatatcaccattgagaatctgaggagggaggactttggctactatcagtgcgtggtctccaatgaagtggccaccctgatggccgttacccagctggtaatcgagggcacccagccgcatgcgccctacaatatcacgggcaaggccaccgagtcctcgataacgctgcaatggctgccaggatacagtggcggatcggaatacaagcaggactatacgatctggttccgggaggcgggcgtcaacgactggcaaacgatttccgtgacgccctcgggcagcacccaggtgaccatcaatggcttggcctccggaaccacctacgagttccaggtggtgggccgtaatgtcctgggcgacggaatgatgagcaaagtgatgactgtgcgcacactggaagacgctccggcagcgccacgtaatgtcaaggctgcaacacaaccgcccgactcattctttcagctaatgccagacgaagctgaatcggatgcgaaccgtcagcaatcgctgccatcgacgtacaaggattaa

SEQ ID NO: 38589 - protein, 400 aa, DROSOPHILA
MPGNVTVRWYREGSPVREVAALETRVTIRKDGSLIINPIKPDDSGQYLCEVTNGIGDPQSASAYLSVEYPAKVTFTPTVQYLPFRLAGVVQCYIKSSPQLQYVTWTKDKRLLEPYQMKDIVVMANGSLLFTRVNEEHQGQYACTPYNAQGTAGASGVMDVLVRKPPAFTVEPETLYQRKVGDSVEMHCDALEAEGTERPTIKWQRQEGEQLTESQRNRIKISGGNITIENLRREDFGYYQCVVSNEVATLMAVTQLVIEGTQPHAPYNITGKATESSITLQWLPGYSGGSEYKQDYTIWFREAGVNDWQTISVTPSGSTQVTINGLASGTTYEFQVVGRNVLGDGMMSKVMTVRTLEDAPAAPRNVKAATQPPDSFFQLMPDEAESDANRQQSLPSTYKD

SEQ ID NO: 38590 - DNA, 9057 bp, DROSOPHILA
ttatcgacgtagtatattgggctgtgagtcaaaaccggaaagaataagcctatcaacgtttagttttcggggttcctatcattcgttttttcgtttgtgttttttttgttttttgtttttacttttgggttaataaatatttgttcgagttaattatcgtgtgtaggtcaacagtaaacatatatgcagcagttatatttcatttaattttcgttaaactgtatttgttttcatctcgctttcgctttttatttgctttgtaggtttttgttttgtcgttaaataatttaattatgaaacaatttctctatatgttgttttaattacttttagcgcatttattttgagtcgtcgcctcttcgatcatctctgctctagttgttaacaactaaattgcttaacagctagcatattccgtattaatttagtttagttgtaatgtaacataatttaggcttacgcttgtggattgttaattaatgtttaatgtttaatgctcaatgtttaacatatctcgatctgtgttacgttaagtatcaatatctaatacactcgtaaataatagttaattgtaattgtaatttgttctttgcatatgtcgtcaaacaatgtttgctccatttacttgcgttaaatgtcaattttacgtttatcgattttgtaataatatgttgctataattgctatagttgttaaatattatacttaaactctgggcgctctcctctccagccccaaaatatatgtacacagctttcgtctcgtttaaatctactaattgtttctggcttctaagtgttttgttttctccattcattttgtttttgttttgcatttttctgggtgtgagtttgcagggggccaaacttttaaagttcatctgtgaattggggggggggggggcctgatccaatatcaatatcgcgtctgattgcctcggatggatctggctctgtgtgggcgtgggtgtgggtgcggctcaattaaatgcttcagtggctcagcaaacgctctccatttgctgcatggcttggcgtttgcggtaggcatagaactcctccctcatggcttgcaggcggacctcgacgttgtcatagcgtggcaggtgggccggcagagatcgttgctttctggccccccctccgtagggggcgtggctgtgcagcagactcccactgaggggacccagcgtgtgatgatggtagggatgggtatctatgtgcagattgagatcttcgcgcagcatactggatgcactcggtgtgggcgtggccggatcgaactcgtagtgcccatccacactgcccacatccacgggacacggcgccttcggaagattactgtccgttgccgcgttcagtcttgagatcatctccagccagtgggccatcgtgtacggtggcgttgtggccctgggataggagtaagaaccatgtggcgtctgtccctgcgcctgctgacctccaaagtagcccgaatgcttcggtggcgatggaggtgctctgtacggcggcagtaatcgccattcactggtgctgcccgggtgattcgaggtgttcttcgaaccaaaaccactagaactggaacgggattccggagaggcctccaggccgcccggattcatggagttgcgcaggttcagattgagttgcggcagtggagagagcatctcgtgctgctgctgacggttactaaagaggcgggaatgatgacgtggataccagcgcgttcgggggcgatagctggcctgcgattggtagtagcttctccacgacggaggcgacggcagctggagtggcacaaagtgatcctccagcggatgctgcttttgctgctgctgtcggcgagtctcctcctgaatggttctcaatgaaggcagctcctgggagtagtacctgtatctgctgctcagattgtgcgatgaacgttccgcggagttgggtggatacacagtgctcaggtcgctgaagtgggtgggataggctccactgccaccactggagagcaaaagctgctgatgatgaggctgcagttgctggggggaactggaaaatatcctggagatcctcgagggagtgtaaagctgctgttgctgactcagactgccactaatcgtatttatgtgcagtggtctacttctatccgcattgccatacagattattgctgctggtgtagggacgcaggacattctggtagcgggcacccgacactgcctcgtcgaagtaggattgcgaattgggaggcactgcagactgcttggccccgatcttcagcagaccctgaagaaagcccctggccgagtccgccgccgactggagactcaactgactggaggaggccaccaagggacgtcgccatgaagcacgagcggtgatgaagttccgtcgcgacagaaatccaccatcatcgctggaggatttctgcgatacattgctgttccgccgctcgaagagaccaccgtccaccacatccacgttgccggactccagcgtctgttgcgagtatcccagtttcgagacgccctccacatccagcacaaagcgtccatcgaggctccgttggatgcggcttacggatcgccttcgtccgccgcccccgtcgtcctcatcgccatcctcgagatttggcgaactgtagatggagtggcagttggtgcagcgatcaggtggccagatccagtggagtatggcaatgagaatggcggttagacttgatattcgggtttgtttgtacctgtatggttagggaaaaaagtgggtttaattggtgtctataaagtataaaacgcaatccaaagaaattaagtgaataatagttgaaagaaataaatgaaattaaaagggcatgctaaatattgcagttaagcagtgcatatttttagacatttctaaatgactagtaatgtcataattatagttgcagcattgcttcaacatcttttaagatgaattgaaagtagcccccaattcacacagaaaatggggattcaaaactaaacagaaagagaaactaagaaaatcacttaactgaagttaattgaactgaggaagaaaactttgtttaagtttgagaaaagtttgcttacgattttgattatgacaggatggacctggaactataaaaacgctttcataatcacggtaatgttcagtattgctatggagcgatagtagatcggtggaacgtgcatggcggttgccaatcagagtgaaatgggttagacagatagatgacaacgttacagatacggatacagttcgagattcagatacagattcagataaggtttgacaattgggcgggcagaatttggagtcaaataattctgatgcgcaatccgaagggcatactcacttttttaaaggcacttgaccagaggaaattgagcccgtactgcgattgtgcaaatgatgattattggcggcaatgttacgagcatccgttatcctgcaagctaccatgttgaactctgcaaacgtataatttctaaaattaatttggcgtgcagcgttagccgtccaatccggtaaataaaatacccgtacaccgtacgtacagctatcaagcacacacactctatatacacacacgacgttcacggttataggtctatgcatatgcatatctactacggtgctctctacatatagacgtatataaatgcgattacgctctttcggaatactgcttaaatcgaggacaaactggcgtaacgccgatgtttatttgctttttgtcgaggacgcggcgtaattgaggtcctgcagagagaaaggcctttcatatggttggaatggggacttttgggttaatatgtatgattataacacgtcggggtgccacagaaatctctacggtttcaaaatcactaatgagtgtgcctgaaagtatgcagtaccattttgtatcttcatcatgccacatacaaaatatagcattgccagcttttacacaccttataaatagctttaaaacagcaggagatttagctactttaatttgttgttacttgtttaattggttattaacaaactcggtccgactctttctctctgtgcacctggtcacgttgattatgccaatttgcatgccagcatcgtccgattacacacgcttgttgtttcagttgtcgtggctaataagtttagattgtttaaattttagcagttactgggctattactaggggacacttaacagtcgccagttagcagataacagttgccatttaccagttagcagttagatgactacgactaaactatgttgttggttagtttcatttgattggggttacattgcaattacatgtggaacaggaggtggcgccaattagtgaaccagtgggccaatttcgcagagtttgggttaattgaacggcgactacggggtcgtggaataacaatgccaactaaatcgtaacctaatgctcctccggccacttgcgtttgacggtcgatgacaaactaaaccgtcgaaggggaacacccacatacatatacggctatatgcggaaacttggcattacagcaaacaccatatagcatatggcatatacacacactgtacgaggtgcaagtatacacagccgtgtgctcttcgcagtattttatttaggatctggcttcgaatggttggaaaaaaaacaatgacacgtgaaatggcttttaaatggtcaagttacgaattgtgccaacggaaaagagagatagagagatactggaactgaactttaatgcaaatcgaaaaccaaatattgctgatcatatggggattatgggtatgcaaaaaacaaactgaggataagcgacaaaaaacttttgcccaagtacaagtgattcacacaaaccaaagaaaaaaaaaaaaaacgaaaagtgttcgagaagtagtgtttttgtttggcttttttgtcatgttttgcttggcagtgcatgtgttttttgggtaattatgaaatctgtgagctctggaatgtgtggggtgcttgagatatatacaaatatatatatgtatatatatttatatattcgaaaaagtgcggcagtatctgaacgatctgcccgagaacagagacccaagcattgcggattgttagtggaatgcagatgcttaaacgatggttgtggtgatgtcagtgttggttagttggttctcgattgattggttggttggttggttggtttggttggttggttggttggggtggtgggaactcgtctgaaaataacctttagttgtcagtactcaggatctgtggtacacgacatcgacttaaaatgattgcaaaaacttacccttgcttgcatcgatgttggggttttagggggtcttactatacgctttactcatattttagttggcccggtcgctccgccttttgactgcccaacttggactccataagatatatggttttaaattggtgtaataccaccagttcggagtcccaaaagttggccagacaagggcgggtatgtaccggatataaccgatcaacgacgcgatcattttatgtttcggattcggttttctagtttcgaatgctctatcgacttggtttgtgggccttattttaccatctttgtgcgtgaattgtttacaaaaaacgtctgcccagtattgtgctatataaatggtcatttgccatgtatatagatctatataggtctatgctctctgctgaaaatgcctttatctatcatgaactcagccctgggcagaaacaacgacgatttggccaagaacatgcttgtaaatggttagtagataaaggcatttctaccatcagcattatcagcttgtcacatttatattattaccgcttttacgttaatctatcgtaatgtgtttttaccacagcatgaaaaaaaaaaattgaggataaaattgagaacaatgtgttctgtatagaatacgttcgtatgctcatcatatttcacagttaatgggctgcattgatttaaaaattcgcaatttccctgctcattgtatatttcttcattcttttttttttctgtgttgtgtaattgtgtggggggaaggggggtctcggaaagaatacataaataattgatttaaacaacgcaacattaattaatccacttaaaatacagtttaaagcaaaaaccataacaaaaagcagagacagaggttcgatatggtcgattttgttcggtttggatgggtttcattcggtccagttttgattcgattgcattaaagccagcgggcgtcaaataatggatgtcctggatatactggtcctctggccctggcattttcaatttccgctcaactttagccggcagattcatattggttgcgaaaaggggtttccccgggaaaaggcggggacagagcttaatcgattgcgtttggcatcttcgcttaatgcttaactaaagtggcaacaactagtaagtaatatgttcatgcgatgaattcgaaaacaaacaggctgcaaggcgctatgaagccagattgagtttacagaaatcataccgtaggcccaatgatacgaacagaaggcttaagtaatggaatgcaaacaaaactgataacttcaggggggcggtggtctggtggccgattttcaactgagatttgagggggagtcacttttgtctacggaaatggatgaatgggaccaggggggacgagagcataggtacaggggcggggtttttgggcccgggttaaagagaaactcagagctaatgaaatcaaaaaccagaattcagaaaataaggataaccaaataaggagaagcgaaccaaaatccaattagtatgtaaatatatatatacagagattttttcagcaacttttgccaaattgtaactcaattttacttgcacaactacaacaaaaacgtacaaatcatacagatctcagacaggcataatttatggagaatttcatatcaaatgcctcaacggctcagaaattttgtcaaatattttactttgggcaaacaaacggtttcgtatgcaaattccaatgtgctgttgttgccgaacaaaccaatccttcgaaactgaacgggaaacggaagtggctattttaagcaaaactcaataaggtacagcaaataacgattatcggtaatcagttcaaagctatcgataattggatggcctctgccgtcggaaactcggaatgtaggtacattattaataattagtggctgttagttagttagtaagttggttagagttattacactcgtatctataacgattatagtttcggtttgggttcgccaacaacaagaacattgtcatcgattattacgattacagttacgattattaaagatattagtatcgcacgaatcggtatcggtatcggtacatctatatcgttagcattatcattagcaatatcaagttgtgattgtcatcaaaaaccatttcaagtgtgtgtgttagctttagcctcagtgttacctttttcctgttttcgtcgtttacgtttattgcaaatttttacggcacaaaccgataaaatgatcgcaacaataaaaaacaggatgcccccaacgacgccggcggtaatcgccttgtgcttgacacgtgccggcacagggaacttcacctcgtcgctggactcgtacgacttctccgagttggccagcacgcggaagtagtaggtccttccgcccaccaggttcttcaccagatactgcgtttcctccggccggatttgtccccggttgagtgtcttccattgcgcgtccgtccggtacttgatggtgtagaacttgacgatatgcgcccgctccagcggcgactgccacgtgatgaggaatccgttcgagacctccgtgacggagacgttcctcggcggtcctggcttgggacctgttttatttttggggggtacgagaatgcaaggtagagaagaaacgatccattagtagatgtacacaaaaagagattgcaaaggggtagagcacggggttttgtcctgccttgtttttcagtcagcaatttaaagcaatttcaattgccaacaacgtacaaaggtgaaatccgacaacgaaatatgcatacattgaaatcaattgagggagacgtatgtacatattcattcataaatcgtaaaattcgctttgaagtgcctctatgtttttattcacctaattgggttcagtaatttaaccattagattttaactatttgcttttccccccttgaaagccgtattgttttcagtgtacttgtgctaaatcgtttgctttatttttgatttatttgcatttcattttatgctttgtttgtttgcgcgaaggattttccactgcctttttgttaccttctgtcgttaagcttttccaaatttctctcaaaaaatgaaaccctactttaaatttgaacaatttaaatattgcctagaaaaaaactaaacaaatgaatttaattataaaatttactatacattgttacattttacaataaatacgaagaatggcgcagtgtatggttcgcccttctttgttttaggcgattttatttatttcatttttggctacgcttaaaagctttatgaaaattccatttggctttttgcaactctttgcgacctttttccttttttgcaccatgcatttattcatgacaacgagtcccggctgtgaggggattgacaaaaacacattttaattagcatacacacataaaactttccattttcgttttcgcatttgaatacttgtgggtccccaacttccgttcgtgtttgcaaatggcaagagtggcaaaaaaaaatggatactacacaaggatactgctgagtgcatgcaaacgaattataggcatagataacctgaattccctgtacgcttgtcaggacctcctgattggagaactcctgctggatgcaattaactgccggtctcgatggaattccgggctcgtagactctgttactctggattcagcttgtcgcacatgcaaatgcaaattaaaactgcttggagaaatacacaatatgtcatgtaaatggcgcccaattcgtggtagctcccaatggcgcttatgaattttgggaacagc

SEQ ID NO: 38591 - DNA, 2139 bp, DROSOPHILA
atgtatgcatatttcgttgtcggatttcacctttgtcccaagccaggaccgccgaggaacgtctccgtcacggaggtctcgaacggattcctcatcacgtggcagtcgccgctggagcgggcgcatatcgtcaagttctacaccatcaagtaccggacggacgcgcaatggaagacactcaaccggggacaaatccggccggaggaaacgcagtatctggtgaagaacctggtgggcggaaggacctactacttccgcgtgctggccaactcggagaagtcgtacgagtccagcgacgaggtgaagttccctgtgccggcacgtgtcaagcacaaggcgattaccgccggcgtctccaagttgggcagtcaaaaggcggagcgaccgggccaactaaaatatgagtacaaacaaacccgaatatcaagtctaaccgccattctcattgccatactccactggatctggccacctgatcgctgcaccaactgccactccatctacagttcgccaaatctcgaggatggcgatgaggacgacgggggcggcggacgaaggcgatccgtaagccgcatccaacggagcctcgatggacgctttgtgctggatgtggagggcgtctcgaaactgggatactcgcaacagacgctggagtccggcaacgtggatgtggtggacggtggtctcttcgagcggcggaacagcaatgtatcgcagaaatcctccagcgatgatggtggatttctgtcgcgacggaacttcatcaccgctcgtgcttcatggcgacgtcccttggtggcctcctccagtcagttgagtctccagtcggcggcggactcggccaggggctttcttcagggtctgctgaagatcggggccaagcagtctgcagtgcctcccaattcgcaatcctacttcgacgaggcagtgtcgggtgcccgctaccagaatgtcctgcgtccctacaccagcagcaataatctgtatggcaatgcggatagaagtagaccactgcacataaatacgattagtggcagtctgagtcagcaacagcagctttacactccctcgaggatctccaggatattttccagttccccccagcaactgcagcctcatcatcagcagcttttgctctccagtggtggcagtggagcctatcccacccacttcagcgacctgagcactgtgtatccacccaactccgcggaacgttcatcgcacaatctgagcagcagatacaggtactactcccaggagctgccttcattgagaaccattcaggaggagactcgccgacagcagcagcaaaagcagcatccgctggaggatcactttgtgccactccagctgccgtcgcctccgtcgtggagaagctactaccaatcgcaggccagctatcgcccccgaacgcgctggtatccacgtcatcattcccgcctctttagtaaccgtcagcagcagcacgagatgctctctccactgccgcaactcaatctgaacctgcgcaactccatgaatccgggcggcctggaggcctctccggaatcccgttccagttctagtggttttggttcgaagaacacctcgaatcacccgggcagcaccagtgaatggcgattactgccgccgtacagagcacctccatcgccaccgaagcattcgggctactttggaggtcagcaggcgcagggacagacgccacatggttcttactcctatcccagggccacaacgccaccgtacacgatggcccactggctggagatgatctcaagactgaacgcggcaacggacagtaatcttccgaaggcgccgtgtcccgtggatgtgggcagtgtggatgggcactacgagttcgatccggccacgcccacaccgagtgcatccagtatgctgcgcgaagatctcaatctgcacatagatacccatccctaccatcatcacacgctgggtcccctcagtgggagtctgctgcacagccacgccccctacggagggggggccagaaagcaacgatctctgccggcccacctgccacgctatgacaacgtcgaggtccgcctgcaagccatgagggaggagttctatgcctaccgcaaacgccaagccatgcagcaaatggagagcgtttgctga

SEQ ID NO: 38592 - protein, 712 aa, DROSOPHILA
MYAYFVVGFHLCPKPGPPRNVSVTEVSNGFLITWQSPLERAHIVKFYTIKYRTDAQWKTLNRGQIRPEETQYLVKNLVGGRTYYFRVLANSEKSYESSDEVKFPVPARVKHKAITAGVSKLGSQKAERPGQLKYEYKQTRISSLTAILIAILHWIWPPDRCTNCHSIYSSPNLEDGDEDDGGGGRRRSVSRIQRSLDGRFVLDVEGVSKLGYSQQTLESGNVDVVDGGLFERRNSNVSQKSSSDDGGFLSRRNFITARASWRRPLVASSSQLSLQSAADSARGFLQGLLKIGAKQSAVPPNSQSYFDEAVSGARYQNVLRPYTSSNNLYGNADRSRPLHINTISGSLSQQQQLYTPSRISRIFSSSPQQLQPHHQQLLLSSGGSGAYPTHFSDLSTVYPPNSAERSSHNLSSRYRYYSQELPSLRTIQEETRRQQQQKQHPLEDHFVPLQLPSPPSWRSYYQSQASYRPRTRWYPRHHSRLFSNRQQQHEMLSPLPQLNLNLRNSMNPGGLEASPESRSSSSGFGSKNTSNHPGSTSEWRLLPPYRAPPSPPKHSGYFGGQQAQGQTPHGSYSYPRATTPPYTMAHWLEMISRLNAATDSNLPKAPCPVDVGSVDGHYEFDPATPTPSASSMLREDLNLHIDTHPYHHHTLGPLSGSLLHSHAPYGGGARKQRSLPAHLPRYDNVEVRLQAMREEFYAYRKRQAMQQMESVC

SEQ ID NO: 38593 - DNA, 9265 bp, DROSOPHILA
tgggggcaattggagaggggagctgatatcagcatgagtaatcctccctccccccactttccacattttgtccctcccccatttggattgcatatcatatctcaaacaaagccaaaacgtgattctacaatatatttccagcacttagtctcggggaaaatgcgcagtcgggggacctttaatcgcatcgaccttaataatagtttattttcatatcagccgccaattgtttttagctgctacatatttaaattgagtgccagctctgaccgaagcctatataataccacatatgtatgtatgtatgtggagctgtgtttgcaagtctcaactcgagatatatgaaagtgccaatggacgatagtcggactcgatttcaatttcggtttcaatggcttccatggcaatgggaatgccctattagtctggagtgtcatcgattcttatcagttaatgggatggtttttgctgccagtcaggtgcagttgcacttcgccgcattgtaacgcaaatctggcaggtacgtttgcccattaagtcaagttgggtgcaaattgcagttcattcgaagtactttcaggtgtttcgccgcaattaaaatctagaattgcaacgatgggttcccaaaacaattgtcagtgcataaccaagtgctcggaaacgtaatggataactggctataaacgattgcaacgtcagtggttgaaatacgtgccagacaaactgtttttaggggggctgttaaaaaaactcggtttcagaaatccgtagatgactaatattcaaaactagccatccgtaacggaaaagctcacaagttcgaaagctacattaaaaacagctttcgattcgaacaacttgtcgaaagagagaaccatacaacaatttcgaaaaagctttgttcgaagagtagtgcccataaggcggtttatttgaaatgaatccaaatagaattagtcgaagttataagatgattcgcttcccaatatgcgaaatcccatttaactatgtttctgtttgttttatttggttctcgaattcggttagtttagcgttacaattagtagagtttatgttacagatagcagctagacgtatattaaaagtcagattcccacggactggtgcacggtgaacaacccacccatttcctcatctatcgcctcttagtttcactggccaacatggttgctgtcaaatcgccagcggatctggagcaatcctcaggtggactggcgtatcttgatgctgtcccgatcccgctgatcctgttcgtcgctgtcgcagtcgccgctctcggcggtgtcctcatcctcgctggcggagctatccttggcgaacagatgccttaggcagctccgcttcacgtataaaaaagcgcacagggcgcagagcaggaagatgacgcccacggaactgccgatgatcagggcccgcactttacgctgcgatggcacgtcgatgaggagctcgtgactgggcaccgattgctgggtttcggtgcccaccgccaggacctgcaccttgaacagtgtgtcctccttgaggtggcgcagctggtagtagttgtcgaaggtctctgcgtggccgatgaggaaatgctccggctccttccaccaacgaacggcgtacaggcgcaggccttccaatccctggacgggatgctcccagtggaggagccagccctgctggttgctaatggcagtgagattccagggagctcccagtcccccggcaggcgcagtgacctgacccagatcgtgttgcagctgctgggcatcaaagtcatccgctctaatgggcgaggctgcaaaggatgtgtgtattaagtatataaatatatatcaaactcagttggatggaacttgatcttacgtagcgtttgaaagcggaactgcttgctgaacatgccgtctccgtacttgtcctggctgagcaccataaattcgtactcttttcctggctgaaggtgctgcaccgtcgcctccatcacctttttatccaacacgcgaagcgttcgccattcgggtgcctccatgagtcgataccaaacagtgtactccaagttgggacgaaggtatcctaaggcagggtacataaactaaacttagaaattatgtacttaaagagttaatttgacttcggactcaagtcatcagattgcaggaggcacacacgttcgagcccatcaacgaaaatcccctcacacttcgtactacgtactccgtatcgaatgcagtgcggagcatctggcctacgtccacatttccacacccaattacacccattctctcacctggctgccagcgtatggtgatgcaggtctccgtgctgttggccgtgagattgtacggcgcccgcggtgcgatgttctcaatcatgagctcggcctccgccgtaatggtggccgcctcgttggtcgccgagcactcgtatattccacggtccccctccaccaatcccgtgatagtcagattgccgccgctgagactgaacctgtccgccggcagcggctgcccgtctttctgcaaattggtggggtgcgtgtcagtgcaccggaggcgaaatcggagttacacagggaaaacaaaggaagtcatatgaagttaattaagtgggaaacctcataggttattaaaacgatagtgtatgagctgcaaatagttgcacctataaccttgagtatgaagtttaaagagtacttcgagctatcttttatcaaatggaatgttagatctttttttctttctgtgcatggacaggtagcattgtccgtatgcataattaaaaatgcaatcaagtgagactgtacgctctccccttttggcactaccatttttcagccacctttcgccattttaggcagtgcaaaatgacagtacggagcatatggacaatatggacaatatggactcaccctgccccagataatggagggccgattgtttccgtcgcggtcgatggcttcgcagggcagctcggcggcctcgcccagcttctggatgtagatggccttgggcgtgacgctgaagatgggcggtcggagcacaatcacgctgatgaccggcgatggtccgtccgtgccgaggtcgttgtagggcgtgcaagtgtagctgccggcatggttctcgtccactttggcgaagaacaggctgccgttcatcttgtagaagaccccgggcacattgtacgagtcgaagagcaggccgtccttctcccagcgcaaattcttcagcggcggattcgcccggaagtgacaatcgagcacggcgggctggccgtacggcaggaaaacctccggcggggcgtaaatcaccttggccttatctgaaatggcgcggggggtatattgtcgttattaatgtatttctgaattatttcgaaatacccacattgtatgttgagaaaggccttggccgtctgcagttcgccatcgctgttgcgcaccttgcactcgtactcgcccaggtcgctcatcatggtgggatcgatgctgaggctgccatcgggacccatgtagaatctgcgcaccagatcctggacctcttgcagcagcacgccatccttgtaccaggaggcctgcgagttctccggatgcttcatcacgcagtgaaagaaggcggtctgtccctcccggatcgtctgattcaccggcggaatgcggatgagggagccaccctggacggccaggtggtaggccgtgccattgttgcgaaccgagggcgagcgattgggaaagctaacttggcagtggtaccaaccctggtccgattcccgaatggcggtcagattcacggaggcgcgtccaaattccggatggttctcgaccaggtgcaatcggccattgaatagctcactggtggaggtctcctgctcgtaccaggtgaagattttcttgttctgcgtacaaatgtatgtttaatgtataattttcgtaagaacatgccaactataaaattgctatgataactgcaactcttaagtgcgatacacctagatacaaatgtccctgcttgtgactgtgattttgctgcgccatctcggctgcaattgtagttataaatcatgagcaatgcggaatctatatggagagtacgcccacgcacacacacacacactcccactcacactgcaacagtttgtgtccgatgtgtgtgcgattgtttgtgcccctcgattgcgccccatgcgccattatcattttcgcaaactcccgctgagccctcacaacagagccacccatttccacccgccagtttggccgccagccccagctacccattttgccgtaaccatgatggtgacgtagcacagcggtgggcccccaaaatccccacaagaatataacaataaccatgggaggggtggctgttagagggggggattgcggaaggggtgtggaacccatgccgctactttgttgacaaatttaaatgggctcacgtggcgcggtgcacttgaagtgctcaatgctagctcgcccctgaaatgggattattcgaatttaattcggtgtgctgcactattcaccaccaaagagattctagttcaccaggtgcgatatatatggatatagtcgatattcgagcattatagacagctatccaaataatcaggtcggtctcaaaataatgaatcaatttattgtttattgtccattagggtgaaaaactgcaggccataaatcagtttgatgccctgaaaaactagtcaactatgcaaagtttttgatttaaaactaaatatctcggttaggcattcagcaccacgaagtatcttgtggatgtcatactcaaaattactaccggaaaaaagtgcataaaaagatctaagctggccaatagattatgtgcttgtgaatggataataattcgatttgaaagctgttttttgtttaagcttcagcttctttgccattttttgcccgctggcatattaaattatttttattttaattaatgctgaatatatttgtcaatatttattaaatatacggccaggcaattatgctcgcgcataggcgacacgaaaaaaaaagcgcttcaaaattataataatggcatgcgagtaaacagaatgtgtttgcgttgcatcatatggcaaagagttggaaaaaaaaaccgcgttaagcttaaattatttaaatgcaattgaatctgctgcggtcgctggccgctcttctaattgctctgccacatatatttttatgcttgctttgtttgcgcacttgactttcgtccatgtggcttacatagtatggatagtatgatgctatatgggatataacaactacatatatgtatgccgttgcatttgccgtactaggactgtcacaccccataaaccgcatgctagggattcagttttcccggttattgatagccagcgaccgcagaaaggcagctgtgcaatgggatatgagctgcgtttaattgtgctggagcggctccaccagcatcggcggatgcagtgggtgtcagttgatctattgacattaggtttgtgctttaattgagatcgggccagatgcaccgtgcggcatcaatgtcacccacatggcatcgccatcaccgtagcactcgtaggagaccagccgccttgactagaactagattatgatgcactcaagatccgcccgtcctgcctgtgtgtgtgtgtgtgtgtgtgtgtgtgtgtgtgtgtgactatgattatgtgcagtacacccaactgtgtgtcaagtgtcgtctgccgccgccgccgcacacacatttatcagcattatctaaccaattacaaacgtaacttgatttatccggtgattttgccgtcgttgtggcgcgaaaatatgcagcccagcctcgcggtggccgtgaaagtcgcaagctcgacaatatagaacatggaatacgtttgcagacgggtcttataaatagtatataatatagtacagacttgccataaatcaaacagattatgcatattgccgcagactctaatcccgcgtacgaatatttgtttaattacacgccattacgtggtggtggagcgatggcccatgccgaagtccatttgccaacgcaattaaagtgtatctatcaaaatgacatcatgatgacccgctgaccgagtggacacaaaaagcggaggagcacaatgggaagaatggaaaaaaggggagtgaccaccgaggaaagcggaacacaatatgtgaaaaagagcaaattaagtaagccagctaagtagggaaacgcataagcgggtcggtcagtccctcgatccctcaattaccgatgagcatgggcatcatgggttaaagggggtcagatgtggacatttgatggccactgatgacgggcgtgtgcgatgaatggcaattcgctcgatttaaatactaacgcgcgcgcggaacatatttcagtctgaaattcgcactgaattcgtctgcggggggggggcgaatgcgatgaatttgcaattgaattaaattgcattactcacagttgtcaacaaaatgccagccattcaattcgattgaatccaattgaaattgatttcaactggtccacttgccccgctgtctttgatgtcacacttcacattgacacttttcgctttttcgcgatttgtttttcgccccgctgatgctctgttggtaatttaaagtgtttgacgatactgaaatcagttcgcgcctcaaattaaatttatatgcagcaggaatgcaggcgaacacggggcagggatgcggccaggatgcaacccgatcgactgcatgtggttgcgctttaattagtagccaagggcgggacccaccactagccaccaacacggccaccttggccattccgtgctccatgggtttttggtggatggggaggcaccccactggcacgacgattgcattttctgcgctgcaatgcacttgtcaaaaattgcattgcattgcagtgcacaaaacagcagcgatgggaaaacatgtaaagtgtggcggcagctcgaacataaacaaacatttataaattacaaatcacagccactgaaatatttcaagaactaattttaatttattcgtccattcatcgactctttaatgcattaattccaaaaagaagtatatttttcactccacgggagttattggaattcctaaaaaaaaaactatatacatattttggcaacttaaatgtataaaactacaagaatattaagatttcgtattttttctttaataccttatttaaaatcgcaaacttttttatatattatttcgccactgggattcgcgcagtgcggtcgtaaagtctggcccttttaatgaatgtgggagccgcgttccatgctgcgctccaccagcaacatccagcagacgcaattaaggctaaccaagcattccggacgggccctggtcagtcagtcagtcagccggagtccggtgtccggggatcggggctcggagtccggggtccgaaccacctacgtgtctgataaattaataatttcgacaatttcatttaagaactgcgtgcacgtcggcgtgagccataaataactgagtgggcatcacagataaaaaaaaaaaatacaaacactggtccatatttacatttttcgcatattttttgcgggttaagtaatattaaattataatatgggaattgcatgccctttacttcttatccacaaaatattcacttgatttcttcaatgttacttcgaccaaacttacatcctttgtccagtgcaccaagtagggaatgggggcatcgaaggggaagtcgatgtagcagttgaagaccacgtgggagcccaccttggcctccaggttggtctgccgcctgtgatcgcgggcagcgctcgtacaggatatgttcattaagagaatgatcgccagaagagcaagtagcgcggatccggattgccggaatgttctgctgcgtttcgctggcatttcgatgttggatttgatgttttcttgcgtttctcacagtctgcacttgttgcactcagtcacacacgcgcggtgtcttgcataatgtttccgcgtaggccagtatgcacaaaatcaaattaaaatccaacccgaaatcaggtcaattggggccctcgacgaggagcagctcgtttgcggaattcggaatgtatctaagaggcgcacgaaacccgatccgttgtttacgatatctttgtgcgcagttccgttcaggtattgtgtggcatagtatatggtgcggcagctatgttgtggcgatctttttcgaggttcgccaactgaaccgagcggctggagaagcgctactgaatgccgagaccgagaccgaatcgagatcagactgcagaacgagtgatagatgaggcagagcttttgtgatgatgtatgctgcacagaaagaatgctgtggttcgtttgattgtgagtacttcacaaacttgattctccttcgcttattttttcaatctgatatgaggcctaatccactgggattgaaaatattgtgctgttctgtatcatatcatcgttttctctctgtgtaaagcactgaaaacccgacctgcccagacgatcaccatttctctcgtctctctcgcccgtcaaacgtttgactgcatttgacatttgacacacgcccacgccataggctttgatgaggtctcctttgtctggaaagcgtctcccccacaattcgctttcgcagacgtttatccacttaagtaattagccgatcaccaaagtgttgcgaatagcatttggcctcaagagtgaactatcccagcgacagaagtcgaagagtgggcaattttcaccattgattccttgattgatttatgggaattcacacactgaaaaacggggtcaatcgctcctccaagtcgcatatatatccagtgtgcatccgaattgtacggaatttttgtgaatttcattactttaattgccccaatgtcagcgacgtcttcaggttggccacgctggcgtatgagtgatattttttgtgcaggcaaaggggcatcaattaagcgcagcttccgggatattttagatggataaatggaatgggtaatgaaaacacaggtttacggttttatttgatcaatttcaagttttgtatttttatttgtttttgtttggttttttgtttgtttgtttttttttttttgctttgttttgtaagttttatttgtttaaaaattttgttcattttgctaatttctctttataattgtgtgtctgtattaattacaatatatttcgttctaaactgatttatccttgtacgatttatat

SEQ ID NO: 38594 - DNA, 2718 bp, DROSOPHILA
agccgctcggttcagttggcgaacctcgaaaaagatcgccacaacatagctgccgcaccatatactatgccacacaatacctgaacggaactgcgcacaaagatatcgtaaacaacggatcgggtttcgtgcgcctcttagatacattccgaattccgcaaacgagctgctcctcgtcgagggccccaattgacctgatttcgggttggattttaatttgattttgtgcatactggcctacgcggaaacattatgcaagacaccgcgcgtgtgtgactgagtgcaacaagtgcagactgtgagaaacgcaagaaaacatcaaatccaacatcgaaatgccagcgaaacgcagcagaacattccggcaatccggatccgcgctacttgctcttctggcgatcattctcttaatgaacatatcctgtacgagcgctgcccgcgatcacaggcggcagaccaacctggaggccaaggtgggctcccacgtggtcttcaactgctacatcgacttccccttcgatgcccccattccctacttggtgcactggacaaaggataacaagaaaatcttcacctggtacgagcaggagacctccaccagtgagctattcaatggccgattgcacctggtcgagaaccatccggaatttggacgcgcctccgtgaatctgaccgccattcgggaatcggaccagggttggtaccactgccaagttagctttcccaatcgctcgccctcggttcgcaacaatggcacggcctaccacctggccgtccagggtggctccctcatccgcattccgccggtgaatcagacgatccgggagggacagaccgccttctttcactgcgtgatgaagcatccggagaactcgcaggcctcctggtacaaggatggcgtgctgctgcaagaggtccaggatctggtgcgcagattctacatgggtcccgatggcagcctcagcatcgatcccaccatgatgagcgacctgggcgagtacgagtgcaaggtgcgcaacagcgatggcgaactgcagacggccaaggcctttctcaacatacaatataaggccaaggtgatttacgccccgccggaggttttcctgccgtacggccagcccgccgtgctcgattgtcacttccgggcgaatccgccgctgaagaatttgcgctgggagaaggacggcctgctcttcgactcgtacaatgtgcccggggtcttctacaagatgaacggcagcctgttcttcgccaaagtggacgagaaccatgccggcagctacacttgcacgccctacaacgacctcggcacggacggaccatcgccggtcatcagcgtgattgtgctccgaccgcccatcttcagcgtcacgcccaaggccatctacatccagaagctgggcgaggccgccgagctgccctgcgaagccatcgaccgcgacggaaacaatcggccctccattatctggggcaggaaagacgggcagccgctgccggcggacaggttcagtctcagcggcggcaatctgactatcacgggattggtggagggggaccgtggaatatacgagtgctcggcgaccaacgaggcggccaccattacggcggaggccgagctcatgattgagaacatcgcaccgcgggcgccgtacaatctcacggccaacagcacggagacctgcatcaccatacgctggcagccaggataccttcgtcccaacttggagtacactgtttggtatcgactcatggaggcacccgaatggcgaacgcttcgcgtgttggataaaaaggtgatggaggcgacggtgcagcaccttcagccaggaaaagagtacgaatttatggtgctcagccaggacaagtacggagacggcatgttcagcaagcagttccgctttcaaacgctaccctcgcccattagagcggatgactttgatgcccagcagctgcaacacgatctgggtcaggtcactgcgcctgccgggggactgggagctccctggaatctcactgccattagcaaccagcagggctggctcctccactgggagcatcccgtccagggattggaaggcctgcgcctgtacgccgttcgttggtggaaggagccggagcatttcctcatcggccacgcagagaccttcgacaactactaccagctgcgccacctcaaggaggacacactgttcaaggtgcaggtcctggcggtgggcaccgaaacccagcaatcggtgcccagtcacgagctcctcatcgacgtgccatcgcagcgtaaagtgcgggccctgatcatcggcagttccgtgggcgtcatcttcctgctctgcgccctgtgcgcttttttatacgtgaagcggagctgcctaaggcatctgttcgccaaggatagctccgccagcgaggatgaggacaccgccgagagcggcgactgcgacagcgacgaacaggatcagcgggatcgggacagcatcaagatacgccagtccacctgaggattgctccagatccgctggcgatttgacagcaaccatgttggccagtgaaactaagaggcgatagatgaggaaatgggtgggttgttcaccgtgcaccagtccgtgggaatctgacttttaatatacgtctagctgctatctgtaacataaactctactaattgtaacgctaaactaaccgaattcgagaaccaaataaaacaaacagaaacatagttaaa

SEQ ID NO: 38595 - protein, 694 aa, DROSOPHILA
MNISCTSAARDHRRQTNLEAKVGSHVVFNCYIDFPFDAPIPYLVHWTKDNKKIFTWYEQETSTSELFNGRLHLVENHPEFGRASVNLTAIRESDQGWYHCQVSFPNRSPSVRNNGTAYHLAVQGGSLIRIPPVNQTIREGQTAFFHCVMKHPENSQASWYKDGVLLQEVQDLVRRFYMGPDGSLSIDPTMMSDLGEYECKVRNSDGELQTAKAFLNIQYKAKVIYAPPEVFLPYGQPAVLDCHFRANPPLKNLRWEKDGLLFDSYNVPGVFYKMNGSLFFAKVDENHAGSYTCTPYNDLGTDGPSPVISVIVLRPPIFSVTPKAIYIQKLGEAAELPCEAIDRDGNNRPSIIWGRKDGQPLPADRFSLSGGNLTITGLVEGDRGIYECSATNEAATITAEAELMIENIAPRAPYNLTANSTETCITIRWQPGYLRPNLEYTVWYRLMEAPEWRTLRVLDKKVMEATVQHLQPGKEYEFMVLSQDKYGDGMFSKQFRFQTLPSPIRADDFDAQQLQHDLGQVTAPAGGLGAPWNLTAISNQQGWLLHWEHPVQGLEGLRLYAVRWWKEPEHFLIGHAETFDNYYQLRHLKEDTLFKVQVLAVGTETQQSVPSHELLIDVPSQRKVRALIIGSSVGVIFLLCALCAFLYVKRSCLRHLFAKDSSASEDEDTAESGDCDSDEQDQRDRDSIKIRQST

SEQ ID NO: 38596 - DNA, 2744 bp, DROSOPHILA
attattgtggtggtgtataaaagtaaccctagttcagaccatttaattttatgcccgtgacttgtttacttcctcctagttacttgttctttgcgactcacggaggttaattagactatttgtttttttccaagatcgcgattaaggcacacatatcggcgaccttctgctgccaaaccccttggcttgtcaaaaatcccacatgcttggcgactaaaatatttcacaacattgttcaagtgccagattcttagcctcttttggcgcaatgtaaattaagaacacagccacagaccatttatggtccggcctggccccaagacaaagcccaagcaggcagagcgaagccagcgcaaacaggtttgcaattaaacaactaaaaaaattattaagtaaaatgagtctgaaattaattatttatgcgcttaagataacacagaggcagacagcgaagcccccagtttagtggggatccaaagcaaagtgggcgtctctgtgttttctggccgcacttccaagaacccagaaccaagcaccataactctggccgcgaaaggctcgctgaaaaacacccaaagttcacagttcagtgatcactccccccggaaagtaacgcgtgccaactgggcagctgcaggcgctgttttccactcaaaggcacctaaaaactgaaaatgcctaaaaacagataccctgatcgtcatacacgagttcacagctccaccggcccgcataaattagagccgcgatcaggagcaataaggcgcatactacaatatatactcgcagtgggcaaactaggcagtgcgaccctgaacaagtctgctgcatttatttgacttattaccgcctgctgtggaccatgacatttgttgaaatttacctaaaatgcctgtaaactacgcgaacaaccaaccaactccactctagcttgaaatgagctatacttgcacaacaaatttccaataacaattaatcatatggagaatagtaatcaagatcaagcaattgttatgtcgtccgtgtagtagagccaaattgaaggcggtggtagctccacgttgctatcctcgtcatcagtcagtccattctcgtccagggtgccattcaagttcagaatactgcagcttttgccctggtaaatattatattgcaatagtgttatattctttctatatttcattttcaaaggacttaccccatttgagaactttcgccactcgtagctgcctgcatggtgattgtatcgctgcttgtacttttgttgaatgtcgtagatgctgtcctcgttgcaaacggtcatgtattgtgtctgcgccgttagcgtattaacaattcgtataagccgtgcacgctttgtgaccgtgccgatgtgatagaatggatcctggctccacatttcccccggtgttttgcaaaactccgatatggccacttccaatatgggagggaataggacacgaggtcgtcctgtgctcggagagatctccgtgcgaggctctccgttctcatggaagaaatgtgttaggtccttgccagcatgggccaccaaatagtccagtgtctgtgggaattattaaatttaataatgctttttcaatcgaactcggtaacccacgcgattccagttatcaaagcgatccttcagcatgggcgtcagatcgtagatatttctgtgtatgatcacccagcagtcgtccttcttgttgtgcgagaccacctcgtccttgagatagtatcgcattttgttaatcggccgctccatttcacagatttacatagcaaccaaaatgaatgaagtgtaatttgattttctcgacaaaactgtcgcctcttgactcggcccattaattctgagttttccagcggtgccgactgctcatcgtcattttcagaggtctccgggagcggatcttatcgccagactggcatctatgcgcctccggttggcggaccaattaattccagctgccaccgagatgcccaagttcccattcctggccggcttttcgggatgccattgcataattagccgccaattgtcaagtcgtcggcagtcgacggtctaagcccatcaatcgtttgccataaatagaaaaaaattagattaatgactgatggcatttttggtctaacctccgaggttacacacactcgaaagacattccaattgatgggaactctgtcagtggttattgagagagcactgcactttgagatatttgcctccagttattccgagatcattcagcttttttttcaagtgaatgggaaacattcttaagagcttgattaatttgggaaaatttttcaatctgtttagcttgacagttattgaaagcgcttttcaatgcaacttaaattaatttatttggcatttgaaaaggaacaaagttcttctagcagcagctgtttggaaaatggtttgtctgagcgacattcaaaactattccaataaaacccttttcattccgccgaatggtttcagtttcctttccgtttgagcatgaactttgaacccgtcgaccggactccaggttaccaaaaggtaactaatcgacacacgtgataaaatcaacttccgcaggattacaaagtcgccgacctggaggtcattcagttagtccaaggcgcacagctcgcagctgccgctttgcgtcgcgcatgcgcagacacagaattcgagggatttgccatggcaactcccagttggcccaaacacacacacacagaaaatgctggca

SEQ ID NO: 38597 - DNA, 627 bp, DROSOPHILA
atgcgatactatctcaaggacgaggtggtctcgcacaacaagaaggacgactgctgggtgatcatacacagaaatatctacgatctgacgcccatgctgaaggatcgctttgataactggaatcgcacactggactatttggtggcccatgctggcaaggacctaacacatttcttccatgagaacggagagcctcgcacggagatctctccgagcacaggacgacctcgtgtcctattccctcccatattggaagtggccatatcggagttttgcaaaacaccgggggaaatgtggagccaggatccattctatcacatcggcacggtcacaaagcgtgcacggcttatacgaattgttaatacgctaacggcgcagacacaatacatgaccgtttgcaacgaggacagcatctacgacattcaacaaaagtacaagcagcgatacaatcaccatgcaggcagctacgagtggcgaaagttctcaaatgggggcaaaagctgcagtattctgaacttgaatggcaccctggacgagaatggactgactgatgacgaggatagcaacgtggagctaccaccgccttcaatttggctctactacacggacgacataacaattgcttga

SEQ ID NO: 38598 - protein, 208 aa, DROSOPHILA
MRYYLKDEVVSHNKKDDCWVIIHRNIYDLTPMLKDRFDNWNRTLDYLVAHAGKDLTHFFHENGEPRTEISPSTGRPRVLFPPILEVAISEFCKTPGEMWSQDPFYHIGTVTKRARLIRIVNTLTAQTQYMTVCNEDSIYDIQQKYKQRYNHHAGSYEWRKFSNGGKSCSILNLNGTLDENGLTDDEDSNVELPPPSIWLYYTDDITIA

SEQ ID NO: 38599 - DNA, 2204 bp, DROSOPHILA
gcgcggcctgtttataaatcgatctactgctcctggacgagaaccccatgccattccgaaagtatctcggattacataccgcgcacttatagatacatatacacagtaggcagtcgccgacgcgctcccttaaaatgtttataaattattttttcctttgatgggcttgccaaaagattttattatgaaaagtaaatcaactcggaacgcctggaaattcgagagtttttcctaggggtaacggaaactttgcaggaattctctcctcttttttatgaaaatgtacgtcttggcattttgtttgattaattagttgaattgtgatgggcattcaacaaaacatttttatggcaggtaaaaacgatcagttttccgtgcatggggttgatttgaattccctaatttttgccgcttccccattaaattcccagatatttcacgcgcagcacttcattaataattttccgatatacatttgtaattaaaatagtttcttttcgtagtgtcttatcgaaggatgatcttttattcatatgtatatttgtcttacctcctcgtaggtattttccctggaactggactgagtgctgctggcaatcgaacgccgaaacatttcgctgtggaaacaagacaatcaaccattgaaacattttccgcatttataatttggtgtaacaaatgatatgtaaattatcaacaagtttacttgcaggatgcatcagatgatattgttgatcaaaagatacaaacattgttctacgaagatatacctttcacttgccagtggctaacacaaattaaacaatccgttctgccataatttacactgacaaattccatttattaacagacacacaattagccaaactctatagatggaacctaacacacacagagcctaccctagcccctcgaagacccacgccatggtataatttatgaacactacaatcggatggaacttttcggaactctcatacccgataaactagttcgaatatcaaaatccaagagctgctaaagtgtcataccttagtcgctggcaagtggtgggcgtgttgacagtgagattggtccttgagtcgctcagatgggcgatggagttgctcaatgtgtggttgctgttgctattgctggatttgccattgttgagcttggtcgtgtgaccagtggcaggctttactgtggccggcggggcgggcatcttgagacgacttcgatctgtccaaatatggttgcgctcattaaccaacaaagcttcagcaaagccgattgttagtgttatttaaactcgtcatttattttctgtttgtttgtttgattgttactttgttagacttgctgcccacacgggatcttggggatcttgggatcacggtatctcggcacacgagcgacttgcccaatttggagtctcgcaatatcgcatacccgcgcctcgtatcttatttatgtgcattaactaaatgtcgctaatttttggtttatttatttgcagcgctagactgtgccttttttggccaaggaatggctgtccagcgctccaacataaatcagccaaacaattcgatgcccgagcgcacgacccgaactctaattaactcgttggcgaagttgttgcgttgccaaaaaaagcagagtgtctgccaccacttgggggatgccttttaaggtgtcacaccgcgatcgttttcaattatgacgcaacacacgcgaaaatctcaagatcaccatgcttttcagccgccgacaggtgcttacttcgacttcaactgatttcgacttcaagttggacttcttgctgcgccgattactgaaacaaaactgatttatgcctgtcacaaggcgaacggtgcagccaattgcagtcggagttgctgccaagtcggttccagtcccgatcccctcctgcttgctcctctgtgccccaccccgccaccgactcctcctgcacgacgagattccctcgtcggagtggacgacaattagttctacatgtcgtcacacgtcgcaagctgcaggaagccacaagtacactgggagaaaacagcacaaaatttagctaataaataaataaatcgatgtcttaatattcgattatttattacctatggagttaagctaaattgctactactttcgctcagtgcaaaagaaataatggagacaacaactttcggcttggggactcagtcagtgctttgt

SEQ ID NO: 38600 - DNA, 204 bp, DROSOPHILA
atgcccgccccgccggccacagtaaagcctgccactggtcacacgaccaagctcaacaatggcaaatccagcaatagcaacagcaaccacacattgagcaactccatcgcccatctgagcgactcaaggaccaatctcactgtcaacacgcccaccacttgccagcgactaaggtatgacactttagcagctcttggattttga

SEQ ID NO: 38601 - protein, 67 aa, DROSOPHILA
MPAPPATVKPATGHTTKLNNGKSSNSNSNHTLSNSIAHLSDSRTNLTVNTPTTCQRLRYDTLAALGF

SEQ ID NO: 38602 - DNA, 5225 bp, DROSOPHILA
gctggaggaccaggagctgaccaactagctgccaatgacaatgtataatggcaacatactcacacccacacacacaaaggcaacaggctacagtgtccttctgaattattgagcgtgcaacttgttgaaaatccaaggataccgtcgaaaggggaagctgcgggcaaaggcaacttcagtcttagttgtgtgtgtgtgggtgttcaccttaatttactcatttcaacaaaatgttaaaaatttaccaagttatttgcccacgggaatgcctgcctagcggaagggtagccggaaaagcgctgaaaacaattaaaaagtttaaggcggttcccaagaatgcgccaagaaatgtggatggatttatggcgtcctaatgggttgaggatggcattcccaggaggagagaggtgctggcgagtggtgaagaatatttcaaagggtgtccttggaaatcaataatgctttgccatttattttgtagcactttcaatttcctttcatcaaacagtgaaattcttcgttttatacaagcggaaaacgaaaagtagctgagtgtaaacgtctaaagttttatattgcattatctcaatttaatagaatttcaagagcaatacatcttcaaggctctatttttacttgattatttagctcccacaagtggagatccgttcacttcattggccatttgcaacatcagctcacagctggctggaatggcagtcacgtcgatattgtatgaccaatttgttcgtgaccagcactttcatgggcagttagccacgtccactggtggagcataaagctgccgcagtttgctcgtcaaatgcgcggagatgtggcaagtagtcgcagagaatgggtcagtgaagttggcagctgaacaatgtacagtggattttattcttaaactaaaaatatgcaaatttacttcttccaatttattaattttaacataaatcccgttttatatcttctgcttgcagaaaatgtctttatagagatggccaaactttcacgacgtgcctcgtcgtctgcagcaacgccctccacagcaagaacagcaactactgcaacaactggcgtcacatcagtcaatccaagtcatgccacgcagcaagcagacgagcagcaggatcataaggaacagcaacggatcacccgtcgtgccgcaagcaatagcaatcgagtccaagcagcggctctcatcgacacgagtcctgatgtcctgcatgagaatccaccgccatcaccgacaccggcggcgctttcgaatagcagcaacagcagtagcagtaacagcagctatcagagcaacactgccacgcccacagcacccgcccatgcccatgttacggccacgccctatatgccactactgccgccgggcgagcggaatctgacggaggcggaaaacgcagcagagcgggccaggatacgggaggagttctttgccacgtacgacgtgatgacgggcgtcaggatcgccgccactttgggcggcttcttcggtctgatggttttcttaatcgtttggaagagtcgcagcagcagcaacgagacgatgaaggtgctcaaggatcccaaaatggctgccgttgcggcggtgtgcatgcaggaggaagaggagcgcgaaatccacgacgccatcgtggccacgggcatgtccatttatccggatgagtatgatgcaatggtctaccgccggcagcggatgctctcactcggcaatgtcagcgctccgccgctgttgaatcgtggatatcgatgtggttcgatgggtaagtcctttaaaatgaagaacaatttccagaaagtggtttcaacgaagtgaaatgcctccatttcaggtggtgttggtgtgggtgttccagtgggctatagctacctgctggagccaccgcgtcgcttctcctattcctcaatgtccggcgcaggaggtcatgtgggtcgtcgcaagagtgggtcggagtcgtcgcgcatcttcagcaactatccaatgggcggcagctttggcacggacgactatttcgtggagacggaggacgaactggatgcggaggagtacatgcagccaggtgccacggatgagccagatcaccagcaccagagaacggattccacgcgcagcaagccgggatttctgtccgtaccgatggcggtgagtgaaagtggagcggttcaacctctccggaatgaaaccacactgaaatgaatccgtcttataacccaacagggtcaggactcgcggcgaagcagtgccatgacctgctgcagtaccgatagctcctacctggagcggcgcacgtctgcctacatgggtggttgcatgggcaacctgccgcccacgctgcaacggaagctatcgactgcctcgcgtacatcgagcatcgagaattgggactactactacccggacattcaggtgatacagccaacgcccaaggcttcgccatgtccctcagagcgcagtgtccacgaaggatcgggatcgggttcagtgagcggatcgaggacctccaatctcagtgcatccaatgtcaagcggaagcacagcatcgtgtcctatgatccacacagtgctcaggctggccgtaagcagcagattcactcgatcagcgcggacactgtggacgtgtatccgtacaaccaggagagcaccgtcgacctggccttggctctgccacttcccaagcccgtgcagtctgccccgcccaccagtgctcaccaggcgttccacttctgcgactcgccatccgaggagctgcgtctgggtgtccggcggaagctcacgctggtggagctgcagcgcaacgagagcaacaacaacagctttccgtacacggccaatgcagcggttccagccggagcggcagtcaccgcagctagctccagtagtatcagcgtggacagcactccggtaagtctggagcgtttaaatggcgcggggagctgcggaagcgccagcctggccaccatttccgtgtccaacaaactgccggcgctgggcaataacaatccggagaagcgagcgccgctggcctcactaagttccttcaagatctcctcgctggagtgtcccgactccgagctgcgctctctggacgaggactcggtctttgggctggagagtccggcggacacggacgatgacatgcagcagctgagcagcgacagcgaggagcaggaggcagcagcccaggctgcccaagcacaggccgcctcaatccaaactggtggggagaccaagcccaatcccatgctgcatgccgtgccagtaaaacgaatgagcctcagtgcggtgccctctgcgggattgacgagcgccgccttgactagtggtggtggaggagcacgtccccggagaccactgctccagcgacatcgcaccatcagcgtaacttccagtgaccgagtggctctcatcaatcagccgctgcaacagttccacatgggcttgcccatacagtcggaggcgcctccgctggaaacccactttggagcagtggtgagccagagtcccccccggcggggacctctgctgcagcagtacagcgatccacagacgacgacgacgaccacaacgaccaccaccacggaggaggacacctgctccaccctgaatactgagctggggttggtggaggcgtctggagtaactctcggcggtgcggagtctgccacacacacccagtacagcagcctcaacacggtaatcagcatgggtcggtccacgcccagtcccgttcccgtttctgttcctggtctggccgcccggatggacaataatgccaccactcaagtcacacagcagccagctcaactgccaacgaacgctatccggctggtgcacgatccctgcccctcgtccgtgtccgactcggtgatagccacccggcaacagagcatctgtgtgcccgcctcccttaaggatctgatcctgcgcaagggatcgggaccgggtcccgctaatgttcccaccagcggtatcagtcggagtgccgccaatctgagctgcgaagctggagtcactgcatcaaccacaacgactgcaacgcccgccgttatgctagagcttcccctgatccggctgcccaacgaggacaacgaggagcagcaggagcatcgggcccacttgatacgggacggcggtggcttggacggcgaaaagcgcgatcccagcctgcccggcacttccagaaaatggtccaaggagacactcttctagcccagctggtttccactgctccaacaaaggcagttccctgggccgggccactaataaagagcttagcaactgactttgtacgcatggtgatgggagctacggtgaaaacttctctaagaagaacatggactcattccttcttcaagtactgcgaaagagtttagagaatgttacttttgaagttttcactgtaactcagtttgtcgcctggtctagcaaccaatttcctgggttgctcgagatccggaacccggaactatgaaacgcgagtattgatgagtatttaggtataggtaaggaggattagattaagcgcatttagtcaaaacataagatagttcggtctggcacacggagtcacagtacagtagtacatgcctactaatcatgcatagaccgatcgggaaggtggaagtgggtaatgaacaacaacgtattcgtacttagagactgttgtctattattgttaatagaactctaaaagttaagtagtgatactcggatttatttttcacactttatctgtaaaacaaaagtgcaggcgtacgaatatatatatttgtatgcggcgccatactgaagagaaagtttatacatatatttctatagatatatcgccagtcgccaccatatatcggtctttctatctctatctatagctctccctcttacggaatgaaaactcttctagtgtcttaaccagcagccaaatacttaaagtattgtaatttagaaattttatagagtgcaccgcaacttcgcatcgaatccagcgatgtcgtgttatccttgcaacaaaagtactctgaccgaagaccttaaggacctcgaggggtccgcccgaagatgcctaaatgtccttaacgcgtagctagacaaaaggtgacgactttccaggaacattttcgcatttccccgctcctgcctgttcgaaaatgaattgttgttggatatataatagagttgttgtcagaatataaagttagaaagcgaatataga

SEQ ID NO: 38603 - DNA, 3081 bp, DROSOPHILA
atggccaaactttcacgacgtgcctcgtcgtctgcagcaacgccctccacagcaagaacagcaactactgcaacaactggcgtcacatcagtcaatccaagtcatgccacgcagcaagcagacgagcagcaggatcataaggaacagcaacggatcacccgtcgtgccgcaagcaatagcaatcgagtccaagcagcggctctcatcgacacgagtcctgatgtcctgcatgagaatccaccgccatcaccgacaccggcggcgctttcgaatagcagcaacagcagtagcagtaacagcagctatcagagcaacactgccacgcccacagcacccgcccatgcccatgttacggccacgccctatatgccactactgccgccgggcgagcggaatctgacggaggcggaaaacgcagcagagcgggccaggatacgggaggagttctttgccacgtacgacgtgatgacgggcgtcaggatcgccgccactttgggcggcttcttcggtctgatggttttcttaatcgtttggaagagtcgcagcagcagcaacgagacgatgaaggtgctcaaggatcccaaaatggctgccgttgcggcggtgtgcatgcaggaggaagaggagcgcgaaatccacgacgccatcgtggccacgggcatgtccatttatccggatgagtatgatgcaatggtctaccgccggcagcggatgctctcactcggcaatgtcagcgctccgccgctgttgaatcgtggatatcgatgtggttcgatgggtggtgttggtgtgggtgttccagtgggctatagctacctgctggagccaccgcgtcgcttctcctattcctcaatgtccggcgcaggaggtcatgtgggtcgtcgcaagagtgggtcggagtcgtcgcgcatcttcagcaactatccaatgggcggcagctttggcacggacgactatttcgtggagacggaggacgaactggatgcggaggagtacatgcagccaggtgccacggatgagccagatcaccagcaccagagaacggattccacgcgcagcaagccgggatttctgtccgtaccgatggcgggtcaggactcgcggcgaagcagtgccatgacctgctgcagtaccgatagctcctacctggagcggcgcacgtctgcctacatgggtggttgcatgggcaacctgccgcccacgctgcaacggaagctatcgactgcctcgcgtacatcgagcatcgagaattgggactactactacccggacattcaggtgatacagccaacgcccaaggcttcgccatgtccctcagagcgcagtgtccacgaaggatcgggatcgggttcagtgagcggatcgaggacctccaatctcagtgcatccaatgtcaagcggaagcacagcatcgtgtcctatgatccacacagtgctcaggctggccgtaagcagcagattcactcgatcagcgcggacactgtggacgtgtatccgtacaaccaggagagcaccgtcgacctggccttggctctgccacttcccaagcccgtgcagtctgccccgcccaccagtgctcaccaggcgttccacttctgcgactcgccatccgaggagctgcgtctgggtgtccggcggaagctcacgctggtggagctgcagcgcaacgagagcaacaacaacagctttccgtacacggccaatgcagcggttccagccggagcggcagtcaccgcagctagctccagtagtatcagcgtggacagcactccggtaagtctggagcgtttaaatggcgcggggagctgcggaagcgccagcctggccaccatttccgtgtccaacaaactgccggcgctgggcaataacaatccggagaagcgagcgccgctggcctcactaagttccttcaagatctcctcgctggagtgtcccgactccgagctgcgctctctggacgaggactcggtctttgggctggagagtccggcggacacggacgatgacatgcagcagctgagcagcgacagcgaggagcaggaggcagcagcccaggctgcccaagcacaggccgcctcaatccaaactggtggggagaccaagcccaatcccatgctgcatgccgtgccagtaaaacgaatgagcctcagtgcggtgccctctgcgggattgacgagcgccgccttgactagtggtggtggaggagcacgtccccggagaccactgctccagcgacatcgcaccatcagcgtaacttccagtgaccgagtggctctcatcaatcagccgctgcaacagttccacatgggcttgcccatacagtcggaggcgcctccgctggaaacccactttggagcagtggtgagccagagtcccccccggcggggacctctgctgcagcagtacagcgatccacagacgacgacgacgaccacaacgaccaccaccacggaggaggacacctgctccaccctgaatactgagctggggttggtggaggcgtctggagtaactctcggcggtgcggagtctgccacacacacccagtacagcagcctcaacacggtaatcagcatgggtcggtccacgcccagtcccgttcccgtttctgttcctggtctggccgcccggatggacaataatgccaccactcaagtcacacagcagccagctcaactgccaacgaacgctatccggctggtgcacgatccctgcccctcgtccgtgtccgactcggtgatagccacccggcaacagagcatctgtgtgcccgcctcccttaaggatctgatcctgcgcaagggatcgggaccgggtcccgctaatgttcccaccagcggtatcagtcggagtgccgccaatctgagctgcgaagctggagtcactgcatcaaccacaacgactgcaacgcccgccgttatgctagagcttcccctgatccggctgcccaacgaggacaacgaggagcagcaggagcatcgggcccacttgatacgggacggcggtggcttggacggcgaaaagcgcgatcccagcctgcccggcacttccagaaaatggtccaaggagacactcttctag

SEQ ID NO: 38604 - protein, 1026 aa, DROSOPHILA
MAKLSRRASSSAATPSTARTATTATTGVTSVNPSHATQQADEQQDHKEQQRITRRAASNSNRVQAAALIDTSPDVLHENPPPSPTPAALSNSSNSSSSNSSYQSNTATPTAPAHAHVTATPYMPLLPPGERNLTEAENAAERARIREEFFATYDVMTGVRIAATLGGFFGLMVFLIVWKSRSSSNETMKVLKDPKMAAVAAVCMQEEEEREIHDAIVATGMSIYPDEYDAMVYRRQRMLSLGNVSAPPLLNRGYRCGSMGGVGVGVPVGYSYLLEPPRRFSYSSMSGAGGHVGRRKSGSESSRIFSNYPMGGSFGTDDYFVETEDELDAEEYMQPGATDEPDHQHQRTDSTRSKPGFLSVPMAGQDSRRSSAMTCCSTDSSYLERRTSAYMGGCMGNLPPTLQRKLSTASRTSSIENWDYYYPDIQVIQPTPKASPCPSERSVHEGSGSGSVSGSRTSNLSASNVKRKHSIVSYDPHSAQAGRKQQIHSISADTVDVYPYNQESTVDLALALPLPKPVQSAPPTSAHQAFHFCDSPSEELRLGVRRKLTLVELQRNESNNNSFPYTANAAVPAGAAVTAASSSSISVDSTPVSLERLNGAGSCGSASLATISVSNKLPALGNNNPEKRAPLASLSSFKISSLECPDSELRSLDEDSVFGLESPADTDDDMQQLSSDSEEQEAAAQAAQAQAASIQTGGETKPNPMLHAVPVKRMSLSAVPSAGLTSAALTSGGGGARPRRPLLQRHRTISVTSSDRVALINQPLQQFHMGLPIQSEAPPLETHFGAVVSQSPPRRGPLLQQYSDPQTTTTTTTTTTTEEDTCSTLNTELGLVEASGVTLGGAESATHTQYSSLNTVISMGRSTPSPVPVSVPGLAARMDNNATTQVTQQPAQLPTNAIRLVHDPCPSSVSDSVIATRQQSICVPASLKDLILRKGSGPGPANVPTSGISRSAANLSCEAGVTASTTTTATPAVMLELPLIRLPNEDNEEQQEHRAHLIRDGGGLDGEKRDPSLPGTSRKWSKETLF

SEQ ID NO: 38605 - DNA, 2495 bp, DROSOPHILA
actgtcgaggtcgtcacatttgacccgcaatgcagccggggcttaatctgccccacagtcgcattcaaatgtcaattagtgttgttgctgtggtttcaatttctccacgccgctcttttatctttccggccccttcccattcacaatcccaatccaattgcaagcccccgggaagccatcgagctattgaaggtcacggaatgccaaagatgggccgcatccggatctggttccttggccagcgttccataaatctgggccagcaactcgccaaggagtaagaaagaataaaacctataaaatctgtttagctatctgtttataaaactcgtactcataatttgtgtgtaaaattgatttattcaaaactttattttagctggttggttagttttgaaaaattcactttcacctaaatttaaacacattatgtaactagaaatttcagtcgcactcaagtttgcggtagcaacaatctggataattggcatccccattcaaataatccttaaagtgacagtgctctggtggttcctttttatcacacctttgtagaaaggacaacaaattaaaaaaattaaaaaatttttttttgtgatttctccactgttttagatttttcggtctaaatatgcgttattacttacgtaaacagcattccatatccatcgccaatgcataaaattgtcgtgcagggcaggaattttgggcgaaatttctgacccattttaagcagtatccgcgttgagtcaatatcgagaacacagcaattgggataggctgaaatgaaatttatagattcaaatctgaaaattaatatatttaagtcacctgaatccccgtagttgtagagggaaaaattagcgaaagctgggaaaaccaccaagctccataaaaagccataaataataaaagtctctggaacaaacgacattttgcacagatttcgatataaatataaactattgtacatccaattgacaacgaacgatcggcctgcctagttgcaaagtagggtcctgctgcagcagtcaggatagggaagatccggattgatgtagtcaccgtagcggcaaggaggcgacaggatgctaactccgcagctgccaaaggacaattgggctgttagcatttcagttcatcgaaaagtaagcaaaccaacctgtggtaaacgacacgtccattgaggccacacaagattttgcggcactcgtgcgtgggatccttgatgctaacccccggattgaggacgagtcccgggttgatggtgcacttaccaggatggtctgcggatggaaattgaagctttaagtggagctgtcagctgcggctgtctgcactcactcgggtcgtagtgaatgtcctcccattccgccgactggaccgcggcgaaaaggatccataggagcatagccaaaaggacactagtccgcgcggccatcgcctcttcagaaatgtgtggcgaagtttataaagctaaattgttgtatttaatatattcatgtaattaatctacgacatagcacgttataatttactttaaactttgacgtactttgcaaatattccttaccataatcggcaaagatttcgtaattgatgttggtagccaaaacgccatgaatcattataattactgccaggatagtgaaaattctgcactgcggcatcctgatcctgatcctgtttgtgtgtgtgtgtgtgtgtgcttgtcgttgttggcttttgcaggaaatttgactaaaagattcgattttcccagctgtctggccgtaaagtgcctgcccagcctcgctgtcgatttcatatgcgcattttaattaaaatgcagccagacagacaggcaggcggcgtggatatgctgggtatatgctgatgaagttatcgaatatgttaatgcacttatttgcagctgcattcgccttgtgtgtcatctgttgatgtagttgcataattcgattaactgacgctgtctccagagcttcaagtcctatgcccttcgacccttgcccttcttcggtagaatgtaaatgttgatttattgccctgtctgtcctttgtcttccgtaaattgtgattgttggtgtgccaatagtcgggttgacccaagccaaatccattcgaatccacaaatttgtggaccaactaattgatgcagctgtgtactcaatcacatatctttggtctgctcttgtgtgttgtgtgtgttgttttgattacctttcctccggctggctggccaattagcaagcgacctccattgttcgccagttgaaattaattgaatcgagtggcctcagctgggcctgaaatatgcacttcaatgaactcatctcgaccccagtggttggctaattaaccgacccactcgaagctcaaataagcacagctgaatttaccgccgagcagtggatggcctaagccaagaaaacgagtgtattagagtagcactttaaaattgtgatcgtattaaaggagtttagcaaaagaattac

SEQ ID NO: 38606 - DNA, 378 bp, DROSOPHILA
attaaatacaacaatttagctttataaacttcgccacacatttctgaagaggcgatggccgcgcggactagtgtccttttggctatgctcctatggatccttttcgccgcggtccagtcggcggaatgggaggacattcactacgacccgaaccatcctggtaagtgcaccatcaacccgggactcgtcctcaatccgggggttagcatcaaggatcccacgcacgagtgccgcaaaatcttgtgtggcctcaatggacgtgtcgtttaccacagctgcggagttagcatcctgtcgcctccttgccgctacggtgactacatcaatccggatcttccctatcctgactgctgcagcaggaccctactttgcaactag

SEQ ID NO: 38607 - protein, 97 aa, DROSOPHILA
MLLWILFAAVQSAEWEDIHYDPNHPGKCTINPGLVLNPGVSIKDPTHECRKILCGLNGRVVYHSCGVSILSPPCRYGDYINPDLPYPDCCSRTLLCN

SEQ ID NO: 38608 - DNA, 2357 bp, DROSOPHILA
tcaacataatacccgtcgaggtgatgctgaaaatatttgcctatttggacgacatgtcgctgtggatggctagtgaagtttgcaagcaatggcacgacattgtcgggaaaaacacggcccagagcatgtggaaggcgtatatcaagcagcgctggccgctgttcgacagtttggcagacaatccaaactggtatcggctgtacggggcactgatgtcttcctgcttctgtcgcacttgcctgattgagatgggcggtcggggtcaggatgcacaggaggcagatccacagctgggcgatcgggagccgggcaatgtaatgcgcaacaactttctgcgcggtgaagccaatctgctgaacagctacgaatctgagggcatatcggccataccgttggatcggcaaaacaactactggcaggcgacaattctggggccaccgggcagtccctacgaaggcggcaagttcttcctgttcatatacttcccggagcgatatccgatgacgccgcccacagtacgtttcctcaccaaaatcctgcatccgaatgtttcgcggcatggggacgtgggcatcgacatcttccagcagcacaactggtctctggcgctgaacgtggccaaggtgctgctttctgtgcagagcctgctgaccgatccgtataccgaagtctgcatggagcctgaacttggatacatctatgagcacgagcgcgaaaggttcgagcaactggtgcgcgcgtggacatggaagtacgccatgtacgagctaattgcaccgcgctagaagatcaaaagccctccaaggacaatggactgaaagttggaaactacccctctttacgttgtaactacatatgcctgtgtatttagcttagttgtgccatctggattgtttattttggcctcccctctcacttttcctgcgctccaggttgaaacgtagtcgaaattacttaaccttataataaatgtatgctttaagttacgagcggcgtcgcctcacttcgtccaggacaccttggggatgtcaaagtgctcggtgagcgtgtccaggtgctcgttgaatttctccacgcgctccttgtgggtggtttgtgccttgtccatgattcgcttgttgcgcatcttttcctgctgcttcttactggccagctcggccttggtgagcttccgctcgtagccactggtggcggaggaggatgtggcccccgattccgctatttgctgctccacgaacgccttctgcagctccttctccttgtccttgcccttgtgcttcttctttttcttcttgagatccgaatcgttctttagtttaagcttgcccttggccacgcaggcgtactcgtcggacatgtctttaatgggttttcaatctggaaatggattggtaatgaatccgatctgtttacgtttttcttgtttttgtttacaccaactgcacgttgttatctttacataatttctgatattcgatgttattacctgaccagaaatatatcgatggcattttatcgaatacatttgaaatgttacaaaatacgttatttttgtttgttttttgtggtaagtttccttaatctaacaagaaataacttaaaaacctctaatataaataaaaacagtcctgtaagactaaaaatagttgttcaagacattacatacattcaactgttagaatacaaaatgtaaaacttaaacggtattacccatggtaattgagatgataagcgaataaaatcttaaattaacgaaattagcgagccttgacggctaactccggattttttatcattaccacaatgattgttaaactgactggatctactacctttttggtagcactattcctgtttgaggtttctagaaatgttgccggtgagttttgtttttatatattataaagtaattgacttttgattatttaattaggagctcttgaggcgcttcagacaactaatgacacatttgttaggatcgggaacagttactatctcattgaacgaaaacttcaaaaaaattggtttggtgcctacgaaatttgtcgacaacaacaagcggaattaatctctcttgaaactttcgacgaattgcgcctggtaagcgaataccttttagctaataacattttcgagagatattggacctccggaacggatttgggaaccaagggaaaacatgtttggttttccaatggacagcccttgtcaacggatttgtggtacgggggagaaccaaataacaaaaataatgaggagcattgcgatgaactgggaagtgattttagaccgacaaaatcgccaggaatgaacgatcggaattgcaactttgaaagttcttttatttgcgaagaagt

SEQ ID NO: 38609 - DNA, 357 bp, DROSOPHILA
atgtccgacgagtacgcctgcgtggccaagggcaagcttaaactaaagaacgattcggatctcaagaagaaaaagaagaagcacaagggcaaggacaaggagaaggagctgcagaaggcgttcgtggagcagcaaatagcggaatcgggggccacatcctcctccgccaccagtggctacgagcggaagctcaccaaggccgagctggccagtaagaagcagcaggaaaagatgcgcaacaagcgaatcatggacaaggcacaaaccacccacaaggagcgcgtggagaaattcaacgagcacctggacacgctcaccgagcactttgacatccccaaggtgtcctggacgaagtga

SEQ ID NO: 38610 - protein, 118 aa, DROSOPHILA
MSDEYACVAKGKLKLKNDSDLKKKKKKHKGKDKEKELQKAFVEQQIAESGATSSSATSGYERKLTKAELASKKQQEKMRNKRIMDKAQTTHKERVEKFNEHLDTLTEHFDIPKVSWTK

SEQ ID NO: 38611 - DNA, 4022 bp, DROSOPHILA
atcttttctgctggactacttcggctggtcgtatgtattccgggtgataggactgatgggcatcgcatgggcgctggtgctgcgctactatgcaatggccggcgagcgaaaccgaatcattaatattgccacgccatcccgactgtgcgcgaacaagagtccggcagagacgtcagccgtgccttggttgcgatactttcgtaggctgtccttctgggcctgtgtgctgactcacgcctgcgagatgaactgcttcttcgtgctactctcctggctgcctacatacttccacgacggctttccacacgccaagggttgggtagtgaacatgatcccgtggcttgccctgccaccgtgcacgctattcgccaagtacttgaccaccagattactcgctcgcgaatggcacacgacgacggtgcgcaaggtcatccaaagttgctgctttgccgctcagaatctggccctgtttgtgatgagccgcacctcggacttccatacggcgctcatctgcatgaccattatcattggcggcacgggcttccacaacaacgcggtaacagtgaatccccaagacctggcacctctgcattcgggcagcgtctttggcctgatgaacacagtgggcgcgattcctggctttctcggagtatacttggccggacacattctggagctcacacaaagctggccgatggtgttcagcgccgctgctggcatcaatttggttggctggatcatatttatagtctttggttcggcggaagccatcgtttaacattctcttgcacactttcctcagaaaaactaacctatttatttatgtgtggggtatattggagtggatcgatttatgttcatgctgcttatattatttagtatacacgtttatgattgacgatcatttagttgttcttgtgagatgttaaagccaaaaaatatgtggtatcattgatactttaaaggaccctgtgagttttagccaataaatcgattcattctatatattaatgtatatatttaagagagtagttttaagtagcgaaatcttactgctcctagcgtgataaaatacaaatatttaatcctccaacataccaccaagacagtcatttaacgctatacctagttattttcttctatgctctttgacatgtagggtccgtcaagttggtatcccattttgcgatagtagtttctggtgcccactcccgatatgaccgccagttttgtgctgccgtgctcctctcgagcaattcgctccgcctcctccatcagcaacataccgaagccctggtgctgaaacttggtgggatccctagcattaaccggcacgactgagccatatacgtgcagctccctcacaatggagcattcgcccttcagttccgggcggaaggtatccggtgagcactttcgcagcctaagaaggcctacgagaatgtcctgttcaggatcttcgtatgagaggaacgtttcccagccgccattggccacatagtcccgacgaattagctcaatttcgtaagggcgcaccttgttgtggatttcctgaatgccaacttcgcgggttctaacatcgcggcaagtggttccaagatccttcatgcgggccagcgccagttcacggagatttccgtgttccacgccggaactaaaatgaagaaaaatgtcaggtttatttaatatatatatcggacaagttacctaacaagcggcatgggaatgtcgcgctgtacgcggtacactcgcgtccatggtggtacaagggccaaaatcttcgccactaagtccacaagcatggatggcggatatgacttatatcgcccggttttccataactcgtagagaccagtgccgcgaatgacgagcgtgggatagatctttaggccgtcagagcggaaggcagggttctcaaagtactcgataaactgctcgatgtcgcgttcaaagtcaacattgggaagatcaggcatcatgtgcgtcacgatcttatagccagcatccttgcccagctggaagctctcgcacaccgctcgcaccgtgtgtccgcggttcgtatccctggccacgtcttcgtaaaccgattgcacaccgatttccagccgggtgcaaccatagctaagcatatccgatatgtgccgctttaggcagtaatctggccttgtttctatggtgatgccaatgcactttgtgcgtgacttctccgagtagcgtacggcttccgccacattggcgctgctgtggccggagagggcgtcgtgtaggttgcggataaagtagtcgcggtactcctccggcaggcacatgaacgtaccgcccattacgatgaactccaccttgtccacactgtgtcccagctgcttcagctgttcaacgcggtgtcgggtctgaagaaaaggatcgtaccgcgaccggatggctcgcatcgaggtcggctcgtagcctgtgtacgactgtgtcgagtactcaaagtcgctgtccggtccgccgggacaatagacgcatatattgccggtcatattgatgtgcggacaacgatgcggcttgcacatgacggcgaccacggcgatctggattgaaataattgaaatgaatagtacgccttgtgtaagcaagtgcgacttacgccacttgctgtgcgaatgggctttgccctcagctttggaagcagaatttttttggcgtcctgcggcacggcagcaattatgtcgaccaggcgcggcgaactgtccagtccatatttggaggccaccaatgatttcatccgattaaggtttacatcctttttggcttcgtgcgccttcagcagctcctgaatgatctccccgatgacgagcacctgtcgttcctggcggctcaatcccacgcctgaaataattggcggggtaaacggacgtttaaagaattactttcgtagcgacgttacctacccaacttcttttttgccttcattttgctgatgaatatcacataaactgcacgtgtgaagttagcagcacttgttttgattcggttatcgaccgaccaatagtccgataaccacaacactgtttgacaggttttgaagctaacaccacttggtaacacttttagatggtctatcgtttgtcgattatttatttgttttagcaccagtttctcgggagttctgtaaaatgactagctgcgtgccagcgcatcagcaaaaggaccaggagcagttgctaaaggaactggccagcagtggcgacgagatggacgacccggacgatccggaccaggaacaccaccagctggtagagccgaccttctctttttcggtatgtatacaataggctagtttcttgcgggccgattaataaatagcctttccaatttgcagaatagtaacacctgctgggtgtgcaacggctactatgggcccaacttcggggagccgttgtgcggcgcctgccacgccttcctgtacaacgcacagcgggcggaggagctgctcacggagctttccgatgacgaggattctgggaacgacgagccgccgttcaaggacaagcaggaagacgaggagaccgaaaacgacgtagacatcatgggctttgaggatctggaggacccccaaccggcagccgtgccacaacatccaaatccgcagccaccaatggagccacaggatcaacagccagcccaaccagttatagatctgccacagccggtgccggaggctgcggcaccacgacgcgagtctccggagcgcgactttgagcacgagagagccattaatcccttcctgctgcccattaagcgtccgcgggccacggctcccttggctctgccccattacatgcatgagctggccgatggaagggcgcgagtgcatgaatacaacgccgccagcggaagcggagcaagtggcagcagcagaaacattgtcaacataatacccgtcgaggtgatgctgaaaatatttgcctatttggacgacatgtcgctgtggatggctagtgaagtttgcaagcaatggcacgacattgtcgggaaaa

SEQ ID NO: 38612 - DNA, 1851 bp, DROSOPHILA
cgataaccgaatcaaaacaagtgctgctaacttcacacgtgcagtttatgtgatattcatcagcaaaatgaaggcaaaaaagaagttgggcgtgggattgagccgccaggaacgacaggtgctcgtcatcggggagatcattcaggagctgctgaaggcgcacgaagccaaaaaggatgtaaaccttaatcggatgaaatcattggtggcctccaaatatggactggacagttcgccgcgcctggtcgacataattgctgccgtgccgcaggacgccaaaaaaattctgcttccaaagctgagggcaaagcccattcgcacagcaagtggcatcgccgtggtcgccgtcatgtgcaagccgcatcgttgtccgcacatcaatatgaccggcaatatatgcgtctattgtcccggcggaccggacagcgactttgagtactcgacacagtcgtacacaggctacgagccgacctcgatgcgagccatccggtcgcggtacgatccttttcttcagacccgacaccgcgttgaacagctgaagcagctgggacacagtgtggacaaggtggagttcatcgtaatgggcggtacgttcatgtgcctgccggaggagtaccgcgactactttatccgcaacctacacgacgccctctccggccacagcagcgccaatgtggcggaagccgtacgctactcggagaagtcacgcacaaagtgcattggcatcaccatagaaacaaggccagattactgcctaaagcggcacatatcggatatgcttagctatggttgcacccggctggaaatcggtgtgcaatcggtttacgaagacgtggccagggatacgaaccgcggacacacggtgcgagcggtgtgcgagagcttccagctgggcaaggatgctggctataagatcgtgacgcacatgatgcctgatcttcccaatgttgactttgaacgcgacatcgagcagtttatcgagtactttgagaaccctgccttccgctctgacggcctaaagatctatcccacgctcgtcattcgcggcactggtctctacgagttatggaaaaccgggcgatataagtcatatccgccatccatgcttgtggacttagtggcgaagattttggcccttgtaccaccatggacgcgagtgtaccgcgtacagcgcgacattcccatgccgcttgttagttccggcgtggaacacggaaatctccgtgaactggcgctggcccgcatgaaggatcttggaaccacttgccgcgatgttagaacccgcgaagttggcattcaggaaatccacaacaaggtgcgcccttacgaaattgagctaattcgtcgggactatgtggccaatggcggctgggaaacgttcctctcatacgaagatcctgaacaggacattctcgtaggccttcttaggctgcgaaagtgctcaccggataccttccgcccggaactgaagggcgaatgctccattgtgagggagctgcacgtatatggctcagtcgtgccggttaatgctagggatcccaccaagtttcagcaccagggcttcggtatgttgctgatggaggaggcggagcgaattgctcgagaggagcacggcagcacaaaactggcggtcatatcgggagtgggcaccagaaactactatcgcaaaatgggataccaacttgacggaccctacatgtcaaagagcatagaagaaaataactaggtatagcgttaaatgactgtcttggtggtatgttggaggattaaatatttgtattttatcacgctaggagcagtaagatttcgctacttaaaactactctcttaaatatatacattaatatatag

SEQ ID NO: 38613 - protein, 552 aa, DROSOPHILA
MKAKKKLGVGLSRQERQVLVIGEIIQELLKAHEAKKDVNLNRMKSLVASKYGLDSSPRLVDIIAAVPQDAKKILLPKLRAKPIRTASGIAVVAVMCKPHRCPHINMTGNICVYCPGGPDSDFEYSTQSYTGYEPTSMRAIRSRYDPFLQTRHRVEQLKQLGHSVDKVEFIVMGGTFMCLPEEYRDYFIRNLHDALSGHSSANVAEAVRYSEKSRTKCIGITIETRPDYCLKRHISDMLSYGCTRLEIGVQSVYEDVARDTNRGHTVRAVCESFQLGKDAGYKIVTHMMPDLPNVDFERDIEQFIEYFENPAFRSDGLKIYPTLVIRGTGLYELWKTGRYKSYPPSMLVDLVAKILALVPPWTRVYRVQRDIPMPLVSSGVEHGNLRELALARMKDLGTTCRDVRTREVGIQEIHNKVRPYEIELIRRDYVANGGWETFLSYEDPEQDILVGLLRLRKCSPDTFRPELKGECSIVRELHVYGSVVPVNARDPTKFQHQGFGMLLMEEAERIAREEHGSTKLAVISGVGTRNYYRKMGYQLDGPYMSKSIEENN

SEQ ID NO: 38614 - DNA, 2474 bp, DROSOPHILA
atgcggaacgcccagttgatgccaggtactaatcccagttctcgctttgccgtcacgtttcagacacggagaggatatacgaggaggtcacccggcaaatagccgcctcctttggccgcccgtatccggaggaagtgcgtttccgggtaatgggcaccacggaccagcgctcggcagagatagccatcaccgagtgccagctgcccatcacaaccggagactatctcaagcggtactcgcaaatgtgccacgagcgattccacaacgtacccctgctggaaggttagcaccacgaccagaaaactaatcggcatttctccctataaatacttctgcttcaattactatcctactgtgattaaagccgtttgttaatcgtgtgcttccttccccgttcaaggtgctgagcgcctgctgcgtcacctgcacgccaacaaggtacccttttgcttggccaccagctccggcgccgacatggtcgagctgaagacggcccaacatcgggagctgttctccctgtttaaccacaaggtgtgcggttcgtcggacaaggaggtggtcaacggcaagcctgcgcccgacattttcctagtggccgccggcagattcggtgtgccgcccaaaccgtccgactgcctggtgttcgaggactcgccgaacggcgtgacggctgccaacagcgccggaatgcaggtggtgatggtgccggacccacgactgtcccaggaaaagacctcgcacgccacacaagtgctggcctcgttggcggacttcaagccggagcagttcgggctgcccgccttcacggattgaacttaatggctgacgtactttttgtagctaaaagatgctattgctgtaattggaaatcgatgtacctaccaagaaaatgaatttaagtgtaaatgttatcccatatacacgtatacgtatgtgtgcataaagcatctggctttgcctttattttgcgcctaatctacatagttttccagcgtaagttctatttgccaaccgcttccaggtttttgtgtatgtcaggagcagcgtggttggccagggagagggacacttccttgccgttgcctgcggacatgggaatcgatgtgggggaagctagcagcgcacattatgctaatctactcaccatagcgggcgtagaggcggggctggacgccagagcactcgcgcacgaggatcggcaggtcgggattgctcttcttcaggtttggatagaacctttccacgtattccctgtaaaggaacgctgctttagcaaattatataatttaaaagcggaaaatgacaatttcacctgactcccttggaagtgtctcctttgggatccagaatgattcgcagctccttcagttttggagtaaaactggccaatcggaacagagtaatacccattttggcaccacttttgcgattttgaaatgttcaggaagtaagtctatttaaatgtcggtactacgcagggttgtcaaactgtcttggattacatattggtattattgttttttaaaaacaaattactttttggctcaaactaaaataacgtctaactcaccagagacgcgaaccattagttgcatcgtttgaatatccattccaaagacaagaaccaaggcaattgtcttggctgacaccaggtcagcatttgattggcccacatcgataaataccgataaatgcttgacggccagtcactcatttgttttggtaaacatcatttgtctctggaaaatattcaattgaacacgtatttgaacaattatggcgtccgtgcattgtcaactgtggatgggaagcgtaagtagcaacgtgcattaccccagacacatgaccctttaagcccgcatggccatttcagctggagtcctacatgacggagaacttcataatcgccgctttccggaagatgggcgaagatcccaccacggtgcgcctgatgcgcaacaagtacacgggcgaaccggccggctactgcttcgtcaacttcatatccgatgaccatgcgctggacgcgatgcacaagctaaacggtaagcccattccgggcaccaatcccattgtgcgattccgtcttaactcggccagcaactcgtacaagctgcccgggaatgaacgcgaatttagcgtctgggtgggcgacctcagctcggacgtggacgactatcagctgtacaaggtgttctccagcaagttcacatcgatcaaaaccgccaaggtgatcttggacagcctggggttttccaagggttacggctttgtgcgatttggcatcgaggatgagcagaaatcagcgctgtacgacatgaacgggtacatcggattgggtaccaagcccataaagatttgcaatgccgtgcccaaacccaaatccgagttgggtggtgctgtgggcgaaggcaacacaaactatggatatggaagcggtatgactgcagcaggtggcaccgactactcgcagt

SEQ ID NO: 38615 - DNA, 352 bp, DROSOPHILA
gtagtaccgacatttaaatagacttacttcctgaacatttcaaaatcgcaaaagtggtgccaaaatgggtattactctgttccgattggccagttttactccaaaactgaaggagctgcgaatcattctggatcccaaaggagacacttccaagggagtcagggaatacgtggaaaggttctatccaaacctgaagaagagcaatcccgacctgccgatcctcgtgcgcgagtgctctggcgtccagccccgcctctacgcccgctatggcaacggcaaggaagtgtccctctccctggccaaccacgctgctcctgacatacacaaaaacctggaagcggttggcaaatag

SEQ ID NO: 38616 - protein, 95 aa, DROSOPHILA
MGITLFRLASFTPKLKELRIILDPKGDTSKGVREYVERFYPNLKKSNPDLPILVRECSGVQPRLYARYGNGKEVSLSLANHAAPDIHKNLEAVGK

SEQ ID NO: 38617 - DNA, 3739 bp, DROSOPHILA
ggttctggttaaggagctaactggtaaccaactgcaccctcattagctttagttttatataaaaaggttgacttgactttcaggacctcacattcaacgacagacagatgccgtggagtgcttgtgtaatctttccttgggcgaggcccatgtctccgaaaagattgtcactttggcgggcagctacatggtcacctaccttgatggcaaggccgaacgcctcaagcgcagttgcctgtggacactggccaacgttctgggcacatgcgacaaggccggcagcgtattgctgcaaatgcaaatagtacccaagctgtggaggctctacatcgagcccaatggctgccaagaagatgcggccatctgcctctccctggtggccacccgctgcccgcagcatgtgagtgacgaggatcgaaggtacattggccagaatctgcctgagaagctccacggccagcctgccagcgagtacttcatgtacatagtgcaccaactggaaatagtgacacaggagcacaagttagatgctcaacaggccgaatgcctggtgcgtttctttgaagccaccttagcatcgccagccgaccggctgtgcctaatctacgccgtgcgtgtaatgaccaatctggtagccctaggtgacacaagtctaatattcgcactggcagacccgcagaatcttgtgcaaaccctaaaccagctcttcgctctgcgagatccagatctcaacctggacgcgatgcgcttgctcaagaactgtctgcacttgaaggtagcagattccaacctggtactgaatagcttgcaaatatacgcataggcttatggttaagaataagtcttgcaaatctctttattggtcttagagtacatataaatataaagccacggacttttgagtactcgagaatgtattgtaaatgaacatggattgccgctaagcaaaactaaatcactaatggaaacagaataaaataaataaataataaataaatacaatacgacaaaaacacagatgcaaagtggtcaacatgattactagtttgattgagccaccggcatgaaaaacaggactttgtaaaacctaaatatcatcctcgaagagggcgattatttgacgccttttggcttcgtcgtcggcgttcagttcattgcccctgtgggcattgtggttgtgcacctccagttcggagactgagtcaaattctaaattgcactgcccgcagcgggctgagaaaacgggcgctggaccctgcgaaactgtgccaggagagacagcggcccgttgcagcttctcgaggaacgtggctctctccctgtgcttgtccagcccgattcccagcgccgcctttccgcgaatgggaatgggttttttcaccgtcggcgtgccctgggaatggcaactttcagagcgctcaatggcgtacagcacgttgttctcctccgtgatcggagtcgtcgttccgctggcacagtcgaatagagatggttcctgcaccggccggggatcgggtatatctatgggaattggcggctcagctatcttctcaccgttggacaccttcacctgattgagcttctcggccagaagcgagtctatggaatgttcctgcagccaggcgcaagttttgtgcagagcgaatatcatgcggcggatgaactcgtgcggcgagaccattttctgtcgcctaatctcgagcaacttggtcacctcggtaacaaacgtgacgaactggtattcgacgcagttgtccagatgcgactgatgcgagtcctcgaacatgaagcgtttggagcatgccggacacttgcgctccttccacatgggctccggtatgttcactttgatgtcgcgcagctgcagctgatcctgctccatgggatcgtcctcctcgaagttggtctcggtgtagttatagcagttcttgtgcttgcgcagcagggccgcctcctcgttgtcgtcgctggaactggccaccgcatagtcgtcatcttcgtcgtcattttggccactgctcgatggcagttcgccatcccgcggttgcctgggcatgctgttgtgaggctgctgcttgttgaacagcacgtttaagtactggatcttctgctcagcattgccgtctagctgggtagtcgtctgattgagcagtcgcttgtgtaccttgtccttggatgactccagtttgttggcgctgttgtttagcagaagattatgcactggcctctgctccacataattcagatcctccgccgtgaagagggcgctctccttgtccatcttgttcgcatccgaaacgttgaccctcttctgctggtagagctccgccagcttgagactcagcgcgttcttgatgcactgttcccggaatgtgacggcatgcttgagataggagatgcacggcgcacatatgttgcgtggcagtccgtcgtccgtggagttctgcggtcggtcgaaagaggaggcactcatataaacatttatctggctactttagaatggagtcacttactttcaggcccgtcgtctcctccagcagaacgtttatgggcttttgccagttgagaaactcgtttgtggagccgtgcaaatacgtgggaatcttggcgaatatctcgtagtctgcggggctgctgcagatgcggcagatattgccccacgacgtcatacttatggcaaaccttaaacttaatgcttatgccggaaaaaataaacaatgacaattttcaacactccggcgagtgttgccctaccactgaaggttcaaaactcaacagtccacccacttgcggcagtgatgtccagttagctataacaggattacagcaaattttttgaatattaattattattagctaaacacgtgacagatatattaatgactaagacgatagtttatttaagcataaataatactgttgaaaatacaaacgtagatttatttgatatatatttacaaagctagattttattaacaccaattggcaacagtggccaacagtctgttaatgctcttgatctagctgaactcgggggtcacactggtgcccatctggaattgcataaacaaacctcgctactggaataaaatcacaaatatgtcgtttaatatcatgcaaaagctgaccatgcagtgcctgaaggcagaccagccgctgatgagtaaggacttcccacgaaccggttgcatattctaatcaattcaatcccatttagccaccgtgcgcaatgccagcaagaaaaccggcggaagtacgaggaataagaagggccatgcgaggcccaaacatcgcggatggcgcgtccaggatgggcaccacgtctccgagggcacaatactggccacccagctcacaacgcgctttcatccgggcctgaatgtgagtagcgcaggaaggagttatcccggcatatttttatactttttcccattgaaaggtgggctttggccgcaatggaacccttttcgccatggagcacggcaaggtttatgtgacctgcgaggccatcgatcccaactgggaccacacctggattcagcggaactacgccggtcgccagggccagaacatctacaagaagttcttcaatgttgtgcccgaaaatcagcatcagcgatttcgtctagtggaggaaatctagattgttaaatacaaaatttaaaccaaatggaaatgtgaatatttgaatttttggcaattaacatcgatgtgcttaacagcacctgttatatttaca

SEQ ID NO: 38618 - DNA, 1669 bp, DROSOPHILA
ccggagtgttgaaaattgtcattgtttattttttccggcataagcattaagtttaaggtttgccataagtatgacgtcgtggggcaatatctgccgcatctgcagcagccccgcagactacgagatattcgccaagattcccacgtatttgcacggctccacaaacgagtttctcaactggcaaaagcccataaacgttctgctggaggagacgacgggcctgaaaaactccacggacgacggactgccacgcaacatatgtgcgccgtgcatctcctatctcaagcatgccgtcacattccgggaacagtgcatcaagaacgcgctgagtctcaagctggcggagctctaccagcagaagagggtcaacgtttcggatgcgaacaagatggacaaggagagcgccctcttcacggcggaggatctgaattatgtggagcagaggccagtgcataatcttctgctaaacaacagcgccaacaaactggagtcatccaaggacaaggtacacaagcgactgctcaatcagacgactacccagctagacggcaatgctgagcagaagatccagtacttaaacgtgctgttcaacaagcagcagcctcacaacagcatgcccaggcaaccgcgggatggcgaactgccatcgagcagtggccaaaatgacgacgaagatgacgactatgcggtggccagttccagcgacgacaacgaggaggcggccctgctgcgcaagcacaagaactgctataactacaccgagaccaacttcgaggaggacgatcccatggagcaggatcagctgcagctgcgcgacatcaaagtgaacataccggagcccatgtggaaggagcgcaagtgtccggcatgctccaaacgcttcatgttcgaggactcgcatcagtcgcatctggacaactgcgtcgaataccagttcgtcacgtttgttaccgaggtgaccaagttgctcgagattaggcgacagaaaatggtctcgccgcacgagttcatccgccgcatgatattcgctctgcacaaaacttgcgcctggctgcaggaacattccatagactcgcttctggccgagaagctcaatcaggtgaaggtgtccaacggtgagaagatagctgagccgccaattcccatagatatacccgatccccggccggtgcaggaaccatctctattcgactgtgccagcggaacgacgactccgatcacggaggagaacaacgtgctgtacgccattgagcgctctgaaagttgccattcccagggcacgccgacggtgaaaaaacccattcccattcgcggaaaggcggcgctgggaatcgggctggacaagcacagggagagagccacgttcctcgagaagctgcaacgggccgctgtctctcctggcacagtttcgcagggtccagcgcccgttttctcagcccgctgcgggcagtgcaatttagaatttgactcagtctccgaactggaggtgcacaaccacaatgcccacaggggcaatgaactgaacgccgacgacgaagccaaaaggcgtcaaataatcgccctcttcgaggatgatatttaggttttacaaagtcctgtttttcatgccggtggctcaatcaaactagtaatcatgttgaccactttgcatctgtgtttttgtcgtatt

SEQ ID NO: 38619 - protein, 503 aa, DROSOPHILA
MTSWGNICRICSSPADYEIFAKIPTYLHGSTNEFLNWQKPINVLLEETTGLKNSTDDGLPRNICAPCISYLKHAVTFREQCIKNALSLKLAELYQQKRVNVSDANKMDKESALFTAEDLNYVEQRPVHNLLLNNSANKLESSKDKVHKRLLNQTTTQLDGNAEQKIQYLNVLFNKQQPHNSMPRQPRDGELPSSSGQNDDEDDDYAVASSSDDNEEAALLRKHKNCYNYTETNFEEDDPMEQDQLQLRDIKVNIPEPMWKERKCPACSKRFMFEDSHQSHLDNCVEYQFVTFVTEVTKLLEIRRQKMVSPHEFIRRMIFALHKTCAWLQEHSIDSLLAEKLNQVKVSNGEKIAEPPIPIDIPDPRPVQEPSLFDCASGTTTPITEENNVLYAIERSESCHSQGTPTVKKPIPIRGKAALGIGLDKHRERATFLEKLQRAAVSPGTVSQGPAPVFSARCGQCNLEFDSVSELEVHNHNAHRGNELNADDEAKRRQIIALFEDDI

SEQ ID NO: 38620 - DNA, 3434 bp, DROSOPHILA
caaacattgacgtgcctcccaaaaatgctgatgcaggattggctgacaaaaccgtgagtaacctctagaagccagtccttgagcattatgccttccatgggctgcaggagataggcattccagacaaagcgcttgcgggaatcggagcgaaacgcgtaatccacacgctcatgggccttgtccacattgctagttagcgtattccaatcgggaagaggttcgtcgcggtcgagatctaccttggcaccaacgtagcgaggcgcggactcgttgtactgcagcgttcgcgtcaaatcgtaggagtatgagaaatagaagttgctacggaggtcgatattctgaaacatccgcttgtagcgatcctcatgcggatgcggtggtcgttgcgaggtcacctcgttcacacgcaccatcaccgtgtccttaatagtgtagaccaggtggcggccgatgtgggcgcagcatttgcgctttgtcaccagcaagaggtagtagccctcgaggaagcgcacaaatccaaggacgccataagcggacgtcaccttgggcgaacccgaaagggaagcgacaaaacgtcggatctccaggctgttaaactcgttggcattctcctcgatactcagccggttgtgggcaagtcggtctatggtcaggaggcgaaaccgagtctcccgattgttgctgcccaccaaatagaggcgctgaaattatggcgatatatgtgattagtcaaaaaaaggtcagctggaggtgatttcttaccgctcgtgtctcatagagcactactttttggatggagcttatcaggggattgaaaactatattcggattatcattgttcattttttcagcttttccgaaatttttttgttacaatttctcaggccgctcccacataaacaacaaacagctgatcatcatctgtagttggatatgcgagaaatggccagtgttggcagcgtgagagggagtcgattaattaattttgttttggttcaatcaaatataaataacattttattccatcataaaacatatcaaaataggcatattcattaccaaccaattttatgccttattcttacaatacctatgaatatgttagcttattttatcatctagcaaaatcatttttgtccattttaaagtagtgcacatggaagatatgtcttccaagtgtttttaaagtagtggtcacttgtgtatctcgaggatatgtctagcaagtgtttttctctgcttatagaaactggcacagtgaggacacttaaatgttctttcagcgttgtgtacgagcttgtgctccttgagagtgctgctcagccgaaaagtcttgggacagtgggagcagcgaaatggacgatctggtaagtgcaggcggctgtgctgcttgaggtgctgcttcatagcgaaggccttggggcagtgggaacacttgaatggtcgttcaccagtgtgagaacggaaatggttatcaaggtgaaacttcctcgtaaatgttttcgtgcacttggagcacttgaacggtctctcgctgccatgtgtgcggatgtgacgccggagatcggatgatttaataaaggtttttgagcactgtgaacacttgaatggtcgttcgccagtgtgagttcgctcatgcgactgcagagtggactgctgcgcaaaggtcttggcgcagtgggaacactcgtagggtttcgctgcattgtgggtcttcatgtgcgccttgagagtgactctaagtctaaagttccgcttgcagtaggggcatgggaaggattgtccgtccatgtgtgttcgcatgtgcctcagaaaagttccctttcgctggtatttcttgtggcattctcgacattcgaatgctaccttcttgctgtcgcttttcccatcgtcatcagcagcggatgcagaatcaatccgcgcatcttcgtcttccgaaatctcccagtcttcttcttcgagcaaggcgcataaagcatcctcgatgccttcatcgcgaactcggcagtagaactggtggctttcctcacaagtttgccttatcccatacgcgctctttacgtcctcatagcactgtgggcatatcatttccgaaaacaaatcgccacgtttgacctcgaatccggtgcactgcgcgatcatctcggcaatggaaactctggttcttcgtctggcgtcaaatatgttaacgagtttaccagaaatatccatacaaactcggcatatttccgccattatccctgtaataaacaatacttattaggctgaactttatgaaggactatattacttacctgatgtatatactaaatagcttatagctggaaaagcaatcttttataatttaggaatccgtttcatacatcccaattaattgaaaattaatgcgattgccttgatgaacaattcaaaataataataagctaaacttcacattgtgcacagtacactgggcaccctattctctgggccatatgctaaatcgatttattatcgatgttcgaaattcaaattatttatcaaaatgatgatttttgaaactaaggtgtgtttaccatatttaacagctgagataaacgcaaacttgcaagggtcgccctgtggtggtcagcccaagttttgatgggaaaattcttatcggatatcgatatcctttacctgttgaagaatataaaattgaaataaatttctttggaaaaacaaacatttatcttcgtatagttttttcacattttcgcctagctagtggtgaataattttggacagaaggagcactggactttttccgtggaaatcatagaaaaattaaattaaaaaggcacaaaaaggaaatgaatctcctcgccgaacttctttgccagtataaaaataaattcacatatgaaaaatcgggttcctgggtgccactgaatatgtttatccatcgattccgggctcagattaccaccattgacctgaaattaaataagcattacttactccaaataaaatataaacaaacaagtgcgtaccttttttgtttacaattttaacagctgatgagtgaagtgctgttaacctttcatagttatcgataatctgttattattatcggaatattgctcacttgctaaggattccatgaaatttaaacaaatggactttgtgacgacaactggggagggaagttttctgcgaaacaagattcgtgcatatgccaaggatcaccgtgttgagtgccgcataaaggcgaaagactcattgcgcattggacttggacaggttaagcaggaagtggcggctcttgagatgggcaccaaggacgtcattggaatggccagcaggatcaagcgtcgcaagcacgccacctccgaggatctgtgccgcttgtcgctggggttcctccagagcaatgacaacatcaatgcattcgcagctattcctggcgccattca

SEQ ID NO: 38621 - DNA, 1384 bp, DROSOPHILA
gtgaagtttagcttattattattttgaattgttcatcaaggcaatcgcattaattttcaattaattgggatgtatgaaacggattcctaaattataaaagattgcttttccagctataagctatttagtatatacatcaggcagggataatggcggaaatatgccgagtttgtatggatatttctggtaaactcgttaacatatttgacgccagacgaagaaccagagtttccattgccgagatgatcgcgcagtgcaccggattcgaggtcaaacgtggcgatttgttttcggaaatgatatgcccacagtgctatgaggacgtaaagagcgcgtatgggataaggcaaacttgtgaggaaagccaccagttctactgccgagttcgcgatgaaggcatcgaggatgctttatgcgccttgctcgaagaagaagactgggagatttcggaagacgaagatgcgcggattgattctgcatccgctgctgatgacgatgggaaaagcgacagcaagaaggtagcattcgaatgtcgagaatgccacaagaaataccagcgaaagggaacttttctgaggcacatgcgaacacacatggacggacaatccttcccatgcccctactgcaagcggaactttagacttagagtcactctcaaggcgcacatgaagacccacaatgcagcgaaaccctacgagtgttcccactgcgccaagacctttgcgcagcagtccactctgcagtcgcatgagcgaactcacactggcgaacgaccattcaagtgttcacagtgctcaaaaacctttattaaatcatccgatctccggcgtcacatccgcacacatggcagcgagagaccgttcaagtgctccaagtgcacgaaaacatttacgaggaagtttcaccttgataaccatttccgttctcacactggtgaacgaccattcaagtgttcccactgccccaaggccttcgctatgaagcagcacctcaagcagcacagccgcctgcacttaccagatcgtccatttcgctgctcccactgtcccaagacttttcggctgagcagcactctcaaggagcacaagctcgtacacaacgctgaaagaacatttaagtgtcctcactgtgccagtttctataagcagagaaaaacacttgctagacatatcctcgagatacacaagtgaccactactttaaaaacacttggaagacatatcttccatgtgcactactttaaaatggacaaaaatgattttgctagatgataaaataagctaacatattcataggtattgtaagaataaggcataaaattggttggtaatgaatatgcctattttgatatgttttatgatggaataaaatgttatttatatttg

SEQ ID NO: 38622 - protein, 315 aa, DROSOPHILA
MIAQCTGFEVKRGDLFSEMICPQCYEDVKSAYGIRQTCEESHQFYCRVRDEGIEDALCALLEEEDWEISEDEDARIDSASAADDDGKSDSKKVAFECRECHKKYQRKGTFLRHMRTHMDGQSFPCPYCKRNFRLRVTLKAHMKTHNAAKPYECSHCAKTFAQQSTLQSHERTHTGERPFKCSQCSKTFIKSSDLRRHIRTHGSERPFKCSKCTKTFTRKFHLDNHFRSHTGERPFKCSHCPKAFAMKQHLKQHSRLHLPDRPFRCSHCPKTFRLSSTLKEHKLVHNAERTFKCPHCASFYKQRKTLARHILEIHK

SEQ ID NO: 38623 - DNA, 3738 bp, DROSOPHILA
ctggccttgtttctatggtgatgccaatgcactttgtgcgtgacttctccgagtagcgtacggcttccgccacattggcgctgctgtggccggagagggcgtcgtgtaggttgcggataaagtagtcgcggtactcctccggcaggcacatgaacgtaccgcccattacgatgaactccaccttgtccacactgtgtcccagctgcttcagctgttcaacgcggtgtcgggtctgaagaaaaggatcgtaccgcgaccggatggctcgcatcgaggtcggctcgtagcctgtgtacgactgtgtcgagtactcaaagtcgctgtccggtccgccgggacaatagacgcatatattgccggtcatattgatgtgcggacaacgatgcggcttgcacatgacggcgaccacggcgatctggattgaaataattgaaatgaatagtacgccttgtgtaagcaagtgcgacttacgccacttgctgtgcgaatgggctttgccctcagctttggaagcagaatttttttggcgtcctgcggcacggcagcaattatgtcgaccaggcgcggcgaactgtccagtccatatttggaggccaccaatgatttcatccgattaaggtttacatcctttttggcttcgtgcgccttcagcagctcctgaatgatctccccgatgacgagcacctgtcgttcctggcggctcaatcccacgcctgaaataattggcggggtaaacggacgtttaaagaattactttcgtagcgacgttacctacccaacttcttttttgccttcattttgctgatgaatatcacataaactgcacgtgtgaagttagcagcacttgttttgattcggttatcgaccgaccaatagtccgataaccacaacactgtttgacaggttttgaagctaacaccacttggtaacacttttagatggtctatcgtttgtcgattatttatttgttttagcaccagtttctcgggagttctgtaaaatgactagctgcgtgccagcgcatcagcaaaaggaccaggagcagttgctaaaggaactggccagcagtggcgacgagatggacgacccggacgatccggaccaggaacaccaccagctggtagagccgaccttctctttttcggtatgtatacaataggctagtttcttgcgggccgattaataaatagcctttccaatttgcagaatagtaacacctgctgggtgtgcaacggctactatgggcccaacttcggggagccgttgtgcggcgcctgccacgccttcctgtacaacgcacagcgggcggaggagctgctcacggagctttccgatgacgaggattctgggaacgacgagccgccgttcaaggacaagcaggaagacgaggagaccgaaaacgacgtagacatcatgggctttgaggatctggaggacccccaaccggcagccgtgccacaacatccaaatccgcagccaccaatggagccacaggatcaacagccagcccaaccagttatagatctgccacagccggtgccggaggctgcggcaccacgacgcgagtctccggagcgcgactttgagcacgagagagccattaatcccttcctgctgcccattaagcgtccgcgggccacggctcccttggctctgccccattacatgcatgagctggccgatggaagggcgcgagtgcatgaatacaacgccgccagcggaagcggagcaagtggcagcagcagaaacattgtcaacataatacccgtcgaggtgatgctgaaaatatttgcctatttggacgacatgtcgctgtggatggctagtgaagtttgcaagcaatggcacgacattgtcgggaaaaacacggcccagagcatgtggaaggcgtatatcaagcagcgctggccgctgttcgacagtttggcagacaatccaaactggtatcggctgtacggggcactgatgtcttcctgcttctgtcgcacttgcctgattgagatgggcggtcggggtcaggatgcacaggaggcagatccacagctgggcgatcgggagccgggcaatgtaatgcgcaacaactttctgcgcggtgaagccaatctgctgaacagctacgaatctgagggcatatcggccataccgttggatcggcaaaacaactactggcaggcgacaattctggggccaccgggcagtccctacgaaggcggcaagttcttcctgttcatatacttcccggagcgatatccgatgacgccgcccacagtacgtttcctcaccaaaatcctgcatccgaatgtttcgcggcatggggacgtgggcatcgacatcttccagcagcacaactggtctctggcgctgaacgtggccaaggtgctgctttctgtgcagagcctgctgaccgatccgtataccgaagtctgcatggagcctgaacttggatacatctatgagcacgagcgcgaaaggttcgagcaactggtgcgcgcgtggacatggaagtacgccatgtacgagctaattgcaccgcgctagaagatcaaaagccctccaaggacaatggactgaaagttggaaactacccctctttacgttgtaactacatatgcctgtgtatttagcttagttgtgccatctggattgtttattttggcctcccctctcacttttcctgcgctccaggttgaaacgtagtcgaaattacttaaccttataataaatgtatgctttaagttacgagcggcgtcgcctcacttcgtccaggacaccttggggatgtcaaagtgctcggtgagcgtgtccaggtgctcgttgaatttctccacgcgctccttgtgggtggtttgtgccttgtccatgattcgcttgttgcgcatcttttcctgctgcttcttactggccagctcggccttggtgagcttccgctcgtagccactggtggcggaggaggatgtggcccccgattccgctatttgctgctccacgaacgccttctgcagctccttctccttgtccttgcccttgtgcttcttctttttcttcttgagatccgaatcgttctttagtttaagcttgcccttggccacgcaggcgtactcgtcggacatgtctttaatgggttttcaatctggaaatggattggtaatgaatccgatctgtttacgtttttcttgtttttgtttacaccaactgcacgttgttatctttacataatttctgatattcgatgttattacctgaccagaaatatatcgatggcattttatcgaatacatttgaaatgttacaaaatacgttatttttgtttgttttttgtggtaagtttccttaatctaacaagaaataacttaaaaacctctaatataaataaaaacagtcctgtaagactaaaaatagttgttcaagacattacatacattcaactgttagaatacaaaatgtaaaacttaaacggtattacccatggtaattgagatgataagcgaataaaatcttaaattaacgaaattagcgagccttgacggctaactccggattttttatcattaccacaatgattgttaaactgactggatctactacctttttggtagcactattcctgtttgaggtttctagaaatgttgccggtgagttttgtttttatatattataaagtaattgacttttgattatttaattaggagctcttgaggcgcttcagacaactaatgacacatttgttaggatcgggaa

SEQ ID NO: 38624 - DNA, 1676 bp, DROSOPHILA
atgactagctgcgtgccagcgcatcagcaaaaggaccaggagcagttgctaaaggaactggccagcagtggcgacgagatggacgacccggacgatccggaccaggaacaccaccagctggtagagccgaccttctctttttcgaatagtaacacctgctgggtgtgcaacggctactatgggcccaacttcggggagccgttgtgcggcgcctgccacgccttcctgtacaacgcacagcgggcggaggagctgctcacggagctttccgatgacgaggattctgggaacgacgagccgccgttcaaggacaagcaggaagacgaggagaccgaaaacgacgtagacatcatgggctttgaggatctggaggacccccaaccggcagccgtgccacaacatccaaatccgcagccaccaatggagccacaggatcaacagccagcccaaccagttatagatctgccacagccggtgccggaggctgcggcaccacgacgcgagtctccggagcgcgactttgagcacgagagagccattaatcccttcctgctgcccattaagcgtccgcgggccacggctcccttggctctgccccattacatgcatgagctggccgatggaagggcgcgagtgcatgaatacaacgccgccagcggaagcggagcaagtggcagcagcagaaacattgtcaacataatacccgtcgaggtgatgctgaaaatatttgcctatttggacgacatgtcgctgtggatggctagtgaagtttgcaagcaatggcacgacattgtcgggaaaaacacggcccagagcatgtggaaggcgtatatcaagcagcgctggccgctgttcgacagtttggcagacaatccaaactggtatcggctgtacggggcactgatgtcttcctgcttctgtcgcacttgcctgattgagatgggcggtcggggtcaggatgcacaggaggcagatccacagctgggcgatcgggagccgggcaatgtaatgcgcaacaactttctgcgcggtgaagccaatctgctgaacagctacgaatctgagggcatatcggccataccgttggatcggcaaaacaactactggcaggcgacaattctggggccaccgggcagtccctacgaaggcggcaagttcttcctgttcatatacttcccggagcgatatccgatgacgccgcccacagtacgtttcctcaccaaaatcctgcatccgaatgtttcgcggcatggggacgtgggcatcgacatcttccagcagcacaactggtctctggcgctgaacgtggccaaggtgctgctttctgtgcagagcctgctgaccgatccgtataccgaagtctgcatggagcctgaacttggatacatctatgagcacgagcgcgaaaggttcgagcaactggtgcgcgcgtggacatggaagtacgccatgtacgagctaattgcaccgcgctagaagatcaaaagccctccaaggacaatggactgaaagttggaaactacccctctttacgttgtaactacatatgcctgtgtatttagcttagttgtgccatctggattgtttattttggcctcccctctcacttttcctgcgctccaggttgaaacgtagtcgaaattacttaaccttataataaatgtatgctttaagtt

SEQ ID NO: 38625 - protein, 491 aa, DROSOPHILA
MTSCVPAHQQKDQEQLLKELASSGDEMDDPDDPDQEHHQLVEPTFSFSNSNTCWVCNGYYGPNFGEPLCGACHAFLYNAQRAEELLTELSDDEDSGNDEPPFKDKQEDEETENDVDIMGFEDLEDPQPAAVPQHPNPQPPMEPQDQQPAQPVIDLPQPVPEAAAPRRESPERDFEHERAINPFLLPIKRPRATAPLALPHYMHELADGRARVHEYNAASGSGASGSSRNIVNIIPVEVMLKIFAYLDDMSLWMASEVCKQWHDIVGKNTAQSMWKAYIKQRWPLFDSLADNPNWYRLYGALMSSCFCRTCLIEMGGRGQDAQEADPQLGDREPGNVMRNNFLRGEANLLNSYESEGISAIPLDRQNNYWQATILGPPGSPYEGGKFFLFIYFPERYPMTPPTVRFLTKILHPNVSRHGDVGIDIFQQHNWSLALNVAKVLLSVQSLLTDPYTEVCMEPELGYIYEHERERFEQLVRAWTWKYAMYELIAPR

SEQ ID NO: 38626 - DNA, 3941 bp, DROSOPHILA
ctcgatccgccgctcaagaagtcgcccaagattcgcggctactcctggcactgtgccgactgtgatcccacggacgaggatgcactgcccaagaaatagaagcaaacatgatttttacgtagattttgtaccattaatatcattaggtccgtgcgatatttacaaaactaaaattgaatacacaaaataaaataagtaagacacattcatattaaaaataaaatattgaccaaattgtaatttgtcactcgctgaattgttcggctcagttatttaacatatttataaatacatttattaataaaaaccatataaatattaccgaattggatttcattaaagacggaacccgaaaaggactcatgagacgttcaaccgacatgatacgaaaacggaaattaatttaacattgttgtttattatttagcatgaccagcattccatctcatttttgattcttaaatacacatataaaattatacaattttcaaattattaacgatctgaccacgaatgttgaccatgttttggtgttttagcaaggaaactctgcatttttccatcatattcctgaaaacaatcagagttatggacaagtaccaaataccaattccaatacaattgatttgtattttatcggcattccactggcatttccgttaaatgtgctgttaggagcccaaccacatgttgtgctatcgaatgataatcgattcacggcattcgatatcatataaacaacgaaatcgatgtacttttcggtatgccctacaccgggcttagaagagaacattaatttagtacttaggttaatttatatctatatatttgcaacctatagtcagtttaaaggaaatatattctttatgttttgattttttagctcgaactacaaatgatatatgtttatgcttaaatacaatattgttgaaaagatattatgctataaagtgaagtctatagccaagtcgaccaagccgcactatgctctagtccagcggctgttggaaaaacggccacgtaaaaacataattttaacaggcgcaaatacttggcgtgtctagtcgccaacgtgaatgaaagtaaacaaagggcagtaaaatatgccacagcggcaagcaacgaagcagttggagttgatatgtgacgtgaaggaaaggcaatagttccggacccagtttgtgaccatggacgagaagctaaaatattctctgctgcgcggggaactggtggacacgcagagcatttggaccaggtgggtctcacagcatacagctcactaaacctccccaagtacaactcctttgtcggatcattgcaggcatgagaagcgtgtctggttcatcacccttattacgggcacctgtatgctgtactccacccgcaccactatgccacttcttgtgccggccgtggcatccgcccaaaagtggagcaaaaccgactcgggcactgtgctcagctccttcttctggggctacacactcacgcaggttgtgggcggctacttcagcgaccgctttggaggccagcgagtcattctgtttgccgcaatcggctggtcgcttatcacattcctaatgcccactatcatctggacggcgggctccatcaagagttacgctattcccttcattgttgccattcgaatcctgaacggcgctcttcagggcgtgcactttcctagcatgattagtctaaccagtcaggtgcttagctaattttataaatttacacataaactataacttaatcgtttgcagaatttgtgccccaatgagagaagcagcttctttgggctgctcacagcgggatcggctctaggtactcttctgactgggattatgggatcttttctgctggactacttcggctggtcgtatgtattccgggtgataggactgatgggcatcgcatgggcgctggtgctgcgctactatgcaatggccggcgagcgaaaccgaatcattaatattgccacgccatcccgactgtgcgcgaacaagagtccggcagagacgtcagccgtgccttggttgcgatactttcgtaggctgtccttctgggcctgtgtgctgactcacgcctgcgagatgaactgcttcttcgtgctactctcctggctgcctacatacttccacgacggctttccacacgccaagggttgggtagtgaacatgatcccgtggcttgccctgccaccgtgcacgctattcgccaagtacttgaccaccagattactcgctcgcgaatggcacacgacgacggtgcgcaaggtcatccaaagttgctgctttgccgctcagaatctggccctgtttgtgatgagccgcacctcggacttccatacggcgctcatctgcatgaccattatcattggcggcacgggcttccacaacaacgcggtaacagtgaatccccaagacctggcacctctgcattcgggcagcgtctttggcctgatgaacacagtgggcgcgattcctggctttctcggagtatacttggccggacacattctggagctcacacaaagctggccgatggtgttcagcgccgctgctggcatcaatttggttggctggatcatatttatagtctttggttcggcggaagccatcgtttaacattctcttgcacactttcctcagaaaaactaacctatttatttatgtgtggggtatattggagtggatcgatttatgttcatgctgcttatattatttagtatacacgtttatgattgacgatcatttagttgttcttgtgagatgttaaagccaaaaaatatgtggtatcattgatactttaaaggaccctgtgagttttagccaataaatcgattcattctatatattaatgtatatatttaagagagtagttttaagtagcgaaatcttactgctcctagcgtgataaaatacaaatatttaatcctccaacataccaccaagacagtcatttaacgctatacctagttattttcttctatgctctttgacatgtagggtccgtcaagttggtatcccattttgcgatagtagtttctggtgcccactcccgatatgaccgccagttttgtgctgccgtgctcctctcgagcaattcgctccgcctcctccatcagcaacataccgaagccctggtgctgaaacttggtgggatccctagcattaaccggcacgactgagccatatacgtgcagctccctcacaatggagcattcgcccttcagttccgggcggaaggtatccggtgagcactttcgcagcctaagaaggcctacgagaatgtcctgttcaggatcttcgtatgagaggaacgtttcccagccgccattggccacatagtcccgacgaattagctcaatttcgtaagggcgcaccttgttgtggatttcctgaatgccaacttcgcgggttctaacatcgcggcaagtggttccaagatccttcatgcgggccagcgccagttcacggagatttccgtgttccacgccggaactaaaatgaagaaaaatgtcaggtttatttaatatatatatcggacaagttacctaacaagcggcatgggaatgtcgcgctgtacgcggtacactcgcgtccatggtggtacaagggccaaaatcttcgccactaagtccacaagcatggatggcggatatgacttatatcgcccggttttccataactcgtagagaccagtgccgcgaatgacgagcgtgggatagatctttaggccgtcagagcggaaggcagggttctcaaagtactcgataaactgctcgatgtcgcgttcaaagtcaacattgggaagatcaggcatcatgtgcgtcacgatcttatagccagcatccttgcccagctggaagctctcgcacaccgctcgcaccgtgtgtccgcggttcgtatccctggccacgtcttcgtaaaccgattgca

SEQ ID NO: 38627 - DNA, 1821 bp, DROSOPHILA
gctgttggaaaaacggccacgtaaaaacataattttaacaggcgcaaatacttggcgtgtctagtcgccaacgtgaatgaaagtaaacaaagggcagtaaaatatgccacagcggcaagcaacgaagcagttggagttgatatgtgacgtgaaggaaaggcaatagttccggacccagtttgtgaccatggacgagaagctaaaatattctctgctgcgcggggaactggtggacacgcagagcatttggaccaggcatgagaagcgtgtctggttcatcacccttattacgggcacctgtatgctgtactccacccgcaccactatgccacttcttgtgccggccgtggcatccgcccaaaagtggagcaaaaccgactcgggcactgtgctcagctccttcttctggggctacacactcacgcaggttgtgggcggctacttcagcgaccgctttggaggccagcgagtcattctgtttgccgcaatcggctggtcgcttatcacattcctaatgcccactatcatctggacggcgggctccatcaagagttacgctattcccttcattgttgccattcgaatcctgaacggcgctcttcagggcgtgcactttcctagcatgattagtctaaccagtcagaatttgtgccccaatgagagaagcagcttctttgggctgctcacagcgggatcggctctaggtactcttctgactgggattatgggatcttttctgctggactacttcggctggtcgtatgtattccgggtgataggactgatgggcatcgcatgggcgctggtgctgcgctactatgcaatggccggcgagcgaaaccgaatcattaatattgccacgccatcccgactgtgcgcgaacaagagtccggcagagacgtcagccgtgccttggttgcgatactttcgtaggctgtccttctgggcctgtgtgctgactcacgcctgcgagatgaactgcttcttcgtgctactctcctggctgcctacatacttccacgacggctttccacacgccaagggttgggtagtgaacatgatcccgtggcttgccctgccaccgtgcacgctattcgccaagtacttgaccaccagattactcgctcgcgaatggcacacgacgacggtgcgcaaggtcatccaaagttgctgctttgccgctcagaatctggccctgtttgtgatgagccgcacctcggacttccatacggcgctcatctgcatgaccattatcattggcggcacgggcttccacaacaacgcggtaacagtgaatccccaagacctggcacctctgcattcgggcagcgtctttggcctgatgaacacagtgggcgcgattcctggctttctcggagtatacttggccggacacattctggagctcacacaaagctggccgatggtgttcagcgccgctgctggcatcaatttggttggctggatcatatttatagtctttggttcggcggaagccatcgtttaacattctcttgcacactttcctcagaaaaactaacctatttatttatgtgtggggtatattggagtggatcgatttatgttcatgctgcttatattatttagtatacacgtttatgattgacgatcatttagttgttcttgtgagatgttaaagccaaaaaatatgtggtatcattgatactttaaaggaccctgtgagttttagccaataaatcgattcattctatatattaatgtatatatttaagagagtagttttaagtagcgaaatcttactgctcctagcgtgataaaatacaaatatttaatcctcca

SEQ ID NO: 38628 - protein, 439 aa, DROSOPHILA
MDEKLKYSLLRGELVDTQSIWTRHEKRVWFITLITGTCMLYSTRTTMPLLVPAVASAQKWSKTDSGTVLSSFFWGYTLTQVVGGYFSDRFGGQRVILFAAIGWSLITFLMPTIIWTAGSIKSYAIPFIVAIRILNGALQGVHFPSMISLTSQNLCPNERSSFFGLLTAGSALGTLLTGIMGSFLLDYFGWSYVFRVIGLMGIAWALVLRYYAMAGERNRIINIATPSRLCANKSPAETSAVPWLRYFRRLSFWACVLTHACEMNCFFVLLSWLPTYFHDGFPHAKGWVVNMIPWLALPPCTLFAKYLTTRLLAREWHTTTVRKVIQSCCFAAQNLALFVMSRTSDFHTALICMTIIIGGTGFHNNAVTVNPQDLAPLHSGSVFGLMNTVGAIPGFLGVYLAGHILELTQSWPMVFSAAAGINLVGWIIFIVFGSAEAIV

SEQ ID NO: 38629 - DNA, 5436 bp, DROSOPHILA
caaggtgttctccagcaagttcacatcgatcaaaaccgccaaggtgatcttggacagcctggggttttccaagggttacggctttgtgcgatttggcatcgaggatgagcagaaatcagcgctgtacgacatgaacgggtacatcggattgggtaccaagcccataaagatttgcaatgccgtgcccaaacccaaatccgagttgggtggtgctgtgggcgaaggcaacacaaactatggatatggaagcggtatgactgcagcaggtggcaccgactactcgcagtactacgaccccaccagcacctattggcagggataccaggcctggcaaggttactacgagcaggccggtgcttcgatcacagatgcggctgcatactaccagcaggccatgtcgcagtcgcactctaatccgcagactctggcccagcacgccgaggcctggagcgcacaacgcagcgcccagtacgagcagcagcagcagcagcagaccgcttccgccgccaatggagctgaggatgagaacggactggtggagcacaagttcgtcctggatgtggacaaactgaaccgagaggccattgatgccgaccgccgtctgtacgatgctctggagagctctaagtggctgcccattgagcagctggaagtcttttaggatacttatctactatatttatagcttactataattacagcttagatataagcaaaaaatataaaagcctgacttgtagcgtattattgtttttgagcctgctataaacttttatgctcctgaatctacatttcttaacaaaggattcaaaataaaggatacatttttacaaaatatccctaatatccttacaacagatgtattttatcgatatacagacggaatactattctgtccgtgtcatcgccatgtcggcctatcgactgtcgatagtttctgccttggcccgagactttcggagattgtgcagacaattgcggactaaataagcgttgaatcatgaagcgagcgcggcagccgaagattactacgcaggccctgctcgattttgacttgggcgagagttcctcggatagcgacttcctgccggacatcgacaactgctcggacggatcgaaggacgagagcgatggcgacggtagcagcagcgacgccagtggtggctccgattctgaatcggattcggatgcggagagcgaggattcaacactgcagctccggcagctgttggcggaaacggaaccgtcaccactggagaacgggatcaatggagtggaccactgcgcagcttcctccccggcagcaccagtagtgcctcgtgcgccacttcagctgtctagtgctccggccaagcggatgtgctgcgtctgcctgggcgaacgcagcgacgacgtcaacgagatcgtggagtgcgactcctgcggcgtatctgtccacgaaggatgctatggcgtcagcgacaacgtgagcatatccagtaccaactccacctgctcgacggaaccgtggttctgcgaggcctgtcgtgctggggtctcggaaccggactgcgagctgtgtcccaacaagggcggcatctacaaggagaccgacgtgggcaagtgggtgcacctcatctgcgctctgtatgtgcccggcgtggcctttggcgaagtggagcagctgtcctcggtgacgcttttcgagatgcagtacagcaagtggggcgccaaggtgtgttccctttgcgagaacgctctattcgctcgcacgggcgtttgcattggttgtgatgcaggcatgtgcaagacttattttcacgtgacctgcgcccaggtggccggctttcttatcgaagcgcaccacgaggacgatgccgccgatccgttctacgctcactgcaaggtgcactcggagaaggagatgatcaagaagcgacggcgcaactaccacacactgcggctcaatatgatgcaacgggcgagggaaaaagaggcgttagctgccgaacatgagacacctgcccctcacccaaatccagcccaagcacgcattcagcgtaagctgctcaagatccaacacaagtataccaggcacaaggagcttaagcccacgccgtgggtgccaacgcagaaaatgtcacgcctgctcaccacctcggcctccgcctgtcgtcgactgttggccaaggcggagattatgtcagtggatgtgcagcatctggagcagcgcgaggcgcacattaacgccttgacggacattcggaagaagtggcacattgcgccggcattcagcgttgagttcactgcttactacatggaccgtatagtccgcatggatgacttccgtcagcagcagcgggagcttatttcgcacaacgctatcttgtccaaggatcaagacgtgctgagagctcaatacgacaccgcgttggaggagcgcaaggcagtgaaggccactaaggattccctgctaacgagcattaagtctctgcacacggctttgggccaaattgcacccaacatgacgctgcccagcgtggatctcattgcgcatccactgccagaggcgccgccaaagaccagtacgccgactccaccccagcgtcccatctcggtgcccacggcagctgcactgaaaatgggcgtgggctttccgttgggtcatctggggccaccgggcagtaaaatggactcgtcacgcatgctcagtactcatgccaaacagggcaaacacagcacttcctcggcatccgtggaggcggccccttctgtgtcctgtggcatctgcaagaggagcaaggatcagcatctgttggtcaaatgtgacacttgcaatttgcactaccacctgggctgtctgaatccgccgctcactcgacccccaaagaaatccaagcagtatggctggcagtgctccgaatgctgcgacaagtctgagggttcggatgccgtcacggagatctcatcgggtccgagaaagtcacgcactcgcttcaataaggatggccatctggtctatgtggatcgatattcgctggacgatattccagtggccgctgtcaatgtacccaaggagtcacacaccaagcgagcgctcaacaaatccctgccagctcctgctccggaatatatagaagatctgactaagtcgccgaaacggcctaaactccaatccccatgtaaaacaccaattaatggtgagttcgttgttgagaattcgatttggcacaatacctgtttagattattattgctgatttggagtttttggtttatttttttttaaatgcaaatgtgtaaatatgtatgcgtgaattaacggaatttttcgcttgatggttagagaaatttatgatttatgaagaaattggttttctgtttaatcctgattatcactacacttgttttttttttggcctgtacaaagaaagtcaaaactatctcaaacattgatctttgtttacgtttattgaattatacccaattggtatttaatacaagaaattatttttttgttaacaaataataaagaaaaaattttttgcgcaaattcaagtatgtttaataataaataataaaactaatgtcacggatcttcttccgccagttcctgccgaaaatgtcactcccacaactgatgctgctcctgttgccgcttcggcggctactcctgcggcagctccaacactgcccacgcccaatactatcgtgattaacctatctggctgtgaggactcgattgacgactccagtggaaaattatcgcgcaagggtaagcgcaaggacaagcacaaaaacaaacacaacctgtcgtcggatacagagaaatcgatcggcaaggagcataaacggaagcgaaaaaagcgcgcccaccttgacgagtcttccacccatttggataacgcgggcaacacctcgggcagcaccattaagattatattcaaggcattgcgtttacccggcgaggatgcgccggagtctcaatacttctacgtgccggccaatgcggtgcgctccgtggacgaagcctcgcgccccacctcagttgaaacagtcgaggacagtgtccagggagcggagcaagccttggcacccatcgtgctgccggcagcgtcaccgcaaaaggttcgggagcccaaggagactgcggccagcgcttccgtcaaccccacaccatcacctaaaagaaaggtcagtccacgaaaggcaagtccccgaaagccgcgtgtgggtcgaccacgggtgtccaacgccaagcctaatgtggaaatcagctgctgcgtgtgcagccagacgggcaagtccaaccaggtggtgacctgcgacgagtgccaccggcactatcacttcgcctgcctcgatccgccgctcaagaagtcgcccaagattcgcggctactcctggcactgtgccgactgtgatcccacggacgaggatgcactgcccaagaaatagaagcaaacatgatttttacgtagattttgtaccattaatatcattaggtccgtgcgatatttacaaaactaaaattgaatacacaaaataaaataagtaagacacattcatattaaaaataaaatattgaccaaattgtaatttgtcactcgctgaattgttcggctcagttatttaacatatttataaatacatttattaataaaaaccatataaatattaccgaattggatttcattaaagacggaacccgaaaaggactcatgagacgttcaaccgacatgatacgaaaacggaaattaatttaacattgttgtttattatttagcatgaccagcattccatctcatttttgattcttaaatacacatataaaattatacaattttcaaattattaacgatctgaccacgaatgttgaccatgttttggtgttttagcaaggaaactctgcatttttccatcatattcctgaaaacaatcagagttatggacaagtaccaaataccaattccaatacaattgatttgtattttatcggcattccactggcatttccgttaaatgtgctgttaggagcccaaccacatgttgtgctatcgaatgataatcgattcacggcattcgatatcatataaacaacgaaatcgatgtacttttcggtatgccctacaccgggcttagaagagaacattaatttagtacttaggttaatttatatctatatatttgcaacctatagtcagtttaaaggaaatatattctttatgttttgattttttagctcgaactacaaatgatatatgtttatgcttaaatacaatattgttgaaaagatattatgctataaagtgaagtctatagccaagtcgaccaagccgcactatgctctagtccagcggctgttggaaaaacggccacgtaaaaacataattttaacaggcgcaaatacttggcgtgtctagtcgccaacgtgaatgaaagtaaacaaagggcagta

SEQ ID NO: 38630 - DNA, 3027 bp, DROSOPHILA
atgaagcgagcgcggcagccgaagattactacgcaggccctgctcgattttgacttgggcgagagttcctcggatagcgacttcctgccggacatcgacaactgctcggacggatcgaaggacgagagcgatggcgacggtagcagcagcgacgccagtggtggctccgattctgaatcggattcggatgcggagagcgaggattcaacactgcagctccggcagctgttggcggaaacggaaccgtcaccactggagaacgggatcaatggagtggaccactgcgcagcttcctccccggcagcaccagtagtgcctcgtgcgccacttcagctgtctagtgctccggccaagcggatgtgctgcgtctgcctgggcgaacgcagcgacgacgtcaacgagatcgtggagtgcgactcctgcggcgtatctgtccacgaaggatgctatggcgtcagcgacaacgtgagcatatccagtaccaactccacctgctcgacggaaccgtggttctgcgaggcctgtcgtgctggggtctcggaaccggactgcgagctgtgtcccaacaagggcggcatctacaaggagaccgacgtgggcaagtgggtgcacctcatctgcgctctgtatgtgcccggcgtggcctttggcgaagtggagcagctgtcctcggtgacgcttttcgagatgcagtacagcaagtggggcgccaaggtgtgttccctttgcgagaacgctctattcgctcgcacgggcgtttgcattggttgtgatgcaggcatgtgcaagacttattttcacgtgacctgcgcccaggtggccggctttcttatcgaagcgcaccacgaggacgatgccgccgatccgttctacgctcactgcaaggtgcactcggagaaggagatgatcaagaagcgacggcgcaactaccacacactgcggctcaatatgatgcaacgggcgagggaaaaagaggcgttagctgccgaacatgagacacctgcccctcacccaaatccagcccaagcacgcattcagcgtaagctgctcaagatccaacacaagtataccaggcacaaggagcttaagcccacgccgtgggtgccaacgcagaaaatgtcacgcctgctcaccacctcggcctccgcctgtcgtcgactgttggccaaggcggagattatgtcagtggatgtgcagcatctggagcagcgcgaggcgcacattaacgccttgacggacattcggaagaagtggcacattgcgccggcattcagcgttgagttcactgcttactacatggaccgtatagtccgcatggatgacttccgtcagcagcagcgggagcttatttcgcacaacgctatcttgtccaaggatcaagacgtgctgagagctcaatacgacaccgcgttggaggagcgcaaggcagtgaaggccactaaggattccctgctaacgagcattaagtctctgcacacggctttgggccaaattgcacccaacatgacgctgcccagcgtggatctcattgcgcatccactgccagaggcgccgccaaagaccagtacgccgactccaccccagcgtcccatctcggtgcccacggcagctgcactgaaaatgggcgtgggctttccgttgggtcatctggggccaccgggcagtaaaatggactcgtcacgcatgctcagtactcatgccaaacagggcaaacacagcacttcctcggcatccgtggaggcggccccttctgtgtcctgtggcatctgcaagaggagcaaggatcagcatctgttggtcaaatgtgacacttgcaatttgcactaccacctgggctgtctgaatccgccgctcactcgacccccaaagaaatccaagcagtatggctggcagtgctccgaatgctgcgacaagtctgagggttcggatgccgtcacggagatctcatcgggtccgagaaagtcacgcactcgcttcaataaggatggccatctggtctatgtggatcgatattcgctggacgatattccagtggccgctgtcaatgtacccaaggagtcacacaccaagcgagcgctcaacaaatccctgccagctcctgctccggaatatatagaagatctgactaagtcgccgaaacggcctaaactccaatccccatgtaaaacaccaattaatgttcctgccgaaaatgtcactcccacaactgatgctgctcctgttgccgcttcggcggctactcctgcggcagctccaacactgcccacgcccaatactatcgtgattaacctatctggctgtgaggactcgattgacgactccagtggaaaattatcgcgcaagggtaagcgcaaggacaagcacaaaaacaaacacaacctgtcgtcggatacagagaaatcgatcggcaaggagcataaacggaagcgaaaaaagcgcgcccaccttgacgagtcttccacccatttggataacgcgggcaacacctcgggcagcaccattaagattatattcaaggcattgcgtttacccggcgaggatgcgccggagtctcaatacttctacgtgccggccaatgcggtgcgctccgtggacgaagcctcgcgccccacctcagttgaaacagtcgaggacagtgtccagggagcggagcaagccttggcacccatcgtgctgccggcagcgtcaccgcaaaaggttcgggagcccaaggagactgcggccagcgcttccgtcaaccccacaccatcacctaaaagaaaggtcagtccacgaaaggcaagtccccgaaagccgcgtgtgggtcgaccacgggtgtccaacgccaagcctaatgtggaaatcagctgctgcgtgtgcagccagacgggcaagtccaaccaggtggtgacctgcgacgagtgccaccggcactatcacttcgcctgcctcgatccgccgctcaagaagtcgcccaagattcgcggctactcctggcactgtgccgactgtgatcccacggacgaggatgcactgcccaagaaatag

SEQ ID NO: 38631 - protein, 1008 aa, DROSOPHILA
MKRARQPKITTQALLDFDLGESSSDSDFLPDIDNCSDGSKDESDGDGSSSDASGGSDSESDSDAESEDSTLQLRQLLAETEPSPLENGINGVDHCAASSPAAPVVPRAPLQLSSAPAKRMCCVCLGERSDDVNEIVECDSCGVSVHEGCYGVSDNVSISSTNSTCSTEPWFCEACRAGVSEPDCELCPNKGGIYKETDVGKWVHLICALYVPGVAFGEVEQLSSVTLFEMQYSKWGAKVCSLCENALFARTGVCIGCDAGMCKTYFHVTCAQVAGFLIEAHHEDDAADPFYAHCKVHSEKEMIKKRRRNYHTLRLNMMQRAREKEALAAEHETPAPHPNPAQARIQRKLLKIQHKYTRHKELKPTPWVPTQKMSRLLTTSASACRRLLAKAEIMSVDVQHLEQREAHINALTDIRKKWHIAPAFSVEFTAYYMDRIVRMDDFRQQQRELISHNAILSKDQDVLRAQYDTALEERKAVKATKDSLLTSIKSLHTALGQIAPNMTLPSVDLIAHPLPEAPPKTSTPTPPQRPISVPTAAALKMGVGFPLGHLGPPGSKMDSSRMLSTHAKQGKHSTSSASVEAAPSVSCGICKRSKDQHLLVKCDTCNLHYHLGCLNPPLTRPPKKSKQYGWQCSECCDKSEGSDAVTEISSGPRKSRTRFNKDGHLVYVDRYSLDDIPVAAVNVPKESHTKRALNKSLPAPAPEYIEDLTKSPKRPKLQSPCKTPINVPAENVTPTTDAAPVAASAATPAAAPTLPTPNTIVINLSGCEDSIDDSSGKLSRKGKRKDKHKNKHNLSSDTEKSIGKEHKRKRKKRAHLDESSTHLDNAGNTSGSTIKIIFKALRLPGEDAPESQYFYVPANAVRSVDEASRPTSVETVEDSVQGAEQALAPIVLPAASPQKVREPKETAASASVNPTPSPKRKVSPRKASPRKPRVGRPRVSNAKPNVEISCCVCSQTGKSNQVVTCDECHRHYHFACLDPPLKKSPKIRGYSWHCADCDPTDEDALPKK

SEQ ID NO: 38632 - DNA, 3144 bp, DROSOPHILA
gccggacccacgactgtcccaggaaaagacctcgcacgccacacaagtgctggcctcgttggcggacttcaagccggagcagttcgggctgcccgccttcacggattgaacttaatggctgacgtactttttgtagctaaaagatgctattgctgtaattggaaatcgatgtacctaccaagaaaatgaatttaagtgtaaatgttatcccatatacacgtatacgtatgtgtgcataaagcatctggctttgcctttattttgcgcctaatctacatagttttccagcgtaagttctatttgccaaccgcttccaggtttttgtgtatgtcaggagcagcgtggttggccagggagagggacacttccttgccgttgcctgcggacatgggaatcgatgtgggggaagctagcagcgcacattatgctaatctactcaccatagcgggcgtagaggcggggctggacgccagagcactcgcgcacgaggatcggcaggtcgggattgctcttcttcaggtttggatagaacctttccacgtattccctgtaaaggaacgctgctttagcaaattatataatttaaaagcggaaaatgacaatttcacctgactcccttggaagtgtctcctttgggatccagaatgattcgcagctccttcagttttggagtaaaactggccaatcggaacagagtaatacccattttggcaccacttttgcgattttgaaatgttcaggaagtaagtctatttaaatgtcggtactacgcagggttgtcaaactgtcttggattacatattggtattattgttttttaaaaacaaattactttttggctcaaactaaaataacgtctaactcaccagagacgcgaaccattagttgcatcgtttgaatatccattccaaagacaagaaccaaggcaattgtcttggctgacaccaggtcagcatttgattggcccacatcgataaataccgataaatgcttgacggccagtcactcatttgttttggtaaacatcatttgtctctggaaaatattcaattgaacacgtatttgaacaattatggcgtccgtgcattgtcaactgtggatgggaagcgtaagtagcaacgtgcattaccccagacacatgaccctttaagcccgcatggccatttcagctggagtcctacatgacggagaacttcataatcgccgctttccggaagatgggcgaagatcccaccacggtgcgcctgatgcgcaacaagtacacgggcgaaccggccggctactgcttcgtcaacttcatatccgatgaccatgcgctggacgcgatgcacaagctaaacggtaagcccattccgggcaccaatcccattgtgcgattccgtcttaactcggccagcaactcgtacaagctgcccgggaatgaacgcgaatttagcgtctgggtgggcgacctcagctcggacgtggacgactatcagctgtacaaggtgttctccagcaagttcacatcgatcaaaaccgccaaggtgatcttggacagcctggggttttccaagggttacggctttgtgcgatttggcatcgaggatgagcagaaatcagcgctgtacgacatgaacgggtacatcggattgggtaccaagcccataaagatttgcaatgccgtgcccaaacccaaatccgagttgggtggtgctgtgggcgaaggcaacacaaactatggatatggaagcggtatgactgcagcaggtggcaccgactactcgcagtactacgaccccaccagcacctattggcagggataccaggcctggcaaggttactacgagcaggccggtgcttcgatcacagatgcggctgcatactaccagcaggccatgtcgcagtcgcactctaatccgcagactctggcccagcacgccgaggcctggagcgcacaacgcagcgcccagtacgagcagcagcagcagcagcagaccgcttccgccgccaatggagctgaggatgagaacggactggtggagcacaagttcgtcctggatgtggacaaactgaaccgagaggccattgatgccgaccgccgtctgtacgatgctctggagagctctaagtggctgcccattgagcagctggaagtcttttaggatacttatctactatatttatagcttactataattacagcttagatataagcaaaaaatataaaagcctgacttgtagcgtattattgtttttgagcctgctataaacttttatgctcctgaatctacatttcttaacaaaggattcaaaataaaggatacatttttacaaaatatccctaatatccttacaacagatgtattttatcgatatacagacggaatactattctgtccgtgtcatcgccatgtcggcctatcgactgtcgatagtttctgccttggcccgagactttcggagattgtgcagacaattgcggactaaataagcgttgaatcatgaagcgagcgcggcagccgaagattactacgcaggccctgctcgattttgacttgggcgagagttcctcggatagcgacttcctgccggacatcgacaactgctcggacggatcgaaggacgagagcgatggcgacggtagcagcagcgacgccagtggtggctccgattctgaatcggattcggatgcggagagcgaggattcaacactgcagctccggcagctgttggcggaaacggaaccgtcaccactggagaacgggatcaatggagtggaccactgcgcagcttcctccccggcagcaccagtagtgcctcgtgcgccacttcagctgtctagtgctccggccaagcggatgtgctgcgtctgcctgggcgaacgcagcgacgacgtcaacgagatcgtggagtgcgactcctgcggcgtatctgtccacgaaggatgctatggcgtcagcgacaacgtgagcatatccagtaccaactccacctgctcgacggaaccgtggttctgcgaggcctgtcgtgctggggtctcggaaccggactgcgagctgtgtcccaacaagggcggcatctacaaggagaccgacgtgggcaagtgggtgcacctcatctgcgctctgtatgtgcccggcgtggcctttggcgaagtggagc

SEQ ID NO: 38633 - DNA, 1083 bp, DROSOPHILA
agtcactcatttgttttggtaaacatcatttgtctctggaaaatattcaattgaacacgtatttgaacaattatggcgtccgtgcattgtcaactgtggatgggaagcctggagtcctacatgacggagaacttcataatcgccgctttccggaagatgggcgaagatcccaccacggtgcgcctgatgcgcaacaagtacacgggcgaaccggccggctactgcttcgtcaacttcatatccgatgaccatgcgctggacgcgatgcacaagctaaacggtaagcccattccgggcaccaatcccattgtgcgattccgtcttaactcggccagcaactcgtacaagctgcccgggaatgaacgcgaatttagcgtctgggtgggcgacctcagctcggacgtggacgactatcagctgtacaaggtgttctccagcaagttcacatcgatcaaaaccgccaaggtgatcttggacagcctggggttttccaagggttacggctttgtgcgatttggcatcgaggatgagcagaaatcagcgctgtacgacatgaacgggtacatcggattgggtaccaagcccataaagatttgcaatgccgtgcccaaacccaaatccgagttgggtggtgctgtgggcgaaggcaacacaaactatggatatggaagcggtatgactgcagcaggtggcaccgactactcgcagtactacgaccccaccagcacctattggcagggataccaggcctggcaaggttactacgagcaggccggtgcttcgatcacagatgcggctgcatactaccagcaggccatgtcgcagtcgcactctaatccgcagactctggcccagcacgccgaggcctggagcgcacaacgcagcgcccagtacgagcagcagcagcagcagcagaccgcttccgccgccaatggagctgaggatgagaacggactggtggagcacaagttcgtcctggatgtggacaaactgaaccgagaggccattgatgccgaccgccgtctgtacgatgctctggagagctctaagtggctgcccattgagcagctggaagtcttttag

SEQ ID NO: 38634 - protein, 320 aa, DROSOPHILA
MTENFIIAAFRKMGEDPTTVRLMRNKYTGEPAGYCFVNFISDDHALDAMHKLNGKPIPGTNPIVRFRLNSASNSYKLPGNEREFSVWVGDLSSDVDDYQLYKVFSSKFTSIKTAKVILDSLGFSKGYGFVRFGIEDEQKSALYDMNGYIGLGTKPIKICNAVPKPKSELGGAVGEGNTNYGYGSGMTAAGGTDYSQYYDPTSTYWQGYQAWQGYYEQAGASITDAAAYYQQAMSQSHSNPQTLAQHAEAWSAQRSAQYEQQQQQQTASAANGAEDENGLVEHKFVLDVDKLNREAIDADRRLYDALESSKWLPIEQLEVF

SEQ ID NO: 38635 - DNA, 3583 bp, DROSOPHILA
gaagttcgccgagctggagaaggagaagagcaccaaggctcccgtcatcgacttggttaaattcgtaagtttcgcccgaattccccatccagctacgcgaactctgctgccgctttcaacatgaagatacacccaaggcgatgggcggacagaatgctaccgtacaattgctctcaccgtgtagaggacagcctttcagatcaaagccagcagttcttgaagaggatgtgcacccgttctcaccccgttgtaacccattgtattgactctggtgtccttctcatgtctccacagggctactacaagctgctgggccgtggtcacctgcccgcccgccccgtcatcgtgaaggccaagtacttctctaagaaggctgaggacaagatcaagaaggccggcggtgtgtgcttgctgagcgcctaagttaaggtgagcttgtgtgtctagctgtcttacctattcgtcggcgaagcaatgaagtgcagtatcctaattgctattgtttcccttgcagattcctcctctacagaagaaaaaagcaagtggactacattcgaccatcaaaaatgtatttgttttttaataaatttaaaagaaaaacaagtatttgctattccgacaaaatgtgtttactaaaaggtattggggcttcattttctgctcgcttggcgcaagttgtttagaactttctatttctattcctgctacaactttcctttatatttttataaagaataatttctatatggttagtttgttgtggcaaaggaaaacttgtattttgaatcaaataacaagggcaaatttaaatgagtttgacaatattagaagtatgcctatttttgtaacttaagaggaacagtaataatataaagaaaataaatagtaatttaaagagtataactgcgtcggtgcgcattatcagttaatccctccatttttagcactattctcgactaggctttttgcgccttcgcagctacggtcacacagcggcgggcagaaagctcgcggaaaaattcggaagaggcggaaaagtacgagacgcccgatattgcaaaaagcggaagcagattacgtgtaggtcaaggccgtagggatgagggcaacttccatctttgaccttgctgttggtgatggggtgcggcgaccttgggtcaaggacacgaccgaacaagaggcaccgaatccaggaaacgtagtcaaagtggagggcatgcctgtgtgggcgggggatgttccagtaaaaacaaagtaacttgattatgacctctgtgttgcagttaggaaacgaacttgttgactttgtaacattacataatcggaagcccagagtgaggagaactgctgcgagatggccaacaaagtgctgcgaaaggtgacgcactgcgtcttcgacatggacggtctgctgctgggtgagtgctgccgtgcttgtatctgctttctgtgttaactatttgccgaacagacaccgaacgcctttatactgtggccaccgaaatgatcctcgagccctacggcaagacatatccctttgagatcaaggagcaggtcatgggcctgcagacggaaccgctggcccggttcatggtcgagcactacgagctgccgatgtcgtgggaggagtacgcacgccagcagcgcgccaacaccgagatcctgatgcggaacgcccagttgatgccaggtactaatcccagttctcgctttgccgtcacgtttcagacacggagaggatatacgaggaggtcacccggcaaatagccgcctcctttggccgcccgtatccggaggaagtgcgtttccgggtaatgggcaccacggaccagcgctcggcagagatagccatcaccgagtgccagctgcccatcacaaccggagactatctcaagcggtactcgcaaatgtgccacgagcgattccacaacgtacccctgctggaaggttagcaccacgaccagaaaactaatcggcatttctccctataaatacttctgcttcaattactatcctactgtgattaaagccgtttgttaatcgtgtgcttccttccccgttcaaggtgctgagcgcctgctgcgtcacctgcacgccaacaaggtacccttttgcttggccaccagctccggcgccgacatggtcgagctgaagacggcccaacatcgggagctgttctccctgtttaaccacaaggtgtgcggttcgtcggacaaggaggtggtcaacggcaagcctgcgcccgacattttcctagtggccgccggcagattcggtgtgccgcccaaaccgtccgactgcctggtgttcgaggactcgccgaacggcgtgacggctgccaacagcgccggaatgcaggtggtgatggtgccggacccacgactgtcccaggaaaagacctcgcacgccacacaagtgctggcctcgttggcggacttcaagccggagcagttcgggctgcccgccttcacggattgaacttaatggctgacgtactttttgtagctaaaagatgctattgctgtaattggaaatcgatgtacctaccaagaaaatgaatttaagtgtaaatgttatcccatatacacgtatacgtatgtgtgcataaagcatctggctttgcctttattttgcgcctaatctacatagttttccagcgtaagttctatttgccaaccgcttccaggtttttgtgtatgtcaggagcagcgtggttggccagggagagggacacttccttgccgttgcctgcggacatgggaatcgatgtgggggaagctagcagcgcacattatgctaatctactcaccatagcgggcgtagaggcggggctggacgccagagcactcgcgcacgaggatcggcaggtcgggattgctcttcttcaggtttggatagaacctttccacgtattccctgtaaaggaacgctgctttagcaaattatataatttaaaagcggaaaatgacaatttcacctgactcccttggaagtgtctcctttgggatccagaatgattcgcagctccttcagttttggagtaaaactggccaatcggaacagagtaatacccattttggcaccacttttgcgattttgaaatgttcaggaagtaagtctatttaaatgtcggtactacgcagggttgtcaaactgtcttggattacatattggtattattgttttttaaaaacaaattactttttggctcaaactaaaataacgtctaactcaccagagacgcgaaccattagttgcatcgtttgaatatccattccaaagacaagaaccaaggcaattgtcttggctgacaccaggtcagcatttgattggcccacatcgataaataccgataaatgcttgacggccagtcactcatttgttttggtaaacatcatttgtctctggaaaatattcaattgaacacgtatttgaacaattatggcgtccgtgcattgtcaactgtggatgggaagcgtaagtagcaacgtgcattaccccagacacatgaccctttaagcccgcatggccatttcagctggagtcctacatgacggagaacttcataatcgccgctttccgg

SEQ ID NO: 38636 - DNA, 952 bp, DROSOPHILA
cagaaagctcgcggaaaaattcggaagaggcggaaaagtacgagacgcccgatattgcaaaaagcggaagcagattacgtttaggaaacgaacttgttgactttgtaacattacataatcggaagcccagagtgaggagaactgctgcgagatggccaacaaagtgctgcgaaaggtgacgcactgcgtcttcgacatggacggtctgctgctggacaccgaacgcctttatactgtggccaccgaaatgatcctcgagccctacggcaagacatatccctttgagatcaaggagcaggtcatgggcctgcagacggaaccgctggcccggttcatggtcgagcactacgagctgccgatgtcgtgggaggagtacgcacgccagcagcgcgccaacaccgagatcctgatgcggaacgcccagttgatgccaggtgctgagcgcctgctgcgtcacctgcacgccaacaaggtacccttttgcttggccaccagctccggcgccgacatggtcgagctgaagacggcccaacatcgggagctgttctccctgtttaaccacaaggtgtgcggttcgtcggacaaggaggtggtcaacggcaagcctgcgcccgacattttcctagtggccgccggcagattcggtgtgccgcccaaaccgtccgactgcctggtgttcgaggactcgccgaacggcgtgacggctgccaacagcgccggaatgcaggtggtgatggtgccggacccacgactgtcccaggaaaagacctcgcacgccacacaagtgctggcctcgttggcggacttcaagccggagcagttcgggctgcccgccttcacggattgaacttaatggctgacgtactttttgtagctaaaagatgctattgctgtaattggaaatcgatgtacctaccaagaaaatgaatttaagtgtaaatgttatcccata

SEQ ID NO: 38637 - protein, 231 aa, DROSOPHILA
MANKVLRKVTHCVFDMDGLLLDTERLYTVATEMILEPYGKTYPFEIKEQVMGLQTEPLARFMVEHYELPMSWEEYARQQRANTEILMRNAQLMPGAERLLRHLHANKVPFCLATSSGADMVELKTAQHRELFSLFNHKVCGSSDKEVVNGKPAPDIFLVAAGRFGVPPKPSDCLVFEDSPNGVTAANSAGMQVVMVPDPRLSQEKTSHATQVLASLADFKPEQFGLPAFTD

SEQ ID NO: 38638 - DNA, 4353 bp, DROSOPHILA
gcattgccgtctagctgggtagtcgtctgattgagcagtcgcttgtgtaccttgtccttggatgactccagtttgttggcgctgttgtttagcagaagattatgcactggcctctgctccacataattcagatcctccgccgtgaagagggcgctctccttgtccatcttgttcgcatccgaaacgttgaccctcttctgctggtagagctccgccagcttgagactcagcgcgttcttgatgcactgttcccggaatgtgacggcatgcttgagataggagatgcacggcgcacatatgttgcgtggcagtccgtcgtccgtggagttctgcggtcggtcgaaagaggaggcactcatataaacatttatctggctactttagaatggagtcacttactttcaggcccgtcgtctcctccagcagaacgtttatgggcttttgccagttgagaaactcgtttgtggagccgtgcaaatacgtgggaatcttggcgaatatctcgtagtctgcggggctgctgcagatgcggcagatattgccccacgacgtcatacttatggcaaaccttaaacttaatgcttatgccggaaaaaataaacaatgacaattttcaacactccggcgagtgttgccctaccactgaaggttcaaaactcaacagtccacccacttgcggcagtgatgtccagttagctataacaggattacagcaaattttttgaatattaattattattagctaaacacgtgacagatatattaatgactaagacgatagtttatttaagcataaataatactgttgaaaatacaaacgtagatttatttgatatatatttacaaagctagattttattaacaccaattggcaacagtggccaacagtctgttaatgctcttgatctagctgaactcgggggtcacactggtgcccatctggaattgcataaacaaacctcgctactggaataaaatcacaaatatgtcgtttaatatcatgcaaaagctgaccatgcagtgcctgaaggcagaccagccgctgatgagtaaggacttcccacgaaccggttgcatattctaatcaattcaatcccatttagccaccgtgcgcaatgccagcaagaaaaccggcggaagtacgaggaataagaagggccatgcgaggcccaaacatcgcggatggcgcgtccaggatgggcaccacgtctccgagggcacaatactggccacccagctcacaacgcgctttcatccgggcctgaatgtgagtagcgcaggaaggagttatcccggcatatttttatactttttcccattgaaaggtgggctttggccgcaatggaacccttttcgccatggagcacggcaaggtttatgtgacctgcgaggccatcgatcccaactgggaccacacctggattcagcggaactacgccggtcgccagggccagaacatctacaagaagttcttcaatgttgtgcccgaaaatcagcatcagcgatttcgtctagtggaggaaatctagattgttaaatacaaaatttaaaccaaatggaaatgtgaatatttgaatttttggcaattaacatcgatgtgcttaacagcacctgttatatttacatgccagcacgaccgttatacagcactgtatttagcaatgctctgaaccaactatcgaatacacgccccgaatttgaaaagaaatccagttaatagccagatatcaatgcaacattttcgattattaatttcgcaaaactttttacattgcgaacttcaaaaacaaaaactacacttcccccttttttagccaagccgaacgctattgaactgtaaaatgaactttaataataagccataatcatctataagaaattataaaattatgcacatgacggtataggcactgcctacagaatttcgcttaaatcaagtacacgttttatcctatgaatgtaaaaacttatttagtattgttgtagtgaaattcaatttaacgcttatatatgcagtattatgtttaattattcatgattatatattttcataatgcatatagacttaaatttatcttaaatataatggtgtgtacgagatattttttcagactaaaatggtagttaggggtatatgttttctgtccggatggtatttcgtattttttgttatcgccgccgggcggtcacactgctacaaccgcagccaacttcgcttctttctttcctacaattttaaagatggtgagtggacgtcggtaaatgtggtgcacctaaaatgtggtttgtgggcaggcgaatgatgtggaatagaaataagagctcactcaaagtgccgcagcatgcctgcccactgactgcaatggccaagtgagcatagcgactggagcaagtaaacataacctccagcacgtgggtgaaaatgattgaggaatgctcaatgaaaacacgtttcttttctgctctcccttacagtcgaatatcaagcggaagaagaccaggaagctgcgtggtcatgtgagccacggtcacggccgtatcggcaagcaccgcaagcatcccggaggtcgcggtaacgctggtggcatgcaccatcaccgcatcaacttcgacaaataccatcctggttacttcggcaaggtgggcatgaggaacttccatctgcgtcgccagcacaagttcaggcccgagatcaacctggacaagctctggtccctggtcggagccgagaagttcgccgagctggagaaggagaagagcaccaaggctcccgtcatcgacttggttaaattcgtaagtttcgcccgaattccccatccagctacgcgaactctgctgccgctttcaacatgaagatacacccaaggcgatgggcggacagaatgctaccgtacaattgctctcaccgtgtagaggacagcctttcagatcaaagccagcagttcttgaagaggatgtgcacccgttctcaccccgttgtaacccattgtattgactctggtgtccttctcatgtctccacagggctactacaagctgctgggccgtggtcacctgcccgcccgccccgtcatcgtgaaggccaagtacttctctaagaaggctgaggacaagatcaagaaggccggcggtgtgtgcttgctgagcgcctaagttaaggtgagcttgtgtgtctagctgtcttacctattcgtcggcgaagcaatgaagtgcagtatcctaattgctattgtttcccttgcagattcctcctctacagaagaaaaaagcaagtggactacattcgaccatcaaaaatgtatttgttttttaataaatttaaaagaaaaacaagtatttgctattccgacaaaatgtgtttactaaaaggtattggggcttcattttctgctcgcttggcgcaagttgtttagaactttctatttctattcctgctacaactttcctttatatttttataaagaataatttctatatggttagtttgttgtggcaaaggaaaacttgtattttgaatcaaataacaagggcaaatttaaatgagtttgacaatattagaagtatgcctatttttgtaacttaagaggaacagtaataatataaagaaaataaatagtaatttaaagagtataactgcgtcggtgcgcattatcagttaatccctccatttttagcactattctcgactaggctttttgcgccttcgcagctacggtcacacagcggcgggcagaaagctcgcggaaaaattcggaagaggcggaaaagtacgagacgcccgatattgcaaaaagcggaagcagattacgtgtaggtcaaggccgtagggatgagggcaacttccatctttgaccttgctgttggtgatggggtgcggcgaccttgggtcaaggacacgaccgaacaagaggcaccgaatccaggaaacgtagtcaaagtggagggcatgcctgtgtgggcgggggatgttccagtaaaaacaaagtaacttgattatgacctctgtgttgcagttaggaaacgaacttgttgactttgtaacattacataatcggaagcccagagtgaggagaactgctgcgagatggccaacaaagtgctgcgaaaggtgacgcactgcgtcttcgacatggacggtctgctgctgggtgagtgctgccgtgcttgtatctgctttctgtgttaactatttgccgaacagacaccgaacgcctttatactgtggccaccgaaatgatcctcgagccctacggcaagacatatccctttgagatcaaggagcaggtcatgggcctgcagacggaaccgctggcccggttcatggtcgagcactacgagctgccgatgtcgtggg

SEQ ID NO: 38639 - DNA, 965 bp, DROSOPHILA
atgcaaaagctgaccatgcagtgcctgaaggcagaccagccgctgatgaccaccgtgcgcaatgccagcaagaaaaccggcggaagtacgaggaataagaagggccatgcgaggcccaaacatcgcggatggcgcgtccaggatgggcaccacgtctccgagggcacaatactggccacccagctcacaacgcgctttcatccgggcctgaatgtgggctttggccgcaatggaacccttttcgccatggagcacggcaaggtttatgtgacctgcgaggccatcgatcccaactgggaccacacctggattcagcggaactacgccggtcgccagggccagaacatctacaagaagttcttcaatgttgtgcccgaaaatcagcatcagcgatttcgtctatcgaatatcaagcggaagaagaccaggaagctgcgtggtcatgtgagccacggtcacggccgtatcggcaagcaccgcaagcatcccggaggtcgcggtaacgctggtggcatgcaccatcaccgcatcaacttcgacaaataccatcctggttacttcggcaaggtgggcatgaggaacttccatctgcgtcgccagcacaagttcaggcccgagatcaacctggacaagctctggtccctggtcggagccgagaagttcgccgagctggagaaggagaagagcaccaaggctcccgtcatcgacttggttaaattcggctactacaagctgctgggccgtggtcacctgcccgcccgccccgtcatcgtgaaggccaagtacttctctaagaaggctgaggacaagatcaagaaggccggcggtgtgtgcttgctgagcgcctaagttaagattcctcctctacagaagaaaaaagcaagtggactacattcgaccatcaaaaatgtatttgttttttaataaatttaaaagaaaaacaagtatttgctattccgacaaaa

SEQ ID NO: 38640 - protein, 282 aa, DROSOPHILA
MQKLTMQCLKADQPLMTTVRNASKKTGGSTRNKKGHARPKHRGWRVQDGHHVSEGTILATQLTTRFHPGLNVGFGRNGTLFAMEHGKVYVTCEAIDPNWDHTWIQRNYAGRQGQNIYKKFFNVVPENQHQRFRLSNIKRKKTRKLRGHVSHGHGRIGKHRKHPGGRGNAGGMHHHRINFDKYHPGYFGKVGMRNFHLRRQHKFRPEINLDKLWSLVGAEKFAELEKEKSTKAPVIDLVKFGYYKLLGRGHLPARPVIVKAKYFSKKAEDKIKKAGGVCLLSA

SEQ ID NO: 38641 - DNA, 3156 bp, DROSOPHILA
tcgccacgtttgacctcgaatccggtgcactgcgcgatcatctcggcaatggaaactctggttcttcgtctggcgtcaaatatgttaacgagtttaccagaaatatccatacaaactcggcatatttccgccattatccctgtaataaacaatacttattaggctgaactttatgaaggactatattacttacctgatgtatatactaaatagcttatagctggaaaagcaatcttttataatttaggaatccgtttcatacatcccaattaattgaaaattaatgcgattgccttgatgaacaattcaaaataataataagctaaacttcacattgtgcacagtacactgggcaccctattctctgggccatatgctaaatcgatttattatcgatgttcgaaattcaaattatttatcaaaatgatgatttttgaaactaaggtgtgtttaccatatttaacagctgagataaacgcaaacttgcaagggtcgccctgtggtggtcagcccaagttttgatgggaaaattcttatcggatatcgatatcctttacctgttgaagaatataaaattgaaataaatttctttggaaaaacaaacatttatcttcgtatagttttttcacattttcgcctagctagtggtgaataattttggacagaaggagcactggactttttccgtggaaatcatagaaaaattaaattaaaaaggcacaaaaaggaaatgaatctcctcgccgaacttctttgccagtataaaaataaattcacatatgaaaaatcgggttcctgggtgccactgaatatgtttatccatcgattccgggctcagattaccaccattgacctgaaattaaataagcattacttactccaaataaaatataaacaaacaagtgcgtaccttttttgtttacaattttaacagctgatgagtgaagtgctgttaacctttcatagttatcgataatctgttattattatcggaatattgctcacttgctaaggattccatgaaatttaaacaaatggactttgtgacgacaactggggagggaagttttctgcgaaacaagattcgtgcatatgccaaggatcaccgtgttgagtgccgcataaaggcgaaagactcattgcgcattggacttggacaggttaagcaggaagtggcggctcttgagatgggcaccaaggacgtcattggaatggccagcaggatcaagcgtcgcaagcacgccacctccgaggatctgtgccgcttgtcgctggggttcctccagagcaatgacaacatcaatgcattcgcagctattcctggcgccattcaggttctggttaaggagctaactggtaaccaactgcaccctcattagctttagttttatataaaaaggttgacttgactttcaggacctcacattcaacgacagacagatgccgtggagtgcttgtgtaatctttccttgggcgaggcccatgtctccgaaaagattgtcactttggcgggcagctacatggtcacctaccttgatggcaaggccgaacgcctcaagcgcagttgcctgtggacactggccaacgttctgggcacatgcgacaaggccggcagcgtattgctgcaaatgcaaatagtacccaagctgtggaggctctacatcgagcccaatggctgccaagaagatgcggccatctgcctctccctggtggccacccgctgcccgcagcatgtgagtgacgaggatcgaaggtacattggccagaatctgcctgagaagctccacggccagcctgccagcgagtacttcatgtacatagtgcaccaactggaaatagtgacacaggagcacaagttagatgctcaacaggccgaatgcctggtgcgtttctttgaagccaccttagcatcgccagccgaccggctgtgcctaatctacgccgtgcgtgtaatgaccaatctggtagccctaggtgacacaagtctaatattcgcactggcagacccgcagaatcttgtgcaaaccctaaaccagctcttcgctctgcgagatccagatctcaacctggacgcgatgcgcttgctcaagaactgtctgcacttgaaggtagcagattccaacctggtactgaatagcttgcaaatatacgcataggcttatggttaagaataagtcttgcaaatctctttattggtcttagagtacatataaatataaagccacggacttttgagtactcgagaatgtattgtaaatgaacatggattgccgctaagcaaaactaaatcactaatggaaacagaataaaataaataaataataaataaatacaatacgacaaaaacacagatgcaaagtggtcaacatgattactagtttgattgagccaccggcatgaaaaacaggactttgtaaaacctaaatatcatcctcgaagagggcgattatttgacgccttttggcttcgtcgtcggcgttcagttcattgcccctgtgggcattgtggttgtgcacctccagttcggagactgagtcaaattctaaattgcactgcccgcagcgggctgagaaaacgggcgctggaccctgcgaaactgtgccaggagagacagcggcccgttgcagcttctcgaggaacgtggctctctccctgtgcttgtccagcccgattcccagcgccgcctttccgcgaatgggaatgggttttttcaccgtcggcgtgccctgggaatggcaactttcagagcgctcaatggcgtacagcacgttgttctcctccgtgatcggagtcgtcgttccgctggcacagtcgaatagagatggttcctgcaccggccggggatcgggtatatctatgggaattggcggctcagctatcttctcaccgttggacaccttcacctgattgagcttctcggccagaagcgagtctatggaatgttcctgcagccaggcgcaagttttgtgcagagcgaatatcatgcggcggatgaactcgtgcggcgagaccattttctgtcgcctaatctcgagcaacttggtcacctcggtaacaaacgtgacgaactggtattcgacgcagttgtccagatgcgactgatgcgagtcctcgaacatgaagcgtttggagcatgccggacacttgcgctccttc

SEQ ID NO: 38642 - DNA, 1096 bp, DROSOPHILA
ctcacttgctaaggattccatgaaatttaaacaaatggactttgtgacgacaactggggagggaagttttctgcgaaacaagattcgtgcatatgccaaggatcaccgtgttgagtgccgcataaaggcgaaagactcattgcgcattggacttggacaggttaagcaggaagtggcggctcttgagatgggcaccaaggacgtcattggaatggccagcaggatcaagcgtcgcaagcacgccacctccgaggatctgtgccgcttgtcgctggggttcctccagagcaatgacaacatcaatgcattcgcagctattcctggcgccattcaggttctggttaaggagctaactggacctcacattcaacgacagacagatgccgtggagtgcttgtgtaatctttccttgggcgaggcccatgtctccgaaaagattgtcactttggcgggcagctacatggtcacctaccttgatggcaaggccgaacgcctcaagcgcagttgcctgtggacactggccaacgttctgggcacatgcgacaaggccggcagcgtattgctgcaaatgcaaatagtacccaagctgtggaggctctacatcgagcccaatggctgccaagaagatgcggccatctgcctctccctggtggccacccgctgcccgcagcatgtgagtgacgaggatcgaaggtacattggccagaatctgcctgagaagctccacggccagcctgccagcgagtacttcatgtacatagtgcaccaactggaaatagtgacacaggagcacaagttagatgctcaacaggccgaatgcctggtgcgtttctttgaagccaccttagcatcgccagccgaccggctgtgcctaatctacgccgtgcgtgtaatgaccaatctggtagccctaggtgacacaagtctaatattcgcactggcagacccgcagaatcttgtgcaaaccctaaaccagctcttcgctctgcgagatccagatctcaacctggacgcgatgcgcttgctcaagaactgtctgcacttgaaggtagcagattccaacctggtactgaatagcttgcaaatatacgcatag

SEQ ID NO: 38643 - protein, 353 aa, DROSOPHILA
MDFVTTTGEGSFLRNKIRAYAKDHRVECRIKAKDSLRIGLGQVKQEVAALEMGTKDVIGMASRIKRRKHATSEDLCRLSLGFLQSNDNINAFAAIPGAIQVLVKELTGPHIQRQTDAVECLCNLSLGEAHVSEKIVTLAGSYMVTYLDGKAERLKRSCLWTLANVLGTCDKAGSVLLQMQIVPKLWRLYIEPNGCQEDAAICLSLVATRCPQHVSDEDRRYIGQNLPEKLHGQPASEYFMYIVHQLEIVTQEHKLDAQQAECLVRFFEATLASPADRLCLIYAVRVMTNLVALGDTSLIFALADPQNLVQTLNQLFALRDPDLNLDAMRLLKNCLHLKVADSNLVLNSLQIYA

SEQ ID NO: 38644 - DNA, 10925 bp, DROSOPHILA
tcagacacgtacacaaagagacagaatttgtaaataatacacaggcaaactctatggtatttttaaatagcgcattattgtgtataggtttctgcacctcgactcccaaatccgaactaaatcgcaggctaaccctaacccatgccaggcataaaattattttcttaattccatagccaatatgcatatgcaagcaagtgcacaaactagcaaccgcctcgttcacaattaccacacacttttatttttcttcacaagaaccgcttcaaaatcgtaccctaaatagagttatattgaacatagacaaaacttttgcactggcagcaaatataaatgagaaaataataatgaataagaatggctcttattgtaaaaagaaagcaatagttaaattgtacttataaaacgtgtatttaataacgagaaacgaacataattgtaatcgcttattataaactaataaataaataaataaataaatataaatcaacaatcagtttgattgcgtacttaattaaattaagtattccgccagcattccacttgcactcgtcttgaatctggccatttaggcgattcaagtggtcacaaatgtgtcgcaaattgtagcttcttcttggtggccagataatccgcattaatatgccagcattttggggagcgggaacaagcctaacccgtagtgcttctcaagacagtccccacttataatactggatccgctctccgacagagagatatctggtcgggccagatatgggtagagcggcgagatatagccggccatacacaaaacacagatactctatgcatatgtgtatgtatgtgttgtggagagcgagagcggatcgggtttgtggtatgtggtatgccgcagcagcggtcgcaagtgcaaacgatattcgcacacggtgattggatcagttgacatttgacggcgcgcgtgttggcacgttttcggggcctcttccacggactcatggttaatccattgggtcgtcgaaagtgccgtacgcaaaattgagcacctcgcactacactgggcattaagtatacgcggcgttatcttgatccgctcgattgccgttgtcgggtaatttgatgtgcgttgattgttctattacgtttattatgattgaaattgggcattattcggcggatgaatgaatgagaagcaccatagtcgaatctaaattaaactgcaggaacaagtgaattaaagtgaataaaattaccattattagtgtcgatcgctgtcgctccgattgccatcattaaagtgtgtgattatcttttcggtctaggtgttaaaaatgtttgttttctcttcgagtgcagcaaaacccgcatttaatggctgtttgttgggggcagcaactgggcaaacaaacatgttgtataatggggaatttagcactggatgggcacagctttcattagcatgtcggagtgctaatttggttttatagttcagtacgatactggggaatgtgcccggaatagaacatctgttgatgccgcagctttctacagacggtttacgacttacaatgaggtacaggtgtcttatacgatgtcacactgtttcccaagtaagcaattaccaaaacacttctcagggcttagctttctcagcatcagcagtaaagcgaattgaattcacacatcgcaccataagtgatttatcgcccgacaaaggtaatcaatcaggttttttttttttggtgtgagggcttgaacgaaagccccaaatagccaacagttgatattttaagaaacttactctactcgtacacagttatgtaaatacaattggaatgttttcgagctcagtttaatcggtttttattcgttcctcgcgctctggctaaaaatttacatttttactacttgagtgtggctgattttcatattacaacgaaaccccctagcgtgccatgatatatgatatgtgtacggcaagatgcgtaattattaattacggcacagttgagccagcacgctgacctttcgtggtctgctgctgaccggagagtcactggagcagatcgcgtgccaatgacgtagtgcctctgtttcctcctcactccaaaactttcaaattcaaagagcccgatatggtcaaaagcttcaatcgaagtcaacgaaacgaaagcagtccgagaaatgctttccaagaaggcgaccgtgagaggtgggcgacgtagtcgggtgcaaccttttagggccacatcgccgataagatacaaatttgtatctgtagcgtcaagtgcgacttgctgttcacctgtgtgcggctgaagagctcgagctggtttatctgtggcggtgataaaatataacaaaaaatgggacaaaacttcagattgtttgtttatataaacaaatacgagaaaaatatatgaagtgtgcgtaaaaaggtaaagaagaaatcagtcagttttataggtgcacgctgagttgggaaagtgataacaatttgcggagtaggcagacaataaacacctaaataaaatattattaaacggttaaagagcaactttcaagaaagtaatcacctctattaaagcaaataaagataactcgtgctggctttcacatgatttagtttattttgatttaaaagctcaaactcacacggccagcagcagcaacattgtgcaactcaaggtttaaatgtgatttaaaattgtgtcaaccagtaaccgcaatcgcagattgcgaccattcaaaatgatagatatgaaagcggccccagcatcagcgaaccagtgcgaaatccaacaacagtcgtcgttcaaaatggttttatgatatagcgactagcgaatagcaactagcaacaagcaacctgcaactatcaacacatcaactggcaacttgcaacacatcaagtgtcaactagcaacacggctacagcagccacacgaatttcccacagagaggctctgcccctcaaccttccaaatggcggagaacaaagacgtcagccaggtgctaaacaccacacccgaccaggtggtcatcaatcgtgccccgcccaccggactagcgcccttgaggcacagccaactctctgatagcggagcggagagctgctacgagggcgatgagcaggcacggctcatccggtcctcatcgtcgcgggcgcacaagttcatcataataccggccacgccaggaacaccgccgggaagcggtgcggtagcaggaccacttccctttcgccagaccagctcaaccacatcgctggcggccatggcagctgcgctgcacaaacagtctccactgcgccatacatcggtgcgaaccaggcccagttcggaggtattgcaaccgggccaggtgctcgccaatcagccaacggcagctgtatccacctccacggtgaccttcaccattgacgactgcaatgaagaaggcgatgccattcctgctgcagcttcagttccagctcccgtgaccatgcccgccatctcacccacgccggccaccttgacctgcaccaccaccaccaccatggccggtgattcggtggccgtctcgccgctcagcatggagctgaagtcgcggttaggcagccatcacagcagcatgcgctccgtagtctcaggttggtgaccctcaaaccctcgcccccatattgcatttccaagtgctcgtatgtaattgcttgtactcaattgctttgattggtaacgcctcttaatcttttaattacaagaaatacttgaacaggctgttgataatgttgtcccactaataattaaatgtctgcctataattgcttcataataagctatataaatggcatagctagcaaatttagtctaaattaaccatagtatgattttaatgaaagcagtttctagaattattgattatgatattgataggcaatgaagttccatagaatatattttacctgttactattataatgcgcttatcattccaaatcccctgcaggttatcttccaggcctgagcgacagtagcggcaatctggttggaggcgtatcgatggccacttccggattacaggcccccaatccgctctacatgcaaccacaggcctcgctgagcggcagttcctatcatttccacgaactggccggcaaccagatctactccgatgtgacctccgttcgctcgctggcctccattggcattgggtcgacggatgggcgcaagctggtcatccggcgagtgcccaccaccgccaacgagctgttcgacatggtcaatccgcagacgccaccgtaagtgtttattgaaacgggaattcttcataatcagtactcagtactcagcctcgaagtaaagaaacgcgctttatttcaaatcattttactattgaaatttgtgtaagcagtttctctctgtgtatagttagggccattaacttgacaaaggggcggcgataaaacgatctaacatttgtggcaaatttggccagcatttggcaccttagcatagaataacattgttgagcatttggcaaacaggagattttaacacccttgtggcatctttgggcgcggggtccacatgattgcccaccgtccccgaaacgtgccgatctcgcatcagctatttttaagcaacgttccttaacgagatcaatagatcggttcgatcggttttgtgatttatctgtttgtgttgaccagaccaattaccactccccattgtgtgctccataaacaccgggattgcggccgaaacccggctgaaaattgccggatttgtagtcagtagcgcgctaacccacaaaccgatcagttgccactcccagtttccaccagtgcccgcgtctcctgatccatggataccttcatagttcaaaggctgcactagaagtaactcctgaataaaagattagaataagccaaaggagtaagccaaggtcgagatgccgaaccgccaggactacgatgcacagtcctcgaagcactcggaacagtccttcttccgcttcaaccgggtggccaaagtgtaagagcccaggggaaaaattccagttgcataacgtctcgaatcaggccattaaatggtgatcgtgtgatttgtttgccataagcattagcgataaagcgctgattaaacctgaatgattgctggattgttaagtagactgtttatatccgacttagcactattccacaaaggatagtaaatatacgttttttttttcaatatctgcctatatatagtgctactgtgctacttacaaagtgttgatgtatcaagagtttttgagataatttcattttcagacacactttatatacaagcttaataatatgtaattttcattataccgggcaatttgctgaacagaaactaggatatagatttacgggtctattattaagatgaacttatcattaaatgttaaatgtcattaaattcgatatagctaaacacatattaaaagagccgtgttgtcgacatgcgaacgcacaactgcatgttttcattatttccccgatttaatcaaaacactcaaatggtgaaaaaactgacacgaaaggctgtttaaatcggcgacacctccacccacaccagcaattgcccagcattcagcagccatccatgacacgatcagatcaccggatcagattctcgtcggcgggcacaatgcaacgccagttggcacctccaatggaatggccagcccccagttggtgcttttggatccgtgtgattactgcaattaagccatttgacgcataaactaatttatatggttatttctgaatcctcctcctccttctctttttagacccctgggggtggatgacgatgacagctacctggacatgtccgatgagacggcccagctcaagccgcgccagcagcactgggccaataagatgcaattcgtcctggcctgcataggatactcggtgggtctgggcaacgtctggcgttttccgtacatgtgctacaagagtggcggtggtaagttcttatggttataaattgaataacattaaggtagcatttacgataagattatgttggtgatttctatagatatattatgagattttattctttatttaattaataatttgactgagctatacttgcacaatactatttatacgcttatctactgcctccgaaaaagatctgcggttcaattgggaattaagaaaggggtcagtcgtaggcaattcagagattttccggggaacgctggtgggcggaagtgcctcgtgagagtccagcaagtgactaagagtgccgccaaaaaaaaaacctgcacatgcgataaggcagatatagagatagttactttgattttgtgcgacggctccgggaagatatgggggtttagttgtttattttagttgctctaaaaaacatttgacaattttgcactttaagcggcatttccgctgaagcgtttaaaagccataaattaaaatttgtttaagcgcagagcagcgggaacagagaatagagcggtcactgtcatcatttggccggtgtttctcgatcacgcgagctcggaggctcgcgtccatcttcatttgcacttggagacgagaagctgggcccctacttagctaccccgtttctcgaggggatcgggcatgaaaatgggggcgtaatgagctggtgtgacagtagagaaacgggcacacgaccttctgctaatgacgcgtataacgatagacagtagttttatgccatttgcatttgcctatgtcaaatatttataattaatttaaattatttgcttagctgctctcgtccatggctaaacgtacatatgtaaatgttttgttattcgttgcttacaggtgtttttctagtaccttattgcataatactgttcatatgcagcattccgctgctcttcatggagctgtccgttggccaatacaccggtcgaggacccattggagcactgggtcaactgtgtcctctgttcaagggtgagtaaaagtttaaagctcaattttttatcattaaagttagttatcattggactaaaatatcaactttatttatatctcgctcttaagtacaacaccgcatacgagtcgtatacgtaataattatcaatattacgcatgcagcctgttgtcaagtccaacgctatattctataaatattcttataaatcttatagacgatttaaaacattttctactattattatacataatttgcaaactcctatttgggatcgaacctattgtaatttgcaaatgcgtcatgcttttcatatctttgaaaaccccccatcaaaacaattgaaagccaggcttgcccaaccaccatgacaaacataaaagagggctcttggatattatcaagtccatggccaaggtcaatcacatatttagccagcttgtcgagctctattttgcgttgtgatttacacctggtatctggtaatcacaaccgtagccagacctctcattccgatgctccacttccattcgggcggaagctaattagctgggccattgtgttgtggaggtggcgtgaaaacccgaagccaagccgcgggaaaatgctcccatcccccatgccaccagatccacaggccaccaagatcgtcattactgcatacaatgcatttagctgtttttgccgttgccaaacgcttaattactgtcaatattttgcaaacaaaccacgcccacgcagaggcaagctaataaatattaataacgtgtaaaaactatttaaccaagattggcgagcgacttcgaacggatccaattgtcgccgtatgaggccggcacatggccaattatgcagatgagtgccagtctagacatgtgattccatacgaaaccggtccgactatcatctggcctaattaagtctaatttttgtgtatgcttagctcattgcaattggcgttgccataaagttgagctgcatctggagattcccgactgatttgagtgaacgcagtaacttatcgctggcttcttctctgccttctcaggagccggactcgccagcgtggtcgtctcgttcctcatgtccacctactatagtgtcatcataggctactccatctactacttctttacgtcgttcaaaacggaaatgccctggatcgactgcaacaacaggtgggttttgtatatatcctattattttatggttccttcttatatggattttcatacatgacttccaggtggaacacgcccgattgctgggtgccacagcgcaaggggattaatgccagtgcgccggacacatctcgcactccatccgaggaattcttcgagtaacttatagcataataatgagtatagccttacattgatattttcccttccaaagaaacaaggtcctgcagatcagcggtggcctggagtatccgggcatgatgcgctgggagctatttgcctgcctgatctgcgcctggctaatggtctacttcgccacgtggaagtcgatcaagtcgtcggcgaaggtgcgctacttcacggccacgtttccgttcgtgctgatcatcatcctgatggtgcgcgcggtgaccctggatggagctgctgagggtttgcgcttcttcttccgtcccaagtggtcggagctgaagaacgccaatgtgtggatcaacgccgcatcccagaacttcaactcgctgggcattacattcggatccatgatctcctttgccagctacaacaagtacaacaacaatatcctgcgagataccgtggcagtgagtgcggtgaatatgatcaccagtctcctggtgggcatctttgccttctccacgctgggcaatctggcgctggagcagaacaccaatgtgagggacgtcatcggtgatggaccgggcatgatattcgtggtgtatccccaggcgatggctaagatgccgtacgctcagctctgggcggtcatgttcttcttcatgctgctctgcctaggtctgaactcgcagtttgccattgtggaggttgtggtcacgtccatacaggatggctttccgcggtggatcaagcggcacctgggctatcacgaaatcgtggtcctgttcgtctgtgtcatctcatgtctcttcgggatgcccaacatcatacagggtggcatctactacttccagctaatggatcactacgccgcctccgtgacgatcatgtttctggccttctgtcaaatgattgccattgcctggttctacggcacgggaagactgtcgaagaacgtcaagcaaatgaccggaaaggcgccttcgttctatctcagatcctgctggctagtcctgggaccctgcctcctctttgtaagtcatcccatggctaaactttgtagaattaatctaaaagcatttaatttttgcgaacgcaggccatctgggtattgagtctgatcaactaccacgagcccacctaccacaatggacgctatacctatccggactgggcctacggaataggctggatgttcgcttcattctcgctgatctgcatacctggatatgcggttatcaacttcctgcgctccagtggagataccttttgggaagtatgttgctgctagcattttcctatgccacattattaacccgatgttgaactcatttcgcagcgcatccggaacacgctgagacccaacatctacgagtgcaagatttgcggggaacaccactgcgaacacgactatccggagcaggagcagtttatgctggcccaggaaatggccacagtgtacaagcccaccaacccacacctgctcaatctcggccagaagtgcggctacaacgccatgcaagcctcaccctcacatgcggaggcaggaggaccatgtggccagtagctgttaggaacctctcccaacaatagccatttccgagtatttttaacgaatcacttgtgtaagttaaatgcagaaattaaagtatttaaataaattctagagcgagacattggattagcgatgttatttaacttaatataatatataatatattttgggaaaacaaactaaaatatcaattgacattacatatcagtgactacagcttttgcacatattgatagagtacatcgaattcctccagtttgggcacagcattaaaggtgcttcgagtgcgacagtactcggcatagatagttagactcttgcgaggaacgaccggcggacgcacgctgagataggagtcggtgccgtagtcactgagtggacgcagggtaatgccacgcataatcttggccagctcctgatcgcgctgagcaacggctgtctgagccggcctcgcacctccactggacagcttgcccatctgcacgtacttcttataaacagccatgctctgcttggagggcggattgatggtgcacccatagatttcctccatcgagggcagtcctgtggccagagtggcggcggctggttcggtcgattccgtctggtttgcctccttctcggcaaaacttgcacttaactcctcgtcactggagctatcgtcaccttcgctggaacttgaggaattgctattcatagaacccgtggaactttgccccgtcatcgagggattttgacgagcctttcgcgatgtctggatttgcctctggaacggactgaaattagtgcggaatgtgggcatgtatcgcagtgccagctggctgatctcgaacgcaatgtgctcgctgaaatcagtccacttgaaggactgatgatagtttgagtaggcatcgatcatttccaggccgctgctgtgaacgcgaaacagctccttgaccagtttgttggagtccgcacacgaatagggtaggcacgcgcgaaccttgtggcgcacccaatcggtgatggccttgctatccgctctcggcacgaatgcgttgtgcatgtcgtagtccgtctgtagctcccaaatgggtggaccctctgcgtgaaaattgtattaaataatttaatttaaatattaaag

SEQ ID NO: 38645 - DNA, 3566 bp, DROSOPHILA
cgaaagtgccgtacgcaaaattgagcacctcgcactacactgggcattaagtatacgcggcgttatcttgatccgctcgattgccgttgtcgggtaatttgatgtgcgttgattgttctattacgtttattatgattgaaattgggcattattcggcggatgaatgaatgagaagcaccatagtcgaatctaaattaaactgcaggaacaagtgaattaaagtgaataaaattaccattattagtgtcgatcgctgtcgctccgattgccatcattaaactcaaactcacacggccagcagcagcaacattgtgcaactcaaggtttaaatgtgatttaaaattgtgtcaaccagtaaccgcaatcgcagattgcgaccattcaaaatgatagatatgaaagcggccccagcatcagcgaaccagtgcgaaatccaacaacagtcgtcgttcaaaatggttttatgatatagcgactagcgaatagcaactagcaacaagcaacctgcaactatcaacacatcaactggcaacttgcaacacatcaagtgtcaactagcaacacggctacagcagccacacgaatttcccacagagaggctctgcccctcaaccttccaaatggcggagaacaaagacgtcagccaggtgctaaacaccacacccgaccaggtggtcatcaatcgtgccccgcccaccggactagcgcccttgaggcacagccaactctctgatagcggagcggagagctgctacgagggcgatgagcaggcacggctcatccggtcctcatcgtcgcgggcgcacaagttcatcataataccggccacgccaggaacaccgccgggaagcggtgcggtagcaggaccacttccctttcgccagaccagctcaaccacatcgctggcggccatggcagctgcgctgcacaaacagtctccactgcgccatacatcggtgcgaaccaggcccagttcggaggtattgcaaccgggccaggtgctcgccaatcagccaacggcagctgtatccacctccacggtgaccttcaccattgacgactgcaatgaagaaggcgatgccattcctgctgcagcttcagttccagctcccgtgaccatgcccgccatctcacccacgccggccaccttgacctgcaccaccaccaccaccatggccggtgattcggtggccgtctcgccgctcagcatggagctgaagtcgcggttaggcagccatcacagcagcatgcgctccgtagtctcaggttatcttccaggcctgagcgacagtagcggcaatctggttggaggcgtatcgatggccacttccggattacaggcccccaatccgctctacatgcaaccacaggcctcgctgagcggcagttcctatcatttccacgaactggccggcaaccagatctactccgatgtgacctccgttcgctcgctggcctccattggcattgggtcgacggatgggcgcaagctggtcatccggcgagtgcccaccaccgccaacgagctgttcgacatggtcaatccgcagacgccaccacccctgggggtggatgacgatgacagctacctggacatgtccgatgagacggcccagctcaagccgcgccagcagcactgggccaataagatgcaattcgtcctggcctgcataggatactcggtgggtctgggcaacgtctggcgttttccgtacatgtgctacaagagtggcggtggtgtttttctagtaccttattgcataatactgttcatatgcagcattccgctgctcttcatggagctgtccgttggccaatacaccggtcgaggacccattggagcactgggtcaactgtgtcctctgttcaagggagccggactcgccagcgtggtcgtctcgttcctcatgtccacctactatagtgtcatcataggctactccatctactacttctttacgtcgttcaaaacggaaatgccctggatcgactgcaacaacaggtggaacacgcccgattgctgggtgccacagcgcaaggggattaatgccagtgcgccggacacatctcgcactccatccgaggaattcttcgaaaacaaggtcctgcagatcagcggtggcctggagtatccgggcatgatgcgctgggagctatttgcctgcctgatctgcgcctggctaatggtctacttcgccacgtggaagtcgatcaagtcgtcggcgaaggtgcgctacttcacggccacgtttccgttcgtgctgatcatcatcctgatggtgcgcgcggtgaccctggatggagctgctgagggtttgcgcttcttcttccgtcccaagtggtcggagctgaagaacgccaatgtgtggatcaacgccgcatcccagaacttcaactcgctgggcattacattcggatccatgatctcctttgccagctacaacaagtacaacaacaatatcctgcgagataccgtggcagtgagtgcggtgaatatgatcaccagtctcctggtgggcatctttgccttctccacgctgggcaatctggcgctggagcagaacaccaatgtgagggacgtcatcggtgatggaccgggcatgatattcgtggtgtatccccaggcgatggctaagatgccgtacgctcagctctgggcggtcatgttcttcttcatgctgctctgcctaggtctgaactcgcagtttgccattgtggaggttgtggtcacgtccatacaggatggctttccgcggtggatcaagcggcacctgggctatcacgaaatcgtggtcctgttcgtctgtgtcatctcatgtctcttcgggatgcccaacatcatacagggtggcatctactacttccagctaatggatcactacgccgcctccgtgacgatcatgtttctggccttctgtcaaatgattgccattgcctggttctacggcacgggaagactgtcgaagaacgtcaagcaaatgaccggaaaggcgccttcgttctatctcagatcctgctggctagtcctgggaccctgcctcctctttgccatctgggtattgagtctgatcaactaccacgagcccacctaccacaatggacgctatacctatccggactgggcctacggaataggctggatgttcgcttcattctcgctgatctgcatacctggatatgcggttatcaacttcctgcgctccagtggagataccttttgggaacgcatccggaacacgctgagacccaacatctacgagtgcaagatttgcggggaacaccactgcgaacacgactatccggagcaggagcagtttatgctggcccaggaaatggccacagtgtacaagcccaccaacccacacctgctcaatctcggccagaagtgcggctacaacgccatgcaagcctcaccctcacatgcggaggcaggaggaccatgtggccagtagctgttaggaacctctcccaacaatagccatttccgagtatttttaacgaatcacttgtgtaagttaaatgcagaaattaaagtatttaaataaattctagagcgagacattgga

SEQ ID NO: 38646 - protein, 943 aa, DROSOPHILA
MAENKDVSQVLNTTPDQVVINRAPPTGLAPLRHSQLSDSGAESCYEGDEQARLIRSSSSRAHKFIIIPATPGTPPGSGAVAGPLPFRQTSSTTSLAAMAAALHKQSPLRHTSVRTRPSSEVLQPGQVLANQPTAAVSTSTVTFTIDDCNEEGDAIPAAASVPAPVTMPAISPTPATLTCTTTTTMAGDSVAVSPLSMELKSRLGSHHSSMRSVVSGYLPGLSDSSGNLVGGVSMATSGLQAPNPLYMQPQASLSGSSYHFHELAGNQIYSDVTSVRSLASIGIGSTDGRKLVIRRVPTTANELFDMVNPQTPPPLGVDDDDSYLDMSDETAQLKPRQQHWANKMQFVLACIGYSVGLGNVWRFPYMCYKSGGGVFLVPYCIILFICSIPLLFMELSVGQYTGRGPIGALGQLCPLFKGAGLASVVVSFLMSTYYSVIIGYSIYYFFTSFKTEMPWIDCNNRWNTPDCWVPQRKGINASAPDTSRTPSEEFFENKVLQISGGLEYPGMMRWELFACLICAWLMVYFATWKSIKSSAKVRYFTATFPFVLIIILMVRAVTLDGAAEGLRFFFRPKWSELKNANVWINAASQNFNSLGITFGSMISFASYNKYNNNILRDTVAVSAVNMITSLLVGIFAFSTLGNLALEQNTNVRDVIGDGPGMIFVVYPQAMAKMPYAQLWAVMFFFMLLCLGLNSQFAIVEVVVTSIQDGFPRWIKRHLGYHEIVVLFVCVISCLFGMPNIIQGGIYYFQLMDHYAASVTIMFLAFCQMIAIAWFYGTGRLSKNVKQMTGKAPSFYLRSCWLVLGPCLLFAIWVLSLINYHEPTYHNGRYTYPDWAYGIGWMFASFSLICIPGYAVINFLRSSGDTFWERIRNTLRPNIYECKICGEHHCEHDYPEQEQFMLAQEMATVYKPTNPHLLNLGQKCGYNAMQASPSHAEAGGPCGQ

SEQ ID NO: 38647 - DNA, 3476 bp, DROSOPHILA
aatttaaccattctacttcgatttggattcttgctttaatataattttttcagatataaagttttgtttcttcaaattatatttttatgtatatatcacgtgtcttagcttagcactataaaataaacacaagtatagccacagactgtacgatataggacattttcagatatttgaagagtatgataactaccaaattcattttcctatcacacctaatttcatgagagcaaatacttttacggaaaaaaaaatccagttgctaaatttttcatttcgcccaacaaggatgtaaaaacacatgtttgcaacacatttgccgcaggatactttaatcctatggcaccgtgccaatttgtacaagacaacattttacatactattcactctgcgagtaacgtgtataaatagaaaattactattttacacatatgtatgtacatacatatagaaaaccaattagttgacttataatatttagtcttggtgctacttgaataaataaataaattctttgctaagcaaagcaaatacttacagcaaatcgtgtaagttccgctcaattcgtcgacgggatgagcttagtgagcggcgccctttggcctcgacaaggtcacgactgaacccaatcaagcgccgccgtccgagccggggtcgagagtcaagcgacaaaaaaaaaaacaaacgataaaaaaaaaataagcaatgaccagaggcgctaacaagtttcaggtggctccaaaaggtgaattctcccgctggctcggcgcaatcacattttgcagttgtcaatagaaggcatgtacttataaatctctatattttactatttgcctagttggacaaacagcagccgggaggggagctgaatgccacttaagtgccattataagactacgatttgcaatatagacaagtcatgattacagttatcttgacaaccggtttcgggtttctatatttttttgtatagatataaaaaaggcaagtcaaatacaagctactgctgcagcatattgaaatactcagtcaggatcttctcctcctggataagtggcaagtccaggtattccaggtcgctcagtttgaggtcggagttaaagcgctcgtaggccttgtacgtttcaatctcgacgcgagcatgattgataacagcttcgataatgggcgctggcaaagcaacttgcgtctgcccggaggcgttcgaagtagaggggccgtcaagattttgcccaccattttcggccaaacgcccaacgtgctttaaaatcgctttcagctcctcctcgctctctatggcgcacatcagactctcgatggcctcttccatgttatttgatgcattctgtagggccacgcgcgagtcgttctcgttgaatcccagttgcagaagctgagccagtttggtcgtgtctacggtgaccggaaaccatggcgaagcaccagtaagttcgtccgattctgtctgcagcagttccacctaagaaaaaaatatttctattattttatagtttacaaacacgtgacatccatgagattatagttaaaacatactgatcaattcatgtcattgaatatattcttggccacacttaccgcttggaggatatcattattagagcgctgcaaggcgatagtggccagtccgctctcgaatcccatgtcagcaaggctgcagacactgcggggattcacccaggtgcaatctttggaattggagcgcttcaggcggcgctccatagcacgctcggacgctttatatttcatgcgtgcattcttgagctgctgacgacgctcgtgaataaactgaacagcctgttcgacggcggtgccgcccttgcaggagcgcagggccatacgagcctcggagggctcgaagcccatatcgaccaggagagccagttggtcgttgttgatctttagttcatttagcagagttttagccgcttcgaagcactcaaatgcctgattgcgaagattctggtggaagaagatcacgccctggagcaacttaagccgcataattaaagccctctcgggacagtccttgcccttcaaggagtacagcctctccaaattgtcgccatagctgatgccgaaattgcgactgcagcgggccaagcgatgctcagcatccgggagctgggtaacgttcttcaggcaaaaatagcaccacactatgtcgaggttcagcaaagcatagttatccacggactctagaaactttgagccacaggtagaaaaatgctcgtcggcctccaaaagcaggagcagagcctcctcaaaatgcttgcgattcatggccgcacgggccttctcacagaatcccaaacccatgagcagggctttatgctcggaaggcggcaaatacacttggctgccattctgatcctccatctgggcatgacacgaaaatacaaacaagtggtgtgatttaaaaaaccttctaaacaacaacctaagcaactttccttccgatttactcacctctattaggttattcttcgaggacaccaccgcctccacatcggccttgatgcgattgatcctttcgtacagggcttcgccagaattatccccatcgcccacaatgacaatcaactgctggttgttcttcaactgctggtcggccaaagtggcattggcggacaccactttgccggcagcgatgcacttgacgtgcgcagcattcggcacttccagtttcttcgctatgcatgcctggagttcggagcccacgatgtccaagctgcacttcacttccaccattgtggcaccgctgtgctcgccaacgcggcgaaccttcaacgtggcaattcctgtggtgctgaactcacgtcgggcggccagcgtacggagagcattttcctgcagctcggtcaaaaagaacttgcagcgacctatatcgatgcccaacatgccggagtacttctgcgccaggttctttaatgaaatggatacacatcttattatagaataaaatattatatattatattaatccaaagctactgagttcctgagtatgaatgctggtaatgtgctattcttttgactactattggtcttactttatttttaaaatccctcaacctctatttattgaaaaataaataataattcaagaaagcaatcacattttcacacgccaacaaatctatcggtttaaaatcttatttttattctaggcgttataaataagtcgaagcgaaacagatcaaaaacctatataaggaaactaaataatatctttgtcgttactcttgtaattcagaattattaaagtataataggaatttaaaagattcgtttgtgcaatgtcatgttgttttttttttaagtatttttaattggacaataatatcatatgatcaaactaatcaaactaaaataagtgttaataatatgaacttagctgaaggtgtatataagttacggcttgtcgaaactagcttcttacttcttcaaatgtaaaag

SEQ ID NO: 38648 - DNA, 1713 bp, DROSOPHILA
atgttgggcatcgatataggtcgctgcaagttctttttgaccgagctgcaggaaaatgctctccgtacgctggccgcccgacgtgagttcagcaccacaggaattgccacgttgaaggttcgccgcgttggcgagcacagcggtgccacaatggtggaagtgaagtgcagcttggacatcgtgggctccgaactccaggcatgcatagcgaagaaactggaagtgccgaatgctgcgcacgtcaagtgcatcgctgccggcaaagtggtgtccgccaatgccactttggccgaccagcagttgaagaacaaccagcagttgattgtcattgtgggcgatggggataattctggcgaagccctgtacgaaaggatcaatcgcatcaaggccgatgtggaggcggtggtgtcctcgaagaataacctaatagagatggaggatcagaatggcagccaagtgtatttgccgccttccgagcataaagccctgctcatgggtttgggattctgtgagaaggcccgtgcggccatgaatcgcaagcattttgaggaggctctgctcctgcttttggaggccgacgagcatttttctacctgtggctcaaagtttctagagtccgtggataactatgctttgctgaacctcgacatagtgtggtgctatttttgcctgaagaacgttacccagctcccggatgctgagcatcgcttggcccgctgcagtcgcaatttcggcatcagctatggcgacaatttggagaggctgtactccttgaagggcaaggactgtcccgagagggctttaattatgcggcttaagttgctccagggcgtgatcttcttccaccagaatcttcgcaatcaggcatttgagtgcttcgaagcggctaaaactctgctaaatgaactaaagatcaacaacgaccaactggctctcctggtcgatatgggcttcgagccctccgaggctcgtatggccctgcgctcctgcaagggcggcaccgccgtcgaacaggctgttcagtttattcacgagcgtcgtcagcagctcaagaatgcacgcatgaaatataaagcgtccgagcgtgctatggagcgccgcctgaagcgctccaattccaaagattgcacctgggtgaatccccgcagtgtctgcagccttgctgacatgggattcgagagcggactggccactatcgccttgcagcgctctaataatgatatcctccaagcggtggaactgctgcagacagaatcggacgaacttactggtgcttcgccatggtttccggtcaccgtagacacgaccaaactggctcagcttctgcaactgggattcaacgagaacgactcgcgcgtggccctacagaatgcatcaaataacatggaagaggccatcgagagtctgatgtgcgccatagagagcgaggaggagctgaaagcgattttaaagcacgttgggcgtttggccgaaaatggtgggcaaaatcttgacggcccctctacttcgaacgcctccgggcagacgcaagttgctttgccagcgcccattatcgaagctgttatcaatcatgctcgcgtcgagattgaaacgtacaaggcctacgagcgctttaactccgacctcaaactgagcgacctggaatacctggacttgccacttatccaggaggagaagatcctgactgagtatttcaatatgctgcagcagtag

SEQ ID NO: 38649 - protein, 570 aa, DROSOPHILA
MLGIDIGRCKFFLTELQENALRTLAARREFSTTGIATLKVRRVGEHSGATMVEVKCSLDIVGSELQACIAKKLEVPNAAHVKCIAAGKVVSANATLADQQLKNNQQLIVIVGDGDNSGEALYERINRIKADVEAVVSSKNNLIEMEDQNGSQVYLPPSEHKALLMGLGFCEKARAAMNRKHFEEALLLLLEADEHFSTCGSKFLESVDNYALLNLDIVWCYFCLKNVTQLPDAEHRLARCSRNFGISYGDNLERLYSLKGKDCPERALIMRLKLLQGVIFFHQNLRNQAFECFEAAKTLLNELKINNDQLALLVDMGFEPSEARMALRSCKGGTAVEQAVQFIHERRQQLKNARMKYKASERAMERRLKRSNSKDCTWVNPRSVCSLADMGFESGLATIALQRSNNDILQAVELLQTESDELTGASPWFPVTVDTTKLAQLLQLGFNENDSRVALQNASNNMEEAIESLMCAIESEEELKAILKHVGRLAENGGQNLDGPSTSNASGQTQVALPAPIIEAVINHARVEIETYKAYERFNSDLKLSDLEYLDLPLIQEEKILTEYFNMLQQ

SEQ ID NO: 38650 - DNA, 3021 bp, DROSOPHILA
gtttttataaagtggaaaatatctacatatatgtatgtatgtcggagattgagtagattacattacatattattatttgaatgtaatcgaaattatgttattgatccgttatgttaagaatgagcagcgagtaatgaaattcacggagagcgttccgttattgagtggccatcatttgtgtgtgtattcaaatgagcatggctcctgttgttgttgtggtagtgtttcgtgaaaacgatataccgcgctccgcttctccgatatatgtatgtacatacatatataatattaaggattctacaaccgcctacattggcatttaattgcattaaatttgatttgaaatttctactccactatgggctgaatgaaaaatacaaattaataaaattaataagtctaaaacagagagaaatacatattgtatttagtttgtgttttctctattatctctataaaactataaaaaaaacttagagcaaacatcacttgtttaacaaaaactttgcgtagtacgtcatttattaaattcgaaacgaaaacaaacgcacgtgggcacgacgacattgcttacagctgttttataacagctgatttcttattattaatcctattgttattcgcaacaatacattttaatattatactaaaactatgcttttggacctttttaaagtgaaagaaacgatttaagctgatcttggattgcaaacgtttggtatgaaattaaattccaaagaggcttatttaacagttatgaactaaatttaaattgacacctttttaaccaggcaactctatcggtgaatggtggcatcaaattagacagcttaaatctatcgaacaaagatggcggacttcttttcttacgccacgtgtcaaaggaatgtgattttggtgttttaaaaatttattgtttaatctgtttgctgcgctcaagtcgttttactctgctggtttgttactgtgtaattatttaacatattcaaccaatttaattatgcgaagcatgttttcggatcgttacaacaataggcgccgcaatttttacgagcgctacgaaggtaagttttccataaatgtggtatgtagtattctatatacaaaatagtctgcacagcaaaacagttccttgatatatcctgcttgtgtttctagctgctagaattatccatccgagtctcccggagtgccagcgtccagtggaacccaccgaagtgaagcatccgaacaaccccgttaatcgtcgtcccgtttcgtatcgccaaatggccaatcagtcgcggaggcagctggagaacgactcctggctatccagtgatcgactgcccatgatggtgcgccatgaaatcgagacccgtaacaaaaaacagttgatgtccaaatacaatgcggaaacggctacccatgtgttcagccataatggcgggccacgacgtggtcgtcctccatctgccgccactgcggccagaatggcatctgaattcgcccgtcaagtcggtggcatttctcaatctccgaccatcgaagatgaaggtaagtcgggggaacagtcggttatgcagccgaaatccaagaaggcgaacaagatgccggacaaggtggcggacaagttggcgaccaagtcggaaccgaagtcggaggagtccaacgtgcccgttaagattaaagtggagggggtcgagcacaacgctgaggggtcgcagtctgattcgatggtcaataccaatcagggttttaccacaaataggaactttattccaattttgagctctttccctaacccttaccgtaacatggatgttacatggaccgaacaatttaatgcattatcaaaccaatactacaatcatatcatgaactccatctcgtctttgagccagatacagccgttgaattcaacaccatcagccaacccgcctatattcggtgctaacccaatggtaatgggccgtcacccaccatttagcgtcttttcgtgcccgttggattactgcaaggaaaattttgattcgcggtaagtttttcaattttcaatattaatattcttttatattttcttaaactgcccacacctggagacattttcaaggctacttaagtagctgccaatccatcattcctacaggtacatatgctgttttacacaaaagtttagttttgctcatagatcataaggaagtacatatatgagcattcccaatacgaacttaaaatttatttataatattttattttatttgtaagagtctcattattttcgctgataatttaatgagttagataaaaaaagccaagagtattattcagatagaaatttttctgttgtgaaaaattaaaattaaagagcaccacgtgcccaatcaaggtttaaattagtccccttttaaaaaatggtaagccactcacttattaaaaaataaaaaataagtacaattgttctatgaattcttaacttaactaaggaactttattaggaacaacgaaaaaataaatgcttaaattttcaattttaaacttaataacaaatgtttgcgtattaaaactacgctaccttaatatatttatggtagtgtatccattataagcattaatagctgcgccttggacttcaggcttttaaaccatgttccctgagacatgaaggattcgaccaatatttcagtatgattttttttcttaatcatgtcacgttgctgtacaaagctttccacgttccgttttaataatatttttaaggtacttttacaataattcgaattttttaaaaaattgatagtggtgctattttttcgccttattttggaccttgctgaaccaaaaaaattataaacaagagagatggctatagtcgagttccccgacaatcagataccctttactcagctagtagaaatgcgagaaatttattagtttttggacatatcgatagattatggggaataaaatgagaaaatttttaaaaattgtttaaaagtgtgggcgtgactgttcggggtgtgtaggtgtaaagatagacat

SEQ ID NO: 38651 - DNA, 927 bp, DROSOPHILA
atgcgaagcatgttttcggatcgttacaacaataggcgccgcaatttttacgagcgctacgaagctgctagaattatccatccgagtctcccggagtgccagcgtccagtggaacccaccgaagtgaagcatccgaacaaccccgttaatcgtcgtcccgtttcgtatcgccaaatggccaatcagtcgcggaggcagctggagaacgactcctggctatccagtgatcgactgcccatgatggtgcgccatgaaatcgagacccgtaacaaaaaacagttgatgtccaaatacaatgcggaaacggctacccatgtgttcagccataatggcgggccacgacgtggtcgtcctccatctgccgccactgcggccagaatggcatctgaattcgcccgtcaagtcggtggcatttctcaatctccgaccatcgaagatgaaggtaagtcgggggaacagtcggttatgcagccgaaatccaagaaggcgaacaagatgccggacaaggtggcggacaagttggcgaccaagtcggaaccgaagtcggaggagtccaacgtgcccgttaagattaaagtggagggggtcgagcacaacgctgaggggtcgcagtctgattcgatggtcaataccaatcagggttttaccacaaataggaactttattccaattttgagctctttccctaacccttaccgtaacatggatgttacatggaccgaacaatttaatgcattatcaaaccaatactacaatcatatcatgaactccatctcgtctttgagccagatacagccgttgaattcaacaccatcagccaacccgcctatattcggtgctaacccaatggtaatgggccgtcacccaccatttagcgtcttttcgtgcccgttggattactgcaaggaaaattttgattcgcggtaa

SEQ ID NO: 38652 - protein, 308 aa, DROSOPHILA
MRSMFSDRYNNRRRNFYERYEAARIIHPSLPECQRPVEPTEVKHPNNPVNRRPVSYRQMANQSRRQLENDSWLSSDRLPMMVRHEIETRNKKQLMSKYNAETATHVFSHNGGPRRGRPPSAATAARMASEFARQVGGISQSPTIEDEGKSGEQSVMQPKSKKANKMPDKVADKLATKSEPKSEESNVPVKIKVEGVEHNAEGSQSDSMVNTNQGFTTNRNFIPILSSFPNPYRNMDVTWTEQFNALSNQYYNHIMNSISSLSQIQPLNSTPSANPPIFGANPMVMGRHPPFSVFSCPLDYCKENFDSR

SEQ ID NO: 38653 - DNA, 2745 bp, DROSOPHILA
tcacccctgtccataaatcagctgcgttcgccgcgttttatcgttttatcagctggtcgccagctgattccactgaattcgccccaagtgcaagtacaaagctgcattatccacgcttttttgctatgaataccgcatagagattgccaatttctggcttttagttatggtcccctcgagagcaacagagagagagggtaatagtgggggggggggggggcggcgaaaatatacaatattcggttgcatgcgtttgcgcacgtacgccacttgggctctattcgccgcgcgacaaaaacaaaaacgaacggcgaaaaaagtgtgcaaaaaagacataaaaacgtaacagacggatatgcaaaatgccagactaggaagggttggtggggagacggagacgcaacaaatgcgtagacacgaacagaaagggatagccataacgtgggggaaaaggagacggtgaattcgcacgatcgcaatcggtgcaaaagttcgccgcaaatcaaatctaatcggacatgagggccacgtgggtacccccataacccattttcccgcggagtttagaccatcgtcaattgcgtagctattgcatttataagttataagttcacaacaggaattgaaccgaacgggtcacaaaagcacttcaatcaagaaaatagacctcatggccttgagacagaaacacacatacatacatatgtatatgtacatacatatgtacttatatcaatatgtttacagaaccccagttttgagccatgatcgataataatcgatactgtgcgatcaattcgatacatttcgatcaaatgccgatggtctggtagaaagttagtcttcttttccaacattaaaacttcattaaaataatgttaacttctaaatttaaattcgtactatttgacaaaaaacattactctcccattgcagaattctgacgcgtacgacacagccagcacacttgatagctgtttgcatcttggcctttgtgctgatgactgtgggacgcgacctcatcgacccaacgacaacggtggcaacagcagaagcagcagcgtctgcaacagcagcatcgacgagaacagcaacgggcggagttatggcggccttggtcttcctgggcgcctttgccacccactttgggtctcagatctggatgacatttgtctcgggtaagtgtccccatatcgcaggacttttctgatcttcagggatcacacatgagcatcccaaacattcattgtttcctagatgaagctcataatgcataatgccattgaggaaattcattgactcatctcagcgaacgaagtactgtgaagatggtctagccataacattcagttcgtcaaggtttcagcatatgaaatggtcactgatcactgattccattgccaagatcaaccaatttaataatacatttctttaagccgatcaacacacactcgcttcatttgtgcgccattccgccaaaaatcgtaattacattttgtagaattgttgggcagtaaataaaaaccgattactagcaagtctaattttttgcacatccttgcaggactctcgctgtatttctctctgccccgccacgttttcgggcagtgccagcagatcctcttcccgcgctacttcgccctgaacgccatgctcagtctgacgatgctggtggtgtatgccaagtatttcctcagcggatggacgacatcggcgggcatccagatgggatcgctggccctggcggcgggaattgaggtggtggtgcgcctgtacctggtgccaccgatgctgcagctgatgcacgagaagtacaggatcgaggatgcgatcggcagtggccaggaggtgggcagccttgtccagggcgacctcgtcgactgcccgcactatcagcgcatccacaagggattccggcgcattcacatgaccatcgccattggcaatatgacggtcatgctgaccacctgcctgcagctgtattttctggcatcgaaaatacgccttagctaaggcaagcccgaagtgaagaatttatagatttaggtatccaccacataacaacgcatacacacacacacacattactactactgtacgttccacgttcgataaatgtctcaaattcaaatatggcttattgaacacttgagtttttgaactggtcctccatccggccccaaatgcccttcctccgccccacacacgcccacaccacccatacgcccatgcacgaaaatatttaatttctcccaaggacgccttgtttgcgacgacctttccaatctgatttcctgtgataaactcagcccaaaactcccaaaacaaaacacccacccgcaaaccacagcacatttagcctagagttgatagccaataatttacaagaagttattaattaatagcctattgataattaattatactgtttttttttttttgtctcattcattaattttcttctgttatttattaatccaccgaaaactatgtttttctctgttttaagtgcggatattaagtgaatgtaatttatattaaaacaaacaaacaaaaacaacaacaaaagaaacaaaatcaaaaaccaaaaaagcacaaaaagaaacaaaaacacaaaaaaaaaaccatacatctgttcacacatgaacacgaatatatttaaagacttacaattttgggctccgttcatatcttatgtaaatgaatcgagagcgataaattatatttaggattttggtatctaag

SEQ ID NO: 38654 - DNA, 627 bp, DROSOPHILA
atgactgtgggacgcgacctcatcgacccaacgacaacggtggcaacagcagaagcagcagcgtctgcaacagcagcatcgacgagaacagcaacgggcggagttatggcggccttggtcttcctgggcgcctttgccacccactttgggtctcagatctggatgacatttgtctcgggactctcgctgtatttctctctgccccgccacgttttcgggcagtgccagcagatcctcttcccgcgctacttcgccctgaacgccatgctcagtctgacgatgctggtggtgtatgccaagtatttcctcagcggatggacgacatcggcgggcatccagatgggatcgctggccctggcggcgggaattgaggtggtggtgcgcctgtacctggtgccaccgatgctgcagctgatgcacgagaagtacaggatcgaggatgcgatcggcagtggccaggaggtgggcagccttgtccagggcgacctcgtcgactgcccgcactatcagcgcatccacaagggattccggcgcattcacatgaccatcgccattggcaatatgacggtcatgctgaccacctgcctgcagctgtattttctggcatcgaaaatacgccttagctaa

SEQ ID NO: 38655 - protein, 208 aa, DROSOPHILA
MTVGRDLIDPTTTVATAEAAASATAASTRTATGGVMAALVFLGAFATHFGSQIWMTFVSGLSLYFSLPRHVFGQCQQILFPRYFALNAMLSLTMLVVYAKYFLSGWTTSAGIQMGSLALAAGIEVVVRLYLVPPMLQLMHEKYRIEDAIGSGQEVGSLVQGDLVDCPHYQRIHKGFRRIHMTIAIGNMTVMLTTCLQLYFLASKIRLS

SEQ ID NO: 38656 - DNA, 4856 bp, DROSOPHILA
tgtacaacaacttaggctatgtattgcttaacattatcaaatattattcgatattaattctaattagttttcacgctttcttcaagctcaatttgtatgcaaatcaatcaacgaatcaacgcaaaatacgtatgcatatagaaatacaaataaaataataatgtgttaatggaagatttagagacttgattgatgtgccagcacagtaaatttccagtaaatgccaagcggtaagaaataagaatttaatcaaataaagcgttgaaaactcctggcccagcggaaaagttcattaattacctatcacctgtcactagactgatcgatcttgagatctagaatcggtaattgaagctgaagagctgtaatcaaaccagtttcaatgctagtcattatacttataataggttcttggaaaatagtctgcgtctacaaaggtttcctttattacacgagtgtaataatcgtttatattgtagaagatcgactcaaaaacttccactaatataaaatgtttgtatactgcgtgatatatcaaatattactaattccaattcaaactcaaaaccacgatcaattaatttcaaatttaaaccttggttggctttctgatcgtgttcaattgaaaaccccactcaaactgaaactaattcatgtgcaatcaagtgtcttgtctgactacaactcaacatacatacaaccatgataagtcaaaataaattacaatttttacaactggtttgactgcagttaacgatagtttttgcgaaggattcagggagcatattgaattcaacagtgttgcaatgtaagtaagtttcctacttgtttttgtgttttctttgtgaaataattggtttctttatcttcatggaatacaagtatattactacgggtttaattgaatagttttttttcttgttttttttttttaataacggtctacgatgttacgtttttctctacactgctaaatagagttgtcaggtgaaactacaaatcattttaggcagttctcccagtttcctagatttaagtcagtgtacgtttgataaaagactacttatgttttttgaataaacctcctaaaaagggttatcaggggaaatggcgaatcatttttttttttcacgcctgtaaacttctttagtaacttctccaagtttcttctaaatggtaacacggtgttttagcacttttccgctgagacgaaaagtttatgtttcccaaagtcaattactttacacaaaaactcaagtctctggctaattgtttgcagttgtgggggcaatacaaagtttgctattagaacgattagatgtgttagatgcttgtttagctagtgctagttgctatgctaaagatgagattattatatatggaacttaggatgcggatttagatggatagcttccagatatcttcgacagctcttttcgctcttttctgatgatcgtgatcgatgttgctgttggtgtggctgcgcatgattgatgactgactgactgatgactgatggctgatggctgtttgcatgtgtgggtggggttgtttttctggtagttcttgtgcaggtcaaaggtgaagggacggatgggtgctctgatttctgttcgtggcaagttgagcagcagcgggcggttgcataaattcagattgcactttgctcgatgttgttggcgctggttgttgcttcttgtacgcgttgttgttctagttgttgttgcagtagcagtagttgttgttgttgttgttgttgtttgtacgtgcgaccgagtaaaggaacatgctcgtctaaaattagagttttttgcgtagaacaggtaaaagaaaacgaaacaaaaaaaaaatcaaaaatgcacaaaatatacgcaagaaatataatacaaacgaaaatggaaaatcatatgttaaactataagttacgggcttcatttaagtaaagttatgttgtttcgccatgcagaaagcgtgcaaacagagatagatagtgggacagagtgtgatagcgacaagagggagggagacacacaaggtcgaagtggagaaatcaagagccccaaacatcaagaatgttaatgaaagcgtggggaagagctaaccccagcagcggtcactaaaataatactgagagtacagatacagaaaatcgtaacagcactattttaatagcccatttctgtattttatatttaatatttaaggaacaaggaaattaagcggtttagtcagtaaattgatgattatgactttaaagaataccaacgtacatatgttctgtgcatcaataatcagttaaaaaggttatacaaaattggtatgtttgttcttaaagatcatttgttttaagtaagttcatgttagagaacgctacatatgaaatttgttcaattctgaagtaatattaatttacggctgttaagccatttgaaaaatggttaaacaatttgacagaaatctagatggtttaatgcgttgctactattttgttaaccgccgctgtacaggattaggttagaagtgtttagatggctgagggagccgaccgggtcaagggtcaaggggacttcactcaccctgtagctgccggttgatcagggccgtcagtccgtgtcccacatccacactcttctttagtatcaacatgggcttgtcctccgcatcctcagcatatccaccagagggcaggaagccattgctggctatcgactcgctcacctagaatcgaaagggcattgcgattaccaaagacttgtatgacaaataacagcctatcagaaactctttcgctattgaagttcttgatgcaagaacacatatgacctgggtcactaacctgggtgacctgcatcagcttcttgaccacatcccggcccagaatgtgatcgaagacggtctgcaagaagggctcggccataattgacaatttgagcttgtcgcgatgccagatcagcacccgcgactcctccatggccatgatggagacctgtcgtagtgggacaaaagtacgcagagattggttaatgagttgctgacgatggagttgctgacgaagcacacccacctgaaagtagtcatcggtcgagacgccaaaccattctggcgagtctaggaactgatggggaaacacaatgtgcagggcgcgctgatgctgcgacaccaccagtctgtggataagagagcatcggtattagccacattagtcaaaggcgaaagtcactccgttgagcactcacttgccgctcagcaccagcgacaggctgtcgaccttggtgaccttctcctgggcgtagacctcctggtacttcagggcacgtatcaccttcatgcagttgagcaccttcttgaactggtggcgcgtcacgtgcagcggctggaaaagtgccaggtagacctgcgaatggagtcgataaagttaatggttatggcgacagctacagatcaattatatgtatttatttgcatattatataccacgtatatttacgtttaataaatacgtatattttaaattttaagcaattttatgttgctttttagctcctggtatttttttttattacaaatttgcttgctgatgaatcttgtcttgatattcattcaatgccacccattaaaaatacgttctttatacataacttgtgcagttaaataaatatgtatttactgaaaaatgattaatagtccttagctggaaagtgtagcttttacacgataatatcaatatattgtattatttacttagaaagcttgtttatatttgtacttcattcatgataaaataaactcaaggtttctctgaaaactttccacctattctactcaagcatcaatgggttctaactgatggccacataatattgtacataatactcagttaacgtgtccataatttacatataaagtaaagtgggtgggtaaataaaagctgcactaatttaacggaaacttcctattttcttggccaaaagactcacatggagatcaataggacaaaaatcgctgttgccaagtagatgttgttacactcagcactgaaagtcaaacaaacaagcaactgaaataggcaaatattatcgcaaatcgagagtgttaactgcttagcattgcgtcaagtacaacaagagcacgcccccttttcccaccatgttctcggtttttatttaaatgaggctacactgcgagaaacgaacactgctaaggacttcaaaggaacttgtcctcttcaaacacacagaaacctttcgtttagtttaaaaacccaaagtcaagaaaaacatatatgtttctaaaagaaaaaaataagaaaagaacatccatttcaagtgcgacggttttctttccgtgtgcttatgtagcgtgggcgtggatgagctgcgaccagtttttttggggggaccacaccaccccaccccacgccaacccgttcccaaccctctcgagatcgaagagccaagccggcggtcacatggccgaaatgtaagactcgaggtagcaacagccacacacgacagcgttaacttgtcgccatgcaaaatatcgtgcgttttgctgacgcagccgttagacgtgccagcagcttggccggctctagcccccgatcccgctctgctccatccaggtgggctaccatggatcggggcagtagcagcactcactactgcaacatcggcggtggtcgtattgcagctcgcaacatgaaacgccagcagttttcaatttttctcaaccgtatctgaaaggtatataggttcttcgataaaacataaaatgataaaatgcaatttcgtgcactttctgtgccctttaaattgacaacgttcaaatgtatgctttagcaataatactgcataaat

SEQ ID NO: 38657 - DNA, 669 bp, DROSOPHILA
atgtggccatcagtctacctggcacttttccagccgctgcacgtgacgcgccaccagttcaagaaggtgctcaactgcatgaaggtgatacgtgccctgaagtaccaggaggtctacgcccaggagaaggtcaccaaggtcgacagcctgtcgctggtgctgagcggcaaactggtggtgtcgcagcatcagcgcgccctgcacattgtgtttccccatcagttcctagactcgccagaatggtttggcgtctcgaccgatgactactttcaggtgggtgtgcttcgtcagcaactccatcgtcagcaactcattaaccaatctctgcgtacttttgtcccactacgacaggtctccatcatggccatggaggagtcgcgggtgctgatctggcatcgcgacaagctcaaattgtcaattatggccgagcccttcttgcagaccgtcttcgatcacattctgggccgggatgtggtcaagaagctgatgcaggtcacccaggtgagcgagtcgatagccagcaatggcttcctgccctctggtggatatgctgaggatgcggaggacaagcccatgttgatactaaagaagagtgtggatgtgggacacggactgacggccctgatcaaccggcagctacagggaaactgggagaactgcctaaaatga

SEQ ID NO: 38658 - protein, 222 aa, DROSOPHILA
MWPSVYLALFQPLHVTRHQFKKVLNCMKVIRALKYQEVYAQEKVTKVDSLSLVLSGKLVVSQHQRALHIVFPHQFLDSPEWFGVSTDDYFQVGVLRQQLHRQQLINQSLRTFVPLRQVSIMAMEESRVLIWHRDKLKLSIMAEPFLQTVFDHILGRDVVKKLMQVTQVSESIASNGFLPSGGYAEDAEDKPMLILKKSVDVGHGLTALINRQLQGNWENCLK

SEQ ID NO: 38659 - DNA, 2723 bp, DROSOPHILA
taacgtatttatgatttcattcctttgcagtgcgatgacgatcccccacatgccttctcgcaggtctttttcctgaaggccaacgcaggcaccttctttgtggcccacgacatcttccgtctcaacatccacaactctgcctaggagcactccacttacctacgtatgcacaccactcagcaccacacataatcgacatccaaagatgcccagcgccagatgataacaacaagctcggcagtggaactcagaaaaaaaaaatataacaaagccagccagcggtctcacgattatcagcaaatacaaaagttagaaaaagaaaaaaaaaaaaaaaccaataaaaaaataagaaaataacgctaactactattacgatgtcaacaaaatgggccgccagctcaccttcatttgtgtcccattgttgccggtactctcgctttacgatccacggaaccctagaattatatgttctgcgaacacctggatctcgcgatctaatttagctaggactatcgaatttggtggtatgtgccgtgctacaagctcgtatttcgaattcccgtgaaatgagcaggaacagcaggccgggatcatcgcctacataagtttagagtgattttctagaccgtttatatttccaattgaattatttgtactttaattatgaggattattttagatagccgtattgcaaatgtattgtgtcgagtgtctcgctctgtaaacaattacttgagtaccgggactgcaccacacacagtcgcaagtatcgactcttgctttctcatatgactaattgagcgatggcgaattactttttattgagagaaaaaaaaaacacttaaatataaagataaacgttaacagtttggttgtttgtatgattggcggaatggccagttgaaccggaaagatatgtatacccttataagctattaaatgcatacgaaagaagctccagcggatctggccagtggtttccgtctaaaaactgaacgattcacttgtcgcgaaatgtgaacaccgcatcgaatccgaatagcaccccattgacgatggacagcgaggccttgatgagcgcgagatcccgagttcgggtgcggaaggagaactcccaggcctcaatgatgaacacaccgctggccacgaacaaggtgcagcccaggacgctgaagaatatatcgatgcgcttgtgaatgggtgcccgcatcagaacgcctgcaattgcaaggtatcttaagtagatttgtgtgcaaatttcgtttttggttaacttattttagtattttaactcttaaggactggcattccaaggcgtacctgcaaagaccccgatgaccactatgatgtagcccgtgaaggtgccagtggccaggaacgaagtcattatatcgcgatcgttgaagctgtagaagtggagcaccagacacgctaccgcaaaaccctggaaaagtgaggggattttcatttgtggtgcttcttggtgttcttataatttccgagtctatctggtatttcgggtcttttcttttaattcccaagtcgttttttttttttttttttttttttttgacaaaccattgtttagtaagcatacgcgttgctttttgcattaattcattaatccttagaacttgcagtaaaatcacttgaaaaaaaaatcctttaccagttcgagaaacttgaccacattgaggcggccttttcgctcgccatgagacattttgtgaaactgctgccgctgacagtcctcgaaaatgtggtccagcttgaaaatgtacgtgtcgcaactcaagaaagttccaaagttcttccgattggcctctttggagcgtgctcgcgacggcagagcgctggacaaactgattctgattcggaaatggatgacggatggcaggcaaatgcggctgcagtttgcagttgggcgcagtcgggcccagccagcgaaattaattaattacacttaggaaataggcttttcattcttgttcccatccctgtgtatccgcccacgtccaccacgtccgccgggcctctcggttccatctctgaagtggagaccgtctgcgttctccgctgccagctgcactcgagccccatcccttccagcttgattgagtggagcataatgtctgtatctgcatgcatgctctgtgccggtgggtggccagtggacagtgggcagccgcccaatggactcggactcattgtgctcgcattgccattaccccaaatttgctgcctaaccttcggggcccaagatcggagctaattcgcggaatcggggccaacgggtcgccaattttccgatggtaatcaagtggataatggaaaacatatcgccggggaaatcacttcctcaaatcatgaataatcttatggacttcatgggaattattaggttgtaaggttgtgttgcaacgcttttcagatataaaagtggatttgtaatgcatggaatatattttttaatatattacaagtactgtactttttaagtgcaattaaaagcttagagcaacataaaaagtaagccgaattttatatacccttcacctatagtaacttagctaccactagcttggacgactacagtcgtcctgttttaataaaatgtattttatttctatttatttttcctgtattttttacgaacgttaaactgcaaatcccattccgctcgctcctagttcagctaaattatatagtttatataaaattag

SEQ ID NO: 38660 - DNA, 396 bp, DROSOPHILA
atgtctcatggcgagcgaaaaggccgcctcaatgtggtcaagtttctcgaactgggttttgcggtagcgtgtctggtgctccacttctacagcttcaacgatcgcgatataatgacttcgttcctggccactggcaccttcacgggctacatcatagtggtcatcggggtctttgcaggcgttctgatgcgggcacccattcacaagcgcatcgatatattcttcagcgtcctgggctgcaccttgttcgtggccagcggtgtgttcatcattgaggcctgggagttctccttccgcacccgaactcgggatctcgcgctcatcaaggcctcgctgtccatcgtcaatggggtgctattcggattcgatgcggtgttcacatttcgcgacaagtga

SEQ ID NO: 38661 - protein, 131 aa, DROSOPHILA
MSHGERKGRLNVVKFLELGFAVACLVLHFYSFNDRDIMTSFLATGTFTGYIIVVIGVFAGVLMRAPIHKRIDIFFSVLGCTLFVASGVFIIEAWEFSFRTRTRDLALIKASLSIVNGVLFGFDAVFTFRDK

SEQ ID NO: 38662 - DNA, 2260 bp, DROSOPHILA
tcaccagataccataccacatagattgcaacaacactgcactttcggtagggcctccgggttgggctgagagctgggggcgtggctggagcaacagctacacatcatccatccatccatctaacaataagcgtccagcaacagctactacttcaggccaagaagcggagaaacggagcgaagtcatccatctagtcagccatcagtcagttcagggcagttttgcatcgcaagttggggccacactgcccggcgaaatgtgaacttctgagcccagcatctggattcttcggagaataccaattgggccaaagaaaatggtgtgcactcttttcgggaaatactataagtgggtcaaaatcaaaaacaagtaaattctaaataaaccagtcgggttaaggcaacacattgattcagtgattcattcataatatttggaatgtaaggaagcgagtgtagtttctatgcatccattatttgaatatttctcagtgtagttctgtttgcactggcctttgtctaagggggcggggcaggacggtagacggacctgggccgggtgaatttatagcacaatgtcaacagttgccgcgtaaatatgtaaaattgtttgtaaatagcaatttcgttgagccccccacgccgtcgatgccgaaaagcaaacgatgtgcgtcaatcgatgtggaggagagcaaacttaatttaccttcaattatgcgagaggtgttagaaggcgctatgttgagtttagaggactttttgatttctggtttcgaaagtcgaacggactttaatctcttcaaatcgagtatttatcaaggcacaattaactatcttgcttttattaagcacatcaatgcattgtaagttaaagggcatggtggtacaatgggtcgtatgcgtattcttctgcgcgttactcatacgacgcatgagagccataactttttgtaaactttgaaattgaattctaatttgacattattttatttaatttggcattaaggatgcatggcatttagggcgagtggaatggacatggcgggctggaccattcgctcactctccatttccaatttacgttccaagatgtcctctcgcccaatgtcgatgtctatcggctgccagtgatggtagctttcgatcctcgaggacaatggaaaagtgctgcacacggtcgtcaaactggagtttttggtcaggtcatggttgtactgctcctcgctgctcgtggttacctcgtcgagatccttatccacatcctgcgcctgcaactgttgcttgacatccattgtgttcgaacgattttagttttatttgaatttttatcggagttccaaaataaattgtctgctgacaactaatgctaatgggaatgtaaaatgctatgattgggactctaggtcgtaactgataaccgacaccattttggcttaagtcaacaatttgctctatcctcgccatcgcgaatgagtttctataatatatgttaacctagttttgtaatcggtgaatagcgagtaatttaacttttagagctagaactttattgttttaacaccgatttagccaaaccctctctaagaagtagttttgctccaagcattttaaagtcttttacatatttcctatggaaggggatctaaagaagaaatgccaactggataaagggagactgcatcaccaaatcgcttttgcatgcagctgaccatgaaggaaccgcctccagctttccctcgacttcccctatttccgctcccttatcacccatcccctgtcaactgccaaatgccacgcccactgaccaagctgcccagcccccgggtcagcaaccttgatggctggcagtgcgttaattgattgttcggctggcccatcattatcggcagagggaaggtcctcccgactttggatctggcacatatgccaggacgcagaacgcaggacgaaggaacgcagacggttaaggctgaccactggtcatgccgatgacgctgatggacagcagtcggtgggtttagggagtgaccaaaagcaagggaaaagaccaaaacaagcagtgttgacaagaaaattgcttcgatttgggaaaaccaactgtgggtatttggcccaagccagaagtagccaaatatttgaaaattgtaaacagaaaatttatttagttactctgtctatttatagatgtgcggggcataaaatttgaatgtacaatatgagagattgttaacaaataaattttgttaacttataaattcaag

SEQ ID NO: 38663 - DNA, 260 bp, DROSOPHILA
atgtggataaggatctcgacgaggtaaccacgagcagcgaggagcagtacaaccatgacctgaccaaaaactccagtttgacgaccgtgtgcagcacttttccattgtcctcgaggatcgaaagctaccatcactggcagccgatagacatcgacattgggcgagaggacatcttggaacgtaaattggaaatggagagtgagcgaatggtccagcccgccatgtccattccactcgccctaaatgccatgcatccttaa

SEQ ID NO: 38664 - protein, 8 aa, DROSOPHILA
MWIRISTR

SEQ ID NO: 38665 - DNA, 2363 bp, DROSOPHILA
atattcgtttagtcaggcgcaaccccgcaggggaactcccgcgtgtccattccctatcgcaatggcaatctgcaatctgacaaatcaaatcttgtatgcaaagcagccaaagcaaagcggcaactggcgacacgagcagcagcaaaagcaacaaggcgacgagcaatttgtacgagcatttgtgccaacaaaacgctggcacgcaggcgagcaggaaataaggcaagctggagagcaggaaatcaggcaagcagtgagacaggcaagcgaagtgaaagcacgcaagtgaactggagacaaagcgaagcaaaaacaaaagcatagacgcagctgaaaagcgcccaagcaaaagtatcgaaagcagcagaaaaggtaccaagacgcaaaagtagtgtaatagtcaaatcagataggttagtaaagttaggtaaggcaagaaggaattcgtaggctaacaaaagctgcaaagcacgagaaaagcaaaagcacgtaatagatattttcagaagcaagaaagcgaaccagcagatgaaagcaggatccaaaagaagaagactagtctgaagaggaaagcaagaaagcagcagacagaagagctagcaggcaaagcaagttagcaagcaagcagatataacaaaaagaatagcaggaaagcaagatagcaagcaggataccgagcaagatagccttattccaaagcaaaaatcaaacagtcaagtaaccgataaggaagcgaacgcaagcagattagcagtagagcaagttagcaaaaaagcaagtaagcaatatagggagcaggagacgacgactaaatagttgcgtgaccagcgcgctttgctcactaaacagcgtaattggtcataaagcgactgctgcgaatgacccgcacgccggactaaccgaccgtttacggcaattactaaccggagcagaggaggtgacaagcaattaggcggtcggcaggcggcggcggggggtcggccggcccccccaaccccggatgtataagccggacacgctcacgcgccgcggcagcctgagatccctgcgcagcgccccgctcctgagcaccgtgctcgaaagcacgctttcactgacccgcattcacccgatcgcctccttggagctacccggcctcgactatgcggtccactcgcagtcggcctttggcgcctacgggctagcccacccccgggatctagccacctgcacctcgttgcgcagcggccttgcggcgatcaccgcggcgtccgcttccgccgccggcggcgtttcccagtcgcagagcgccctcctcggaaggtacgggcccaacgcctcgattcgccacggagaaagaaagattgtccagccaaaacggtaggtcctcgctatctataaggtcaccaccaccatagggactagagtcatatgtcatgagaggtctagtatatcatatctagttagtgcttatctggggtcagatccaaaggacttacgacagaataactttttataagtggatacacagcatccggtttaaccatttaatagctttgttttaatcaatcagttgtctggctatcaagagatagaaaagcatataataattggtttatagaatagcctacagaatgcaaggggtcttcccttctggtcatcgagattagctgctccaccacttcgcggccagagaacagtaaaataagtgaatttatcacattttgctctctaaaatatatcgatcgatttactagtatcaaaagggtcatacaatcaatataccaacagcgtacggtattgcaaacggcgatatgaaatagccaaggtaagaacctaagctatgcttgaactattgccagtccctgacgggactccagcgttttaggtttccgtcccagggcagatcatcgatattcgcctgggcggcgattgcggccttcactcgattcgaaaactctactggggactcgtcgttgcaccggctgagtgccggcatgtaccaaacatcgcagcaaatgcaccacgagctgaccaccatcagcatgtatctgagcatagagtaacgggtgctgtcccaataggcctcgccgaatcggcgatcgtatcgaatggccactggatgaacgacgtcgctgaccgcgaagctaccctttttgaactgcattacggcggtgttgttgatgcaagtgccctcggggaagagcaggaccggcggccgatccttcatggagcagtgtaggcggagcaccagacccagagcctcacgatcggccagttccttgcggtcgaaccacatgtggtgggagaccctcgacagggcgcgctgcaggacgcccaggatgccggtgtgaacctggcccgtcagcgagtagttggcatcg

SEQ ID NO: 38666 - DNA, 363 bp, DROSOPHILA
atgtataagccggacacgctcacgcgccgcggcagcctgagatccctgcgcagcgccccgctcctgagcaccgtgctcgaaagcacgctttcactgacccgcattcacccgatcgcctccttggagctacccggcctcgactatgcggtccactcgcagtcggcctttggcgcctacgggctagcccacccccgggatctagccacctgcacctcgttgcgcagcggccttgcggcgatcaccgcggcgtccgcttccgccgccggcggcgtttcccagtcgcagagcgccctcctcggaaggtacgggcccaacgcctcgattcgccacggagaaagaaagattgtccagccaaaacggtag

SEQ ID NO: 38667 - protein, 120 aa, DROSOPHILA
MYKPDTLTRRGSLRSLRSAPLLSTVLESTLSLTRIHPIASLELPGLDYAVHSQSAFGAYGLAHPRDLATCTSLRSGLAAITAASASAAGGVSQSQSALLGRYGPNASIRHGERKIVQPKR

SEQ ID NO: 38668 - DNA, 3224 bp, DROSOPHILA
gctttgctcactaaacagcgtaattggtcataaagcgactgctgcgaatgacccgcacgccggactaaccgaccgtttacggcaattactaaccggagcagaggaggtgacaagcaattaggcggtcggcaggcggcggcggggggtcggccggcccccccaaccccggatgtataagccggacacgctcacgcgccgcggcagcctgagatccctgcgcagcgccccgctcctgagcaccgtgctcgaaagcacgctttcactgacccgcattcacccgatcgcctccttggagctacccggcctcgactatgcggtccactcgcagtcggcctttggcgcctacgggctagcccacccccgggatctagccacctgcacctcgttgcgcagcggccttgcggcgatcaccgcggcgtccgcttccgccgccggcggcgtttcccagtcgcagagcgccctcctcggaaggtacgggcccaacgcctcgattcgccacggagaaagaaagattgtccagccaaaacggtaggtcctcgctatctataaggtcaccaccaccatagggactagagtcatatgtcatgagaggtctagtatatcatatctagttagtgcttatctggggtcagatccaaaggacttacgacagaataactttttataagtggatacacagcatccggtttaaccatttaatagctttgttttaatcaatcagttgtctggctatcaagagatagaaaagcatataataattggtttatagaatagcctacagaatgcaaggggtcttcccttctggtcatcgagattagctgctccaccacttcgcggccagagaacagtaaaataagtgaatttatcacattttgctctctaaaatatatcgatcgatttactagtatcaaaagggtcatacaatcaatataccaacagcgtacggtattgcaaacggcgatatgaaatagccaaggtaagaacctaagctatgcttgaactattgccagtccctgacgggactccagcgttttaggtttccgtcccagggcagatcatcgatattcgcctgggcggcgattgcggccttcactcgattcgaaaactctactggggactcgtcgttgcaccggctgagtgccggcatgtaccaaacatcgcagcaaatgcaccacgagctgaccaccatcagcatgtatctgagcatagagtaacgggtgctgtcccaataggcctcgccgaatcggcgatcgtatcgaatggccactggatgaacgacgtcgctgaccgcgaagctaccctttttgaactgcattacggcggtgttgttgatgcaagtgccctcggggaagagcaggaccggcggccgatccttcatggagcagtgtaggcggagcaccagacccagagcctcacgatcggccagttccttgcggtcgaaccacatgtggtgggagaccctcgacagggcgcgctgcaggacgcccaggatgccggtgtgaacctggcccgtcagcgagtagttggcatcgcacatcagcaccaggacgtctaaggggctcgtgtgattgcacacacagatgcccttggtgggccgatactccgtgttgtggaatctgcggatcatcggcaggcaggcggccgtgattcggaagcactgccgcaataccagctccaccaactttttcttgaagcaccagtcgggaatgtgacccagcagcattgagactccactgatcatgaacaggcacagccagcagccaatggtcctgaagggcaaaagcagtccgtagcgtacaacccagcccagcagccagaccgtccttaaacgccagctgaggtatcgattcctctgacgaaggttgcgggtcagcagattccattccccagctggcgaaggtggggccacaaacctctgggtcacgtcgtcctcgagcaccaagcccaagccggcggttatgaagtcgcagcactgctccactcggatattgagacgattcttgatcggcggcgagagcagcttctccatgccatcgcccttatttccgaccgcccactttttgcccaggcggcaccgttcttcgcgagctcgcctcctgcgagtttccgccaactgattgcctatccaggcgaagaggagttccaggacatccaggtagcggcactgcagccaaaagaaggacgcccacaataggatgcccaggaagaccagttgaattaacatggctgttgaaagttgaaaaagttttacaaatttaagagaaatgtagatcctcgtgtttacctcctactcctatcgacaacaaaaatctattgagccttgacagctaaagcccacgggctaaaaagcccatatcttaaacttatccaaacatagcccactgggaaaacgttccataacaatagcattggttgtggtgcggtttagaggtatttaggaaaagggttgtcgataagaacttccagcccgatacaaattttagtaattcttaatgagctgcattaatacgagtattaagtataggagttcacccacaaatttcgccattaaagccctaattcaatttggcgccgactttttggcttttcctcacatttttccgttttccgaatatatatatattttttttttttgcaagcgcccaaaagtcttgatttattttgcccgagatgtgaaggaaaaataagaaagcgaacaagaaactttgccatcgacttcccttttttttttggctgccagttgggtttgagtttttgggtctttgggttcggcgttttgactggggtcttagcccatattttgttttttcatatggcaataattcaattatgccataacaaggccgcaaaatgtttgccttcgggcgacccgaaatcacttaaaaaccacagaaacttctggctttgttaattcgttaattaaatggggtttgcgctttcgccaccgctcctcgaggattacgcaatgagcgatgatggcgatggcttggcggtatgttggtatgatggtaagatggtggagcttccttccgctgccctccattgattacattggctggcaacaatcttggcttatcaaatgcaaacaacggcgacaggcaacgtcaacgtcaccgacaactcatttatgcccaagcccgggcccttaattagcatagaatgtgttttaaaaagccacttgagctaaacattcaaaacacctacagggtgttttccccagccac

SEQ ID NO: 38669 - DNA, 1224 bp, DROSOPHILA
atgttaattcaactggtcttcctgggcatcctattgtgggcgtccttcttttggctgcagtgccgctacctggatgtcctggaactcctcttcgcctggataggcaatcagttggcggaaactcgcaggaggcgagctcgcgaagaacggtgccgcctgggcaaaaagtgggcggtcggaaataagggcgatggcatggagaagctgctctcgccgccgatcaagaatcgtctcaatatccgagtggagcagtgctgcgacttcataaccgccggcttgggcttggtgctcgaggacgacgtgacccagaggtttgtggccccaccttcgccagctggggaatggaatctgctgacccgcaaccttcgtcagaggaatcgatacctcagctggcgtttaaggacggtctggctgctgggctgggttgtacgctacggactgcttttgcccttcaggaccattggctgctggctgtgcctgttcatgatcagtggagtctcaatgctgctgggtcacattcccgactggtgcttcaagaaaaagttggtggagctggtattgcggcagtgcttccgaatcacggccgcctgcctgccgatgatccgcagattccacaacacggagtatcggcccaccaagggcatctgtgtgtgcaatcacacgagccccttagacgtcctggtgctgatgtgcgatgccaactactcgctgacgggccaggttcacaccggcatcctgggcgtcctgcagcgcgccctgtcgagggtctcccaccacatgtggttcgaccgcaaggaactggccgatcgtgaggctctgggtctggtgctccgcctacactgctccatgaaggatcggccgccggtcctgctcttccccgagggcacttgcatcaacaacaccgccgtaatgcagttcaaaaagggtagcttcgcggtcagcgacgtcgttcatccagtggccattcgatacgatcgccgattcggcgaggcctattgggacagcacccgttactctatgctcagatacatgctgatggtggtcagctcgtggtgcatttgctgcgatgtttggtacatgccggcactcagccggtgcaacgacgagtccccagtagagttttcgaatcgagtgaaggccgcaatcgccgcccaggcgaatatcgatgatctgccctgggacggaaacctaaaacgctggagtcccgtcagggactggcaatag

SEQ ID NO: 38670 - protein, 407 aa, DROSOPHILA
MLIQLVFLGILLWASFFWLQCRYLDVLELLFAWIGNQLAETRRRRAREERCRLGKKWAVGNKGDGMEKLLSPPIKNRLNIRVEQCCDFITAGLGLVLEDDVTQRFVAPPSPAGEWNLLTRNLRQRNRYLSWRLRTVWLLGWVVRYGLLLPFRTIGCWLCLFMISGVSMLLGHIPDWCFKKKLVELVLRQCFRITAACLPMIRRFHNTEYRPTKGICVCNHTSPLDVLVLMCDANYSLTGQVHTGILGVLQRALSRVSHHMWFDRKELADREALGLVLRLHCSMKDRPPVLLFPEGTCINNTAVMQFKKGSFAVSDVVHPVAIRYDRRFGEAYWDSTRYSMLRYMLMVVSSWCICCDVWYMPALSRCNDESPVEFSNRVKAAIAAQANIDDLPWDGNLKRWSPVRDWQ

SEQ ID NO: 38671 - DNA, 3053 bp, DROSOPHILA
gaggaagtcgaatcaattgctgtgacaccttactatacttacctgctataagaaaaacaaaagccaacccgaaatgaattcgagaattcttccaaaagcaatttgtattaatttcgcaataatccttgaacttccttattcgcctgcaacttgaaaaacatatgcatgcctccatgataaaagtgagtaacacaaccgtaggcagtaaacaaaaagcttcaggttgcaagcgaatgggggtgcctctatttagtaataagcgagttagctaattgtaaggcccctgaaccggaaaagaaattgcttatgaaagtacataaccagatatataaccccatatgaaaaagcacgtgagatctgttctctcgatttcattcagatcagacatttggcaaacgatttgcgttccagagatttgtctcatcatcagttttcattaaactattttgggttacattttgcgtttggtcttatataacttaatcatctgccaatacctccaataataatggtctctctcttcgtccccacctaaaacacactaataatccaacaaaacatcaaaacaaccaaccaaccgacaatccaacaaaacgcacactaaacacgataacctccgatgactcaacgatatcgtataacaggtgtctcatgtcaaaatcgattcacctgtttttcgcctgcacaccaacgcaacggttatattactgatcacattctcgattgctgtgacgacgcggcagtacgtaggaaatcccatagactgtgtacatacaaggtgagcgatcttttaaagaggccgatagattttcgattaacgcgattctttcgattgcagagacattcccgaagatgttctcaacacatattgttggatacactcaacgtatacagtggtcgatgcgtttatgaagaagcaaggttccgaggtgccttttcccggagttcacaattcacagggccgtgggcctcttacaataaagcacacaaaatattatcaatgggtagcgtttacactattttttcaggtaagtaatgtaaaggatcgcatcactgtgttaaaagcttaaaagcactgcccatttcccactggtaaaggaactgtctaaaagcgtttggaagctttgcctgggttggaaactttaataaacatctccatgcgatgttcaatacaatatctcagcaaaaaacggttttctttaggagctttttactattctctttgcgttcaaatggttgattttctcaggtcaaaagatatattatgaaaacaatttttgaagttcagggtaaaacactattgaattttccttaatttggtaatggaatcgaataaattttgtttcattccctgcacgtatctgcgaaaatgtcaaaaaagcttaactaagcttttagatacactttatacgtgctttaagcttaactgcaacgaaatcctgcacgatgcttaaacatattatctttgtcataagcattttctaattagttgttgttattaaccttttaaaaatgtatagaaaaaggagaagaggatgttataggaaaattattcagataataacaggtcagccatctggcataatagctttttatcatattcctttctatacattttttagcaaggcttttcaatgacaattatcaggaaaatgacagcaacagaaacgattatattctgtttttcggttttatgaatctgacgtctaaatatgtaagctgccataaaaaatgtgcattactcgtttgcgataactacgttgttttaccttctagggttagtaagtttctggtaaacgaaagttgctttatttatccgattatatatatgtacttcagtgatcgcataaacaatttttttgtattagttttcacacaaggcctgtgtgccgatatcaatatgtcaaaatatgtagaataagccctcgatattgaccactaacatggggcagccgaaggaacccgtctagccgccgcctggggagatgcggaactggtggtcaccgcaccgctgaaacaccaacaagcagccaccagccactggcaacaatgacctttcgcacttttcgaggcgttgtctcttttgtttcgccgtcaaaccaaggatcgggtgtgtgatgcattaatgcgtcgcagacgctgcagttgctccccacccatgctgcatgttgcacgctgtgcgtgcagtggtgcagcgatgtggctgctgcaccggaaaaagatgcaacaactattttgggacgcctcgctttctccagttcttccagctctgtgcgctccgttattatatttcgttgcgctatttttgttaagaacagaaaaagcactgaatgcaatcgcttgaccccgtttaaacccaaaccgaaccgaactgatgggtggagccccgtattttgcccccaacatttcgaacttcccccaatgcgggaacgtggacgtcttttatcaattttatgcgcactgtgcttgatatttccattaattttatttatttacgccaccgtcctgctgggcgagcgggtgctgaaaaaaatataatttatgttgcgtgtgtggctcgaggggtgaagatgccgcccgcgtattttccacctgcctcccctggggaatacccaaaaaaaaaaaaaaaacagaagcaatcaacaagcggtgcaaacaggcgctcgttaaagagtttttgatatccaatcttacaaatcatatttcttaccgatcgcaacaacaactgacgcaaacatttgacatcgctcataaaatccgcgtgtgcgggtcgctgtcgatcataaaattcaaatccagatcgagatgatgatcggggaggttcaaaaaggggatcccaaaggggcggctcgccaataaaccatcgagcagtccattaaagtgattgtcggaaacgagaaactacatgaaagtggccggggaaccagccagccccgactcagatctgcccaacaagcacatattttatgggatgaagatattccctagcatctggccataagcatatttaaattctcttgactttattttatatagcaacgaaaaatatggga

SEQ ID NO: 38672 - DNA, 129 bp, DROSOPHILA
atgggtagcgtttacactattttttcagccgaaggaacccgtctagccgccgcctggggagatgcggaactggtggtcaccgcaccgctgaaacaccaacaagcagccaccagccactggcaacaatga

SEQ ID NO: 38673 - protein, 42 aa, DROSOPHILA
MGSVYTIFSAEGTRLAAAWGDAELVVTAPLKHQQAATSHWQQ

SEQ ID NO: 38674 - DNA, 2698 bp, DROSOPHILA
ccattttgtattcatagcacgggatttgcttaggtggggatatgtggaaaacggacgctgcagaatgtggaaatccaggacaagtgcattttgaaagaattcccattcgaaatccgccgaactatacattccctacatttattcaggcaaggcctggcataacaagtaagcaaggaacacaatgggacaagtctctaaatcaaagtttaaaaaatacagctttatcatataagttatagatatctacgaccactttaaaatatgtttccaaaattccaaaaatttttccaactaaaaagcgttaatttttttaaatagatttttgcggttttaaactccaaagtgctgccaattcgaaattcctgcacttcttcactgcaaactcttggtcccccaacaaaatgggaagtaatcaaagagtgtgggcatgtcggttccgaaggtttttcgatgcattttttggacacacagccagtgtgcgtgctttttttctgccatcaccagcagtttttcagcgtggacaccacactatgtttctaatcagtgcagcttccgtcttttttccgactttcccgctccgccgatgaattttccgtcagtcaacagagcgcgatatttgtcaacaagcggaactataaatatgcatgcaaagggagcgctggtggacggtggaaaatgggaaaatggtggggaaaagcagagtgggagaatggaaatggatgccatcaggtcatttttggggggcaggaggctttgattttccactcacagccaggcatttcatttcattccatttcccgtgcactttttactttctggcaaactcattttttacactcccccggaaaaatcgaaaaaagtaatacggcattcggaacgctcgcaacttaccggcaagggaatagaaaatcaagtgaaaccgtgttcatccagccaaccatacattccccgtaaaacttaaaggcatcatctcctttcgcagtgattgcgaatttacaggatgctcagcacattcaagatgcgatctgttctgcagactcaaaagatattgcgatcgatgtgccatggtaagttaagtgcagaaatagcttaagcatatcatagactagcaaacagcgaatgataagctaacttaaagcagagcaagaggtatgtttataagatggacatagctatacaatactatctgcaatatgaagagggctttggggaaagcagaaaggactagacggacatggatcgatcaattcggcttgttatgctaatgctaacatcaatttttaacatacaattattttaaaaagagcacacgtcttcatcttcacagattcgcaacgcattaaggcgcagtttcttgtccaaaatggggagtccccttccaatgccgaggaggtcgaacaggataaggaggagcagcccgtggcggagccacgcccccgcgcacccatgcacaatccactaagtcgacgccacactgtgaacagctctcgactccagtacattaatgacaaatacaaggaactggccaacgaggtggagttgcgcaaaccgaaggccaagccattcgtgtcccgccacgccctccattcggggcggtttgataagtaggactccagtcgccaaacctcgcagccccattcccaagtgatcgaaaatgattacgaaagttgcattcttttccggttaaaacaaaaatagaggatactcctccgtcaactgttcgatatatcgcttccccttcctgttaaatctcaatttaaaatgctaataaatgggccaagacaacataattttcgatttgttggaaaatgataatataatgtatcatagtcgtaagaagggaaaaattggtaaaatatgtggtagtaacaaggcatccaggcaaatattttaatcagactgcacgtagtaatattttctacaagctttattagttccattaagttcgtccttatcacaaaaccagatgaatacatcatgtgtatttttgtaaatgggttaattgtgtgtctaggccaaaaggaaaatcatagcgaggtccaaacaaccaacaaccagaaaccgacaacctgcaacatacaagccgtcatgtaacggatgcgagtgcaacatgggctacgtatgttgcgttttcctgggacttgctcactgggacttgtttggggcgggtggaaaaaactgagcgtttatgagatacaggtggaagtggaaaatgtgaagtgattaagctaggtctgccgggcgtggtagtatggaaatccagacacaatttcctaaggttagagggaactgaatgtaaaatgtacgagtattgttctttataagtatttataaatagtacaacaaatatttctccatatagtcatttatgaatatatgtatttccagattcatatatttctgttgcctatgcgttgatggggatcaaatgaaacagctaaaatatttcaaagaccaccgaaaacatagatattagacgctactataaatcccgtaaggatagccaaaaccactgaacagaagacaaaaatgttgttatatataattacgtaatgttagactttcagatatgcactgaagtaattgttaacgcaggaatgcagttgcagcattcccgagcaaggcaatccaatgccgttttcttcatattgtccttctcccaggctgagccacatccatctcctgttgccggccattc

SEQ ID NO: 38675 - DNA, 438 bp, DROSOPHILA
atgctcagcacattcaagatgcgatctgttctgcagactcaaaagatattgcgatcgatgtgccatgattcgcaacgcattaaggcgcagtttcttgtccaaaatggggagtccccttccaatgccgaggaggtcgaacaggataaggaggagcagcccgtggcggagccacgcccccgcgcacccatgcacaatccactaagtcgacgccacactgtgaacagctctcgactccagtacattaatgacaaatacaaggaactggccaacgaggtggagttgcgcaaaccgaaggccaagccattcgtgtcccgccacgccctccattcggggcggtttgataagtaggactccagtcgccaaacctcgcagccccattcccaagtgatcgaaaatgattacgaaagttgcattcttttccggttaaaacaaaaatag

SEQ ID NO: 38676 - protein, 115 aa, DROSOPHILA
MLSTFKMRSVLQTQKILRSMCHDSQRIKAQFLVQNGESPSNAEEVEQDKEEQPVAEPRPRAPMHNPLSRRHTVNSSRLQYINDKYKELANEVELRKPKAKPFVSRHALHSGRFDK

SEQ ID NO: 38677 - DNA, 3753 bp, DROSOPHILA
tgaacgcgtctgttgatactgattacccataaattaattgtaaatatgcagaaagcaaagtatcctgaattatttattaacaaattttattgacagtcgctgcttgacttaattactggcatatattttattaatttcgcaatgaaaaacaaaaaaaaaaaaaggaaaaccatggagcccaaccggaaaagcaacattttgtaagggaatattgaaggtctatcgcgggctaagggaagtgcttcctttatatttttgatggcggtatgtttccactcaccgttcggtatgtttgcccaattactgccgcaaaaatgtcaggtgatttcgaaactggagctttcccactttgtgataaattcgattagattggaaaaacgagcacattgcgagcaaataaaatatttgccccacccaccttccgaggaaaaccccaaaaagatccgctgtccggtgcctggttaataattcagggccccaaaatatgcgcaaataaagtcaatcagtgtgacaacaaacaggcaggactaaccactcgcgcacacagacgcaaggacacgcacactggcacggataatgacagacgcggtgtagagtagcccacatcccacagagaaaattgtacacaaaaagccacgtaattaatggaggtagaaacatttaagccaatagcattaataaagccaccacaaaatcaatatccggctacgaaaacgcgcccgtcgcctataaaaactaattaataatttccgaatgggctattaattaagcctaattatctgtgcatgggtcccggcgacccgcaaaatgttgactcttcttttccgccccaacccctcttgctgcccgaccgggcttctgttttgacccccgacagcccccgatagcaaatggccaaatggccgaaacaaactgaactgaattttcggcaggacctggtccgttccattgatttgtttgtcgtgtatcctgctcattttttacttcctgtctccgcaaaatggcggcaaaggtcccgcataatgcgcggaaatcggtggagcaggaggagaaggaggaggaggaagaggaggtggcctccaattagcggcccacatgggccatcaaatcgccagggcaggaccttcgaccttcgtcgggggctacagctaatccgcaattatcttgtatttatccagtgtcctgtggttcgttcgtttattgcgtgcttttttgcgacccactttaggagctgtttaaattttttaaatgcatcctatgcttagctactactaatttcaatcatttatccgtttattaactacatactcgaaatttgtgtaattttcaggtgcaagcaacacgcactggggctacggatcagctgcctcagcatattcaccctatttggccagcagcggattatcgtcctgcaccacgcccacttccgctcagttcaacaatccggccctgggcttcacctgctcctctaacgatcagagcaacaaccaggacttcggaggagccaccaatcgcgactgcgtgccgagtaagtcttcgctacttgaaccaaaagatctatttaaatagatccacaagaaaacagtctaaactataacaaagaaatttcatcgttaatatgaaaatttcaaattccgaaaaaagagaaaacaaaaaataactgcattttaaaagtttgagctttagaattggcacccatagatccttcgtagataatttagcagcaaatttttaattctgaacatcaactaccatttcttgcagtgctgcccgactcgacggccagcgatctcgaccagcacttgagcagcctggtgggctccaccagtggccagatgacgcaccacagtctgttgggcgccggcggccagacctcaatctcctccacggtgaacggggccagcgggggcggaagcgcgggagccggaaccgccggcggtggagcgggcagcggtggaggtgctggcggtggtgcgggcggcaactccatcctggtgccgcgctaccacacaaacgcgagcaacgagtacaatgtgcactccagccagaatggaccgcggagcctgtcggacagctcgcaggcggagtcgccggtgcaggaggacctgctgaccaccaacacaccgaacctgggcagcacggcgggcggtggggcggccaacggtggtgcgggctcgaatgcgggcagtggtgcggcgggcagtggtgccggtggtgctggcggcgcctcctcggcggtgggcaatcccgccatgctgggcgccaatcagaacttcccgggcattgtcaaccaggcgcaacactcggcggcctcggcctacggcggcggaaccggggtggtgggcggaggacatggcagtgccgctgccgctgccgccggatgcaatggctcactgtaccccgtgctgcccgccagtctgctgtattcccagctgtataccgctgccaatcagtccgcccacggcttccactcgcacaccttgcccgcccacgcctcgccgaactcctccgtgcacggcgagctccagagcgtcatggatcacatcagcaatgtgggcgtgcggcagcagcacaacataatggccggcgggggcgtgacccatccgggcgacctgaccctgatcggcaactgcggcgcctcggtgaggaacatcgaggacgggaacagtaatcggcaggtggccgccttagctgcccatcgcggccaccacaatcccaccgacaatgggggcagcgtttggaggccctattgaggtcaggttctgtggtgcggctcggcggttctatagtgcgaggggggcgggccgcagcacgaggcggggatgggcgtgggaatgggggcgggagtgggcgtgggactaagcatgggcatgggtatgggtatgggtatgggcatgggcgggggcatgaactgctttgggggcttctaatctgtacatagttgggggtcaagggcgagtccagctagttgattaccgattcgcagcgaacctttcaaaggggaatcaattgaaaaattccgatattagcgattttagtaatgagtatcaccgtatttccgcttgcaagatattctctttacgcaatgtgcattaatgctatcgcaactatcgatttcatatcgaaaaatcaacgatattacgtgcgaaaacggttataaaatgctctttcccttaacttaaaagcgatcggtgatcgataactggaatcgccatacacatatacacttttataaaatataaattgtaaatagatggaaaataaagatgttatcagagataaagaaaagggttggatgtccaaaagtgaatattttactttggcaatccgaagaaagtatttatctgtatatagtgttagcggacgtaaaacatttcatatcccactaataggcatctgaagcattgtttttaaaactctagaagttgtgtgtgtgtgtgtatgttttttttttttttataacatttgaccataaagtaaaacgaaaatgatcaacatttagtagaatttttcggagcgcttcaaagccctccacaatagcgtatagttaaataaaaaagtcaaaactataaactagagtctaagacagaactaattagcaaatttgaagggcagaaagtatgcccttccgaaaacatttcagtggatttgtagagcataaaacgcgctggaaaaaatgtgtatttcaaacagcagtgggtctgtatcgagttacttttttttctttgtatttcgtattttgtattttttcca

SEQ ID NO: 38678 - DNA, 1314 bp, DROSOPHILA
atggcggcaaaggtcccgcataatgcgcggaaatcggtggagcaggaggagaaggaggaggaggaagaggagtgtcctgtggttcgttcgtttattgcgtgcttttttgcgacccactttaggagctgtgcaagcaacacgcactggggctacggatcagctgcctcagcatattcaccctatttggccagcagcggattatcgtcctgcaccacgcccacttccgctcagttcaacaatccggccctgggcttcacctgctcctctaacgatcagagcaacaaccaggacttcggaggagccaccaatcgcgactgcgtgccgatgctgcccgactcgacggccagcgatctcgaccagcacttgagcagcctggtgggctccaccagtggccagatgacgcaccacagtctgttgggcgccggcggccagacctcaatctcctccacggtgaacggggccagcgggggcggaagcgcgggagccggaaccgccggcggtggagcgggcagcggtggaggtgctggcggtggtgcgggcggcaactccatcctggtgccgcgctaccacacaaacgcgagcaacgagtacaatgtgcactccagccagaatggaccgcggagcctgtcggacagctcgcaggcggagtcgccggtgcaggaggacctgctgaccaccaacacaccgaacctgggcagcacggcgggcggtggggcggccaacggtggtgcgggctcgaatgcgggcagtggtgcggcgggcagtggtgccggtggtgctggcggcgcctcctcggcggtgggcaatcccgccatgctgggcgccaatcagaacttcccgggcattgtcaaccaggcgcaacactcggcggcctcggcctacggcggcggaaccggggtggtgggcggaggacatggcagtgccgctgccgctgccgccggatgcaatggctcactgtaccccgtgctgcccgccagtctgctgtattcccagctgtataccgctgccaatcagtccgcccacggcttccactcgcacaccttgcccgcccacgcctcgccgaactcctccgtgcacggcgagctccagagcgtcatggatcacatcagcaatgtgggcgtgcggcagcagcacaacataatggccggcgggggcgtgacccatccgggcgacctgaccctgatcggcaactgcggcgcctcggtgaggaacatcgaggacgggaacagtaatcggcaggtggccgccttagctgcccatcgcggccaccacaatcccaccgacaatgggggcagcgtttggaggccctattga

SEQ ID NO: 38679 - protein, 437 aa, DROSOPHILA
MAAKVPHNARKSVEQEEKEEEEEECPVVRSFIACFFATHFRSCASNTHWGYGSAASAYSPYLASSGLSSCTTPTSAQFNNPALGFTCSSNDQSNNQDFGGATNRDCVPMLPDSTASDLDQHLSSLVGSTSGQMTHHSLLGAGGQTSISSTVNGASGGGSAGAGTAGGGAGSGGGAGGGAGGNSILVPRYHTNASNEYNVHSSQNGPRSLSDSSQAESPVQEDLLTTNTPNLGSTAGGGAANGGAGSNAGSGAAGSGAGGAGGASSAVGNPAMLGANQNFPGIVNQAQHSAASAYGGGTGVVGGGHGSAAAAAAGCNGSLYPVLPASLLYSQLYTAANQSAHGFHSHTLPAHASPNSSVHGELQSVMDHISNVGVRQQHNIMAGGGVTHPGDLTLIGNCGASVRNIEDGNSNRQVAALAAHRGHHNPTDNGGSVWRPY

SEQ ID NO: 38680 - DNA, 3243 bp, DROSOPHILA
aaaaaaaatggtattttcttaagaactatgtttaatttgttgcaatattcatttaagagggggaaatacagagcaataaatatgttcaatgtacacagatctcgtatatattcgtgtattatgtatgtcagccccgccctccactaattatatatatttgattcttagggccatgctaattgatttaaattcgatatgtgagccacttacattacggttaaccataaaaaaaaacaaacaaacaaaattacttgacgcgagtgttgctccctgaatttgttatttgatatttcgtttgaaaattattgttataattatttaaccgaataaccgaattgaaaatagaggcctagtaagttcaagttgatcaaaaacaaagatattttgccatctgaagtaattttgatataatttctcatatatctggtgcatttgataattgattttcgagttttaaatgccatatatttgattatttgaacgattttttcactgaataggctcaaaatcatatgtgctgtttttgaaaaataataattcatgaattcatcaagcatttatgagaatgacaagagacatttaatttcattatgctcaagtccttaaattatttttgaaatgtttataaaagtggtattactttttttgtgatttattttgttgacaagcgaacataaatcggtttaatttcaaacataatttattgcattacatgaaattcctgttcctagccaaacttttctattagttttagttgtaattgaatatcctgcttggctcttccaatggctcaacaaattcaagttgcaatccccgccagctgcgatatggcgactattcacaacaccacaagctcgctgctgcgccctcttcctgcccatttcccctcgctgtggaccagctaggtgacccgctccgcctcctgctcatcgggaactccgacgccgcccccttgaccttgggccgccagacatgtgccgagcaaggcggccgccagccgctagtagggacgccagacatccgccgacggtttgggtgtgcgcgtcctaatgggtccgactgcaccaccaccaccgactccgccgccatggccgcttgaaccgctggccgagcgcgatgtggtgctcacgtcgtccagatcgatggtttccacgggggagggcgatcgcctggtggagctgaccggcggcgaggcgtttggattggcgttctccgcgtccggcggattgtgggttatcagtgtgacacagcgcttgatcaggttaacgccatcgtgatcgggattgctgcccaatggcggtatgccggagttctcctggccgggatttatattcgcggccgccgcagccgccgcgttcctcagccagggtagatcactgtagctgccatatagctgggtatatagccactggctggattgcggcaagaggggactttgcaggaagagttgggcggccagagcgggattgaaactatgaccgctgggtgcaaagtgatttccacctgcagcggcaaagccgccgaataattcggtgggatttttgccacttcgctggatgagggcggtgaaggcgccacccgagcccggggaactttcgctgtgcagcgggccctgaatgccgccaccattccgacttaatccgcccacctccgcttcctcagcctccgcctctgcttctgcttcagcttcagcttctgcctctgcctcctcctcgtcgtgggtcaaaggggagccgaggctttttcgcggcgatcctgttaccgaaatgctgtcgctttcgaaacccgcatcaatgtgactgctgctgttgttgttgttgctgttgttattattattgtcatgctgcaaactggtgaccggcggtggcgatgacgtcattggtggctggacaaaggcgctaagctgcgtaccgctcgtggttgtggtggtcggagatccctccggactggtggtgctatgtgccgcccccacagtggccaactggtgctgctgctgctgctgctggtgctgctggctgtcccctgcaggaaaaaaagggaaattaatatatatatatatatattgcttaggccatttggttgcgggatcgccctgtcaactaaccactcaatccacgcagaccactggcggtgggaaaagcggccgcatggtggccaaaaaagggggcggcggtaaaggccgctgggcgaccgcccaaggccatgtgggcgcgccagtcgggcgcatgaaggtggctgtgcatccccaccagatggtgtgcgaatcctgcaaaacaatacaataaaaaaaatatatatacaatatacaatataaaactacagattgccgtattatttaattgaaatgggaatttccaagccgtaaaactttccaaaaataaatttttcaaaagcccccgcagcattgcctatttctttatttttaaataatttcttcggaagctgtatgatgtagtctttttcttgttcatacaagtatacgctatactcatcgtatagaagaacgccttttagaccagaagttcaaagtttaaaaggccccaaaaactaaaaattcaaactaaacggtggcaaatccaccgtgagcaccaaatgcaatgccaagatcaataaccgaaatctcgcagcccgaaaaaatgagccaagcgcacggaaaacgaaggccaagatgaggggcagaaagccaaaagcctcgtctagaccacatatagcccactgtgcaagaccaaaaatgctgccgcacatttcggttgcagcaaaacaacattggtaagggaatccctcttaaggggaggccaccaccctgccgtcattaccccattttccagtggcggccattgctgcttatgtacgagtgagtacagagaagccacctgccccaagacaagcttctaaataaattcattaaaattatcccccagccagtggcgtcccgctctcgcattcgcttcgtctctgtcggccgcttcttggccatgtccatgtggccgccatcaagtggcagcccacagttgcgggcatcctgcaggatgcaccccccccccccacccctcctacaccaggaagcgtaatggaagatgcagtcggagcagcccgagaggctaaataagatggctgaaggcattgccgacggcgaaagagccaaaaacgggccaaaaggaccaaagaagagcactgcaacatatcacgtatacgccacgttgtgttatttatcatttaatctttaggacctactaagggcta

SEQ ID NO: 38681 - DNA, 1161 bp, DROSOPHILA
atgcacagccaccttcatgcgcccgactggcgcgcccacatggccttgggcggtcgcccagcggcctttaccgccgcccccttttttggccaccatgcggccgcttttcccaccgccagtggtctgcgtggattgagtggggacagccagcagcaccagcagcagcagcagcagcaccagttggccactgtgggggcggcacatagcaccaccagtccggagggatctccgaccaccacaaccacgagcggtacgcagcttagcgcctttgtccagccaccaatgacgtcatcgccaccgccggtcaccagtttgcagcatgacaataataataacaacagcaacaacaacaacagcagcagtcacattgatgcgggtttcgaaagcgacagcatttcggtaacaggatcgccgcgaaaaagcctcggctcccctttgacccacgacgaggaggaggcagaggcagaagctgaagctgaagcagaagcagaggcggaggctgaggaagcggaggtgggcggattaagtcggaatggtggcggcattcagggcccgctgcacagcgaaagttccccgggctcgggtggcgccttcaccgccctcatccagcgaagtggcaaaaatcccaccgaattattcggcggctttgccgctgcaggtggaaatcactttgcacccagcggtcatagtttcaatcccgctctggccgcccaactcttcctgcaaagtcccctcttgccgcaatccagccagtggctatatacccagctatatggcagctacagtgatctaccctggctgaggaacgcggcggctgcggcggccgcgaatataaatcccggccaggagaactccggcataccgccattgggcagcaatcccgatcacgatggcgttaacctgatcaagcgctgtgtcacactgataacccacaatccgccggacgcggagaacgccaatccaaacgcctcgccgccggtcagctccaccaggcgatcgccctcccccgtggaaaccatcgatctggacgacgtgagcaccacatcgcgctcggccagcggttcaagcggccatggcggcggagtcggtggtggtggtgcagtcggacccattaggacgcgcacacccaaaccgtcggcggatgtctggcgtccctactag

SEQ ID NO: 38682 - protein, 386 aa, DROSOPHILA
MHSHLHAPDWRAHMALGGRPAAFTAAPFFGHHAAAFPTASGLRGLSGDSQQHQQQQQQHQLATVGAAHSTTSPEGSPTTTTTSGTQLSAFVQPPMTSSPPPVTSLQHDNNNNNSNNNNSSSHIDAGFESDSISVTGSPRKSLGSPLTHDEEEAEAEAEAEAEAEAEAEEAEVGGLSRNGGGIQGPLHSESSPGSGGAFTALIQRSGKNPTELFGGFAAAGGNHFAPSGHSFNPALAAQLFLQSPLLPQSSQWLYTQLYGSYSDLPWLRNAAAAAAANINPGQENSGIPPLGSNPDHDGVNLIKRCVTLITHNPPDAENANPNASPPVSSTRRSPSPVETIDLDDVSTTSRSASGSSGHGGGVGGGGAVGPIRTRTPKPSADVWRPY

SEQ ID NO: 38683 - DNA, 15004 bp, DROSOPHILA
caggaatctaatagaatctaatagaatgaatggtctgagagtcacaagaagccttttagaagttattttaaattgtttaaacattaataataaattagattagggcaaggcagaactatatactaccttgccttggtgccaatataacatttagtaaccacttaagatgtataaccaagtcaaccagaacataaaaatgctcttaatcaaaaccatcgtttctagcggctttcgttggccaaaacaactcacttctcgacgtttgcagacatagcccttaacaccacaatccataaaagcgcaagtcagctcattaaagactaagcccgactcaatttgcgatgagcccgaaaaagaagcccgcggccatcgtgggaaatggaaatggtaacctcggaacgggttcttatcataatgaggggtatttccgcgacctatcgggttatagacaaagatctctaattaacccattagccaatcccagcccgattttccagctttttgttggcccaaagccgcgggcatcgggattttggcttcggttcgtttaacccctggataaaaggtatatttatttacagctaatttcgcgtgcggcccgcggccaaaatagacaggcaataagctcacctggctttaaccctcccacccctctggcattaacccccgactgcccatttgacattgatacgtgtggttcggtgtctaacgagcgacaagcccttgaggccatttcccaaaagccgcttagtttccagtttagctcccgtcaactcactgcaccgggaaaaaaggatggattttagtgtcaaattaaggggctctcaatgatttccaagcttgataaaagtttaaatttaatttaattaattaattatagggaagagttcatcagcttcaacgtcattcattcatttaggcggaaaatccattgcccattttatttgtaatggaatagtttttcgtacaaactattgtttatattttaacgcaaattaaatcattttagactaatcgaatagcccgaatttctctcagtgtggcggcgatgtttgcgcttaagccttccgaatccctgattcccccggaatctcctccaccttttccgcttacctggcaacttgaagggcaatccggccataagtggatccggtccgaaacgttgcggcccaaaggcgaacggatggaatccctggtgtcgcaccttcgatcttggttccctcggcccatccacggtcaccttgatggccttggtgtaggtggctatctggatggggttcgttgagatgacaatcgtcagtgtgaagctcttgcctgcaaaatatattaatttcgaatgttacaaaaaatgcaataggatctggtaactggtattatcatatcatttttgtgaaaatttaatcgagttatgcaaataagatacaagtgatttttatttgaaagccactagacaatccttattaattaaaattaatttccagtttatattcatcttaatttcagttatttaactcgattctgtgaattgcaaaataaaagaaaataaaccttcaaaccacttcaagcagccgccagcccgggcaaaatattaaatgttaattttttggcgaccattccagtgcaatcagggtcagaaatacacaccacccaccaacaccaccctttccaacccacttgccacccagtctttttggcactgccgcggcagctgcaaattatgctgcgaatttatagatttgccatgaccctttgggttgccatggccgaagtggcatgggttctagtgggttctagtgggagattggctgccgaactgcacatggaaattaaagtgcggaatttcgaatgggaatggaaatatggaaacgggcagcggcaacgtttttcgcgaaaattaacccccgacggagttgtgaaagcttcataaaaacccacacacccactggtagacatgcacatattcagatttgcacatttgcacagagcggagcgcataaatgaatgaacgagttcaggatgctgtcagccatggggatcatgggggtaatgtcaggggtgaatcggtttttgcggggaatcgggaatcgggaacgcaactatatgcacttccttcgcggccaatgcaatattaagtagcatgcggcgactttgacatgccaactattgtggcgctgtctggaccatattccgattgcccaaatcccatatagcaaatcccagatcccagatctcgtgcccttcatcctgcgacccttaaccctgcacagtccgacaaaggaacccacccccaaaaaaaaaacaaacggggcgctgcatatttgaaatatccataaagtgggactcccagacgcgtgaatataaaattcatttgccaaacattttaaatgccaatgtgcttgagttaatcaacaaaggtgaaaaactgagaggggaatgttcaacttttaagggaaagctatattagaaacaacaactcatttttgcagtatgtactatagataaataattttaaacccattaccaccaccaccaccacctacttcaggtcaggattttaccatccagtgcgtatggatgggtcataatgaagatttctttcaagactcgatgttaacgaaaactacgcgttagttgtgtatggaaattttcttggtcatatggcctcataatccatttggtgcacccccaacacgacgaataatttcaagtcatttgcagctttctggtctacaaccaaatacgaacacataaaaaacaaacaaacttcttagattaatattaaattaaacgaagcatgcaaaaaacgcaagaaggcggtaatcattaagacaaagggcagcaaacaaactgacgacgtctgaattttcccttggctctgaagctgtaacggctgcgatggagaagtggaaaagcgggaaagcgggaatgctggatagcgggatggcggaaaagtgggagaaaaccccagaaacccccgcaagaaaacaaatgaacataaacacaggcgaaacgaaccaagaaacccaacaaaatgaaatgaaacttttttaattatgcgccctcagcaacagcagagcaacaagctggaaaagtgggtgggaaaatcccgatgtggtgatggtggcgcgggtgggggggggatgggtgtgtcgggtttagtgctgaagcggaggggtttcaagtcaacaagaaggagtaaccagagaaggctcgcaaagtggctaaagacaaaagactttggcgtcgtctatttttgtttttcgttttttttttttttcctttttctttattattttggctcgcttttgtgttttgccaaatgagcaagaattgcaaataaatctgtagctgctagccattttccaccaggccttaccgcgccccctcccaccactttcagtcattttccaagaggcgtggcatgcacaacaacggcgacaaagaacttttgcctgctaataagatgaaaaaccattaaaagtcgacacaagtcgcgtccattgcaagtggaaaatttgtgggtggcaaggaggtgttgcgaattccgagggaaatggctgttgcgtgggaaaggggtgcaaagccaagtgggtggcagtgggcgcgtactgtgtgtgccgggttaaaatgttgtcattttcgcaacaaagcagaaattatcaccactttgcaaaaggcgacgacaacgacgacggaaaaggagttggaaaatgcggaaaagggctgggaaaaatgaggggttcgccgcgggacggggcgtctcggtgtggacaaagtctgcacccttttaacaggacccaactgcgacatgtgtgtgtgtgtgtgtgtgtgtgtgtgtgtgtgtgtgggaacacagtggacgcaaaggtaagtcgtatatcaaaacggttaagtactgcaaacggatcttgtaattaaagttctacaagtatatatataacaatattttataaccaaagtaaattatcattgaaagtttaaaatataatacttaagctaatgcaaaaatacataaacatatatcacacatttttatgctgctgttttcaatttcttctctttaaaatccttaaagtcaatggcattaattccactgtaactcatttatgtggaccccaatgtgtgcgtgtgtgtgtgtgtgtgtctgctgggcgctaagtgattttaaaacaaagtttttgaaacgtttaaccttacacaacaaaaatgtttcatttgctggcagtgccgagcagaacagagcagaagccaaagcctttgcctgcattttaactttcgatgctgataatgaaggcagacctgccccccaaaatgggggcggatggctgggtgtttgggtggatccaggacagcaaggacaccgacaagggttcgtatgcttaggcaatttaatggctgccactgctcctgctgccttttgccttgtgcggcgttaatgtcgttagtagcatggcgccataattataatttgacataagacaagaagtctgaggttgacaacaaaatgacattttaaatacagcaggatgcggaacaaggattcaacccccaggacgcacagcccaactccacctccctcaactcaactcaactcaactcaactgagctgaaggacacgcccatgccaaaggcgagtgctcgtatttagacacttaacagatcataatttcaacactttgcctaatgtcagtgaatttgcttaatggccgggcttcatcgaccatttccaggggatcaaatgtcgttggagtcgaaattccgacttcatagccttcttcttctccacccacacatgctcgaaactttgcccgtggcccttggaaaaatatcttggcattacaattcgcccagttcgttgggtccagtcgaaagtctctctttctttgcagtttatttgcataagctccactttgactccccaaaggcactgagatccgagctccagccatccataaatattcatatgtttattttatagcgaaaatacacagtttgtgtggggctggctgctcttttcctttgacttggcccagttgagactgcgttcagacatttagttgattgttgatgttgccactgtcgcttcaagcctttttcattcacaaactgtagatttctgccattaagctcttttttttaacattaagtacgtagatagttgacccaaaacttttcaatttcaaacaattttctatagattgttttttaaatcaattttttttcttttttgagcgtgccttctgaagcaaatttttagattacgaacaaatgtatttcttataagaatgcatgaaattaattaaatctaaaaatgccattcctgcaacaaatagtgttgtagttttcaatttctcatctaggttttggctaaagtacggctctcagatagaagtgattaaattcgtttgattgcgaaggtatttattgataatgcttcagttacttggctttgtatctgcattacatttctctgtcctcttggattttggcccttggaaatgggactttcgcccgaggcgatttctctcttcgcgagggtggatttaaaaataatgagagtgggacgcgatttggtttcactcggtttcggtttaataatcataaattgtaaccctttttagcgcaacttcttggctgcgcgctgtgttgacatccgcttctttttgttgtttcgcccaagtcgatggtggattgctggatttttggatttatgttacatggccgccgggcgaaatggcgatggaacaactttctcacatgccgagaaaggaaattaaatttccagccaagtcagaaattatattggcaataaatgaagacacagccgtagacgagcgggaaaatgagaccgagtcccagacgctgcctgcaattacgtccttctctgttctccattggcggggttggttgacgaaacgccggggtcctgagatatacgcaatgctgccaaacaggaagccggaatcgacgtttattaaaacggaaactcgagacaactgtgcggcggcatcgtcagcatcagcagaaaaatcggccaagatccggcgaaaaagaaatcagggaaaaggaaaattaagaggcggaggcggaaagaaaataaacgcgacaaagacgatggcgacaaggacataattctgtccttggggctagctgataagccagccccacccactgaagaacgccaccagacaccaaccaccatccagccaccgcccaccgcccacacaaaggacggaggctaaattgcaattttcaagatttaagcgtgaacaataaatgtcacataatctgtaagtagccaaataaagggactaagctatttaatttaatttatcgcattttaaacatccagcaaaacaataaggccggcgaccagacgaacggcaaaaaaaatggtcaacataatatgtatataaagcgaatttattgattgcggtcgcttggaccaggaaaatccgagagccgtgacttataaatacattttgggacacaatttgttggaatgtcctgcgataagaccagcaaaacataaattaaggcggcagcagagaggttaagataacacgaaatcgtctgggtattttcactttgttttttttttctttttctatgaatattcgagactattttacatggagaaggtgcagaaaacggaccccatttatgacatcttagttaaataaaatatagtttaatacattaaattagttgtttcgactaattcaatctcttgattggattacaaatagttaagataacacgaaattctctgggaattttcacttgggttttttgagagtacgacaaggtattgaaaactgacttcttcgttgaataaaatgtgtttagttacattcaaaaaatagtttggcttgcctaatcaggagattaaatgctgtttgtttataataatacattgtatgctttattaaaatggaaaatggtaagcaatatgaaatggtttgaaatatttcctgatcaaattggaattttacaattaagaaaccatgaaagtgtcaacaaatcttgagggccagttggggtttttgagaactccttctgctgtttctcaggaccgatgatgcgggcaggaaaatcctgtgacacatttcattatacaaatatcaattaagcacacggcaaacacacaaatgactagatgttgtgtgtgtgtgtgcgtgtgtttgtgcgtgcggcaacaccaaccggaagttagcaaccccatggcaaatcgcgggtggggttgggatcgaaaaaaacctgtcataagggctggcggctgcttaatgaaaattaaaaattcaacatcaaacgcaagtaaaatgtaaggcagcaacaacccccacgggtgaagaagtgttaatgtgccatctgatttatttatgcaagctgtatgtggaatgtgtggtagtgtgtgtctgtgtacggattgcatgaattttgtgagaattcgtgacttcaattaaattccattcgatactcaaggaatttccgaccgatgatgcgcaagtaatttccgaaattggatactgtgtgccaccagcaaacaggcaaatacgaatgcaaacaaacacaagtccctgtccttgtgtgtgtcaccgtatttgtatttgtatctgtatatgtatctgtctctgtgtctgtgtgggtgtgtgtgtgcatttgtattaaatcaaattttaattgcgcatacttgtccctcggcaaatatttgcaacgctcgctcgccaccgcctttgactggaactccgtctcatccgccagagaaactggccaaaatgctttagcgacaaggaatttaaggccaacacacatacgcaaacacacccacagtgttcaaacaaacattatgagccaacaggcaacaggcaaataaacaaacaaacggcaaagaaaattcaactgtttattcgcccaccaaaaaaaaaaaaaaaaaatatgtatgtacaagtagcattaagttaagttaagcccccggaagaaaaaaagagaaagtctcaaagatcacatttaatagaaaatccaaaaaatcagttgaatcgggaattttattataaatgtggcgtattaaattgaaaaaggaagtgagtttatgctgaaaaaagaacaaacctataacaatctataataatgtatcttttaggtttttcgtatctttaggtttctaaaatgactgaagcgcgattttaggtcttttaattgcttcaagccaaaagcagctttcgaatcagatttgaagcccaaacttaaatagttgataaaacacacttaaagtcctgccacactacgtacacagaaaataacgtacgtggcttagagttttggctcctttgagatatgtttattaacatgaatataatgcatattgttgtgtgtataaagcaattgttagtgtgtcaagtaaaaagcactagtagtttggttcaggttttaaatgttttaagccttaaacaaacttgatttcaaacccatcttagactcgtttagaaatccgctaactggaattgaagatgccaggtttgtaggggtataattcccctaacgatgcccgaaagagtctatataaatactcagctagcgaggtcatcgggcgaatggcggtggggcggctttgtaaggggggggggggtgtgctggtgggttgggcgtctacgactaatgcctaaataagtagtagaggccgtcactgccccgcccccaagaaagtatctaagcggcagctcctaggaaatctgtcaaatgtcaacggcagcagcgagttggcaacgttgacgttggctcattaaaaaacgaacttgtcccggtcgatgttgtttgtgttgttgtcttttgggactgctgctgacacctgggcaaaagttttgtgtgtgtgttggttgatgcacggagagaaatcagcggggtagttgcaaaattgaacccatagtagatagataatagttgtaaactttattacattcaaatgttttaaaaccttgtgagttttaaaagaaaatcaagaaaatattatatttttacggaatatttaaagaaaagtactgatccgtttatgaagtaatgtatttgtgaatatagatcaaaatatgcatttttgcgttgacttataaagtaagcatcttaagtaagccgattgctatttttattaaagtatttatgcttaaataagtaatggaattattttgaaagaaggactagatttgttggaaaaaacgatgttcacgacgatgttgctttgcaatggttacgttcaagttatacaaggaagtattttttcaaaacaaaataatcaaactagaaaagaaaactaggaattttcgcgcagtgcttttcgtggaggccttggttgaaaatggcgaccattttggctgttggcctgggcgtttatcacattgctgctattaattaagcttaacgaggttaccactcgcaaccacaccccctcgccgaaaaatttgtgggcggaacgggtggcgggggctttttcatcttagtgcggcaaacttcataatgaaatttcaccttcatctcattaaaagtcttgagcatttttcgagcgctgtgctgaaaattgatgcgtgtcagttggaaaagggttttttagtcccagtcgagaaggcagtgccacgcccctaatccccaccagagcgcccaagtctgtttgtcagcttgtctgccatcgcgttctcgagttttctcagctgctggctgccaacgcgggggcgcatatttaatttttaatgaagtttaatggacgccggaagctttaaagaaactgaggagcggaacccggaactgcgaactcggcaactcgaaagcacaggaactcaatggggaaccgagaagcagaacagaccactggaatattcactccaaacggaacaggttgcacatttttctatcaaatcttcaatttctaatgtgtggtggtcctttaagccacttggccgaatttgcaatcaaaatactaaagaaaaacctagtctcaagtatgattctggatgtacaagtataaattaaagtcgttccatggctatcaagcgatcacgaaaacaatcagctaatgcatttgacaaaattgactggcaatcaactaacagcactgccgaaaattcctacggggctacgtagtgcccagtctatgggttttaactgagcaataaggatgcaataatcacttgcagttaattaacatattatctgcagcttagatgttgcattgcactttggtaatgcacttcaaagtgctggcgcatcagtgtgcagctcacatttacatgcatatggcatcaataattacatgtgccggacccccttaacccttcacacttcacccttaacccttggccgcccgcctgcccggcagagaaatctctttcgacgaaacggcatccaagtgattgtaattcattagtcgacaacaacaagcccgatgcacttgtgcacatgtgtgtgagcggtgcatgtgtgtgggtgtggattatgcagtttccgcttggctgcaactgcagttccatttccccgtttgccatttccacattttccaattccatttccacgcctgcaattgcgattgcgattgcgattgcagctgctgatgccgccattttatctaattgcgttgcacccaaaccaacggcattacgcatacgacgcgtggtccaaatcattaaaattacgaatgcttcacgcacgcgaaaaaatgaattgggcttaaagcaaaaaagcgggtagggaaccacaagatgatcaacatataacagtgaactgttccgaaagcgatttcagtttaaagcttacttctaaacattccaacgaaaactagctctaacttataattttcaaagcaattttcaagtaattaaaaacgaaatagattttatgagaacgttttactttgatttcataaatataaaacctagagcagaagcttatacaatattctctttcggaaaactagaggacaaactaaaggcaatgcagttctttgacaaaaaaattaaaagaaaacttcgtaaaaaactgtgaaagaaagaagaaacgcagttttaaggaccattctgtgaggttcattaggcgtgtcttgctccgttttcaaatctcgttacatttccgtaaaacccacgaacgagagggcgctttcccggcaattgcgataatgaaaggctcttttacaggactatcaatagagctgtcctcgtgcgagccaccaccaccccattcgcccacccttaacccatggaggccctcataaatttgctgcataccgaagggcgctggagcgtctgcagccttgacaactgcaagtggcattagttgtagcgaattcaaatacgagcacgaatacaaatacaaatgcaaatacaaatacaagtgcagatacgaattcaacggacaacaattacaattgcaggctttgcattacttttccctagtacaagggatttgcatttgtttgctaattgaaattaagcaaataatacgaagcgagacttccacccacgtaatccctttgtagcgcattaaaacgagaagggttcgaaaaaatgaaagtaaataaaatgggaggaaaaaaaaaaccgaaagggttcccgtttcgggttaaataatttaaatccatttgtaaaacatttgatgctgccctttggcaattgtcacgcccctttgcccgctggccacctttgctcccctttttttttcttacttttcccgccgataattagtatggaaaaggcgcttggaataatcaaatgtttaaaaaagatttgccaaagtgaatcccaaggaattatttgccacttgaaacgtttaaaaatgtcaaacaagagaatggccgaaatggctgagcggatggatggatggatagatgtactgtagatggccatagaagacctcgctgatgagggcgcccaaggagcccttaacccaccaccgccacccgcgttttgtcgcttttttcgaggggtcagacaaacttaatgagcaaattgtcaaatgccgcggcaaagcgcgcacttagacatgccctgaaaaatccccaagaaagataacttgggcgaaagtaaaagttgccggggctttgaataaacagttacgctgatttaatttgccagcaacaaaaaaaaacagaaaaaaacagaaaaaaaaaataacgaaagaaaaaaaaccaaaagcgaaaataggaaaaatgaaggcaagggaaaattctatcacagtatgttgtctgtcaccctcgatttgatttttaaattgcgttcgtgataaattgacgaaatgaacagcaataacggcggcgagaaaaaatctcaagcaaaattgacaactgtcaagactgtctgccgtctggctcccgcctcccattcgacgcccctggacgtccccaatagacatataaaaattaactacagactacttatcttatttgctgatgcctggccaaaacgaaccgaggccaaggaccaaggagcaaggagcaaggaccaaggatcaagcgcacggaagatggctacaaaagtttgtcagcggcttttgatgtgttgtcctttatatgggcaagtgagtgtgtgcggatttttgattatatttctcggtacatggggtgtccctttttgggtgtgacaacaggaagcaagcaatcagcgcgaatgatatgccaaatggtaatgaccaaaagttaaagaatacagccaagccgacttttctcaattcattcgtcgaattttgtatgaaagtatgttcacaattttaatttaatagaaaaccaacatattaaaggtacgatacaattttgtggctggtctttaaatggacgtttttcaatatccttttaatcgattcactcaccccttccgcttctgcccacgaaccgcagatcattgaacttggccacctgatttttcatcacggccgtgcagtttctcagttccccgcagaagttctcatcgtttccggctcgaatggtgactatagtgccatccatgacctcgcccagtgccaaaaccttgaaggcgatcggtagagttttgtttgagcgccagtgcgtgggcaatgtggtgcagacctgttgggaatattgaacagttcttgtgagattttcagatattaaccacctttattttaagcttttggcacgttgaaaaaaaaaggcagaaagcaatgcaataccttttaattttttttaaagttatacttttttactattggtccagtttgggcaaggttgggcacgatataatctcatttaaactctaccaacattgtagtgatcggcgatcgtatggacaaacaaacgctataaggatggatatacggacggacatacggacagacataaggacgaacagatcgcctttggtatttcttttaccatttatatatattttaacgaagcaatttgacaattcctctcaacgcaaatcattagttttgcgcgaaaaaaaagatttggtcttgtccaaaaagagttattttcttataaaaaatgcattctcaacaacactgctatagaaatatatagaaatatatagagcgtttatttgttgacactcaattggtttttttttttttttagtttgctgaaagttaaaatctttgcagttatgagatatgagtacgcaccacatgtggagatcccgtcttgaccagctcgccaggatgttcggcgagcaggacgtcgacggtgcgctcgatgagattctcgggggttaagtagggactcgtgtccacgggctttgttttaacattattattattgttgttgttgttgttgttcgtggtgctgttgttgttattgttagtattattattgttggtggtgctggtattgttgttgttgttgttattgctgctggcagaggactcagcattccgccgcttcgttgtggtcgttgttgctgtctgttgttgctggtgctgcaacaactgatgttgctgctgctgctgatgttgctgctgctgttgctgtatttgatttgaggtggtcgaactgacctcagcagaaatgtgcattattgcagctgctagctgggcacaaggtatttcagggcccctctttggttgccagtactcagtggattcagtggattcagttgccggcgggtttcgtgggttttcggtttgatttcaatgcctgcctcaaagagtcgacgctttcaatccgatcattgtcagctcatttggtcaatctggaaaattaatgtggactgcgagtgagatttcggactgccagcggattttttgtgtgtctgtgtctgtacgttgttccccaaagcaatttctctggataatcgattgataaatggaatataatgtaaaaaataagcaaaatccatttaaaataaatcaaataaaaaacttaaaaattaaatgtaataaaattgcatgcaaaaactcctaaaacaagagtacaacaaaatacattaactagtttgcaccaatgcactgcactgtaatttatttcaaaagcgttttttggaacacacacacacacacacatagataatatctttttgtacgagctgcgatgcttttgttgccactgcttctttgtttttcagtttgcagcccgcataagtatgctgcactttttgtttattgccgtcagcgacaacagctcaattattattgcactttgacctcgggaggtcggggacacaaaggcacatccagattcggaatcagaatcagaaactgttgctgtatagtatcgctatctggaaaccaaacagaaaacagaagcagccgaattgaatcgaatcgattcgaaatgaatcgaattgaatcgaatcgaatgcaatcgcagcgaaccgcacacctttgcgcacaatttgcatttaagccgtcgtcggcgagtgcagctcaattaaatattaaaaaatcataaccaataatgaggaatttcgacccgtaggcagtgcccaaactaagatgtacgactgcgagtgtgggtcggtgtgaaaattccattttatgtccatcaaatggcgaataaaaatggcaaaaagccagg

SEQ ID NO: 38684 - DNA, 921 bp, DROSOPHILA
atgcacatttctgctgaggtcagttcgaccacctcaaatcaaatacagcaacagcagcagcaacatcagcagcagcagcaacatcagttgttgcagcaccagcaacaacagacagcaacaacgaccacaacgaagcggcggaatgctgagtcctctgccagcagcaataacaacaacaacaacaataccagcaccaccaacaataataatactaacaataacaacaacagcaccacgaacaacaacaacaacaacaataataataatgttaaaacaaagcccgtggacacgagtccctacttaacccccgagaatctcatcgagcgcaccgtcgacgtcctgctcgccgaacatcctggcgagctggtcaagacgggatctccacatgtggtctgcaccacattgcccacgcactggcgctcaaacaaaactctaccgatcgccttcaaggttttggcactgggcgaggtcatggatggcactatagtcaccattcgagccggaaacgatgagaacttctgcggggaactgagaaactgcacggccgtgatgaaaaatcaggtggccaagttcaatgatctgcggttcgtgggcagaagcggaaggggcaagagcttcacactgacgattgtcatctcaacgaaccccatccagatagccacctacaccaaggccatcaaggtgaccgtggatgggccgagggaaccaagatcgaaggtgcgacaccagggattccatccgttcgcctttgggccgcaacgtttcggaccggatccacttatggccggattgcccttcaagttgccaggtaagcggaaaaggtggaggagattccgggggaatcagggattcggaaggcttaagcgcaaacatcgccgccacactgagagaaattcgggctattcgattagtctaaaatga

SEQ ID NO: 38685 - protein, 306 aa, DROSOPHILA
MHISAEVSSTTSNQIQQQQQQHQQQQQHQLLQHQQQQTATTTTTKRRNAESSASSNNNNNNNTSTTNNNNTNNNNNSTTNNNNNNNNNNVKTKPVDTSPYLTPENLIERTVDVLLAEHPGELVKTGSPHVVCTTLPTHWRSNKTLPIAFKVLALGEVMDGTIVTIRAGNDENFCGELRNCTAVMKNQVAKFNDLRFVGRSGRGKSFTLTIVISTNPIQIATYTKAIKVTVDGPREPRSKVRHQGFHPFAFGPQRFGPDPLMAGLPFKLPGKRKRWRRFRGNQGFGRLKRKHRRHTERNSGYSISLK

SEQ ID NO: 38686 - DNA, 3902 bp, DROSOPHILA
tcgtggacacggatgaactcacttgaatcgcacctggtcgacgaagtcgccggtgaggcggcaggtgtgcggattgcagatgacattgcgctgcagttgctccgcggcggccgtcacctggctctcggcatagagagtggtgcccgcatgatccaggtaaacactcttgttgcctgttcgatagacggatagttaggttcgttatctgtttgcgctgggtatttcaccatggttctccacttactggccaatctagagaattccgcgtctatttgcgactgctccgatgcggagaactccggccgatatgatgtcatgttgggaactaactattcgtgttggctgcaaagcgggctttatttatttgcgaccggcttgcatttgttgcgccatactcttcttcgctggaaaaagccacggacagtatacatcaactatcacgttcagttgagcatttgctttgacttctctttgaacttactccaccctacacattttacgaagctcaatttattaagcttcttgtgcattatgtttgcttattgtaatatatatatcatattctcacactgctcaccaatattatagatgtagcattttaccaaatcttttccaattattaactctgaattgcatagaattttaaactcaaattgtacggtattaactagtcgttgtgcactttgcatggctattcaaacatatgttctgagtgttggcaaacaattggtgttaggaaaatggttgctaatggctaattggccaattgtatgacaataatttttggaaactacaatcttattatttaaaacatttataaaatgttttttaactacagaacattaaattcgttttcacatctagacgatagcctacacatacagctgattattcgatttacatcgatatcgggggccgataacagcctgcgttgattttttaaagtttttacctttttatttcacaattgtaagcagttggcaaactttgggactgcgaaatggagaatttcctgcggggcacgttgtccaaatgtctggactgtgtaatcacggatcagatgttggcgtaagtacatgatgcatccagatacgagcaaatgagtttctcaatggcttcatattcccttccagggccatactgaacatcaaagacgactatgaattcgacaactactttggcaatttactgagcgaggacaacgaggagcaccgcatgtttcttgtaaactgtcgccggatgctactgagtggcaaacagccgcggaacaatggaaaatatctctcgccccctctggcacccacatcacccaattgtcccaagcaaaatatcagcaagggtgccaagggcaagtcagggaaacacgtgaatctgtacgccagcgatggtcgcgtccagggcgacaccataattcttaagggtcggcggcattgcgattgccaggcgggccagcacaagttgatcaacaattgcctgggctgcggccggatcgtgtgcgagcaggagggaagcggcccttgcttgagctgcggcgatcccgtgcgcacgcccgaggaggagcagcagctggccaaggcggccagggagaagggcggcacgaagagcgccgccaagcagggcaaaaaatccaccaaggaactgtccacgcaggcgctggacaaggccttggcccaaagggatcgtctgctggagtacgacaagaacagcgagaagaggaccacagttatcgacgatgagctggactactttcaggtgggcttactcttattcaaaacaatttttgaaatcattacttattcaaagaagataagcttgcttcagctatagtttattatgcatcaacgttttgaactaatataattaatttttaggagaactccgtgtggctgagcgacgctgagcgcgaaaagtttgagaaactgcaccgagaaatggaggaggtaaagcacggcagtcgcatgaagcggaagatccgggtggacttcgctggccgagagttgccggaggaaccgaccatctccaaagagtacgagcagcaggtgatcagcgaactagcagccgtttctaaagcctcgggtgttggatccaactggagtgcatcctcggtcaccggccactccgccttgacactggcaccacatttgaacatgaccaagccgccggtctacaagcccagtaaggaatccaagagttggccagctcctgcagcaggcagcgattggctggagaggacctacaatcgggtgcaggacaaggagctgctggaaatgcaggacatgcgccagtgtctgtcgatgcatcagccctgggcttcgcttctagtggcgggcattaagaagtgggtggttgtgaaggcgcatttccagatttcctatatctaatgacatttttccaacagacacgagggtcgagtgtggtacagcgagcaccgtggtagactgtggatcgcctccacttccaaggagccgcacgccgaagacattgcgcaaatggagggcttttacaaggtgctctacggcggtaaacttgagctcttaccactaactctcagcaataacatataattgtaatcgcagatcccgacattaagtttccaagtcattatcccacaagcagtctgctaggctgcgtccacgtggacagttgtctgccgcaagaggagtaccgagagctatatcccaacggagaatcggagagtccttatgtctttgtctgcaccaagccggagcagctgaatattctactgcccgtccacggcgatcacaagatatgtgagcagttctatgtacttttccttacaatttgtgtgctgatttttcaataattcacagacgagctgccactgaaaactcacacggccgcctgcaaaacgcttctaagggctcgggccaacaagggttaaggttgggattcagtttcaaaacacattcttattagtttaatgcctgtatgaaaacagccctattttgatgatttgctaatttacatttgaagctcctagagtttctgagaaattaaagtggattggaatattttaaacatcttgtaatattggaaaatatcatgcaatacaatacgaattaaatattgaattttttaaatattaaagtagtaaaaatatcgtgtaaaactataatttagcaaaagaaattaatgtaataaaatacttctttgaagtttccttctttggaaagttataatctgagttgattttttttaattttgaaatagaaatatctcaaattgttagaaacagattaaagaaatgaccagcttataattattcagaaattcttcatcaaaaagaattctacatttgaaaacactgtgtatctctggatggtaatgattgtcattgaggttaattaaaattactactgaatttttcttttatttgtatttgtttttattgaaaacatttgaatccatttgcttacgatttcgcttttaaatggaatttgtaattcaatattttaaacgataacgatattcagagcgataacgacagcgataactcggcaacagctgatggtgaagcgctgatttgatgtacgttttgattttggaatacttttatgtaatggtgaaagtggaggtggaatactggtaaggggaatcgtagccacagcaagcactgaataacggcatccaatcctcctgcagcggcatctgcaactttagcgggcagtgccacctgctgcgcgagttcctgctggcctcgtcgcccgacttggacatatcctgtcgcacgggacggcggggatccttcgaggtgtccatcgacggtcagctagtgcactcgaagctttcctgcctggcatttccccagcacgcgagtgtcctggcccaagtgcagaaggcggagcgtggagagcccgtggagaaagtcctggagcagccca

SEQ ID NO: 38687 - DNA, 1542 bp, DROSOPHILA
atggagaatttcctgcggggcacgttgtccaaatgtctggactgtgtaatcacggatcagatgttggcggccatactgaacatcaaagacgactatgaattcgacaactactttggcaatttactgagcgaggacaacgaggagcaccgcatgtttcttgtaaactgtcgccggatgctactgagtggcaaacagccgcggaacaatggaaaatatctctcgccccctctggcacccacatcacccaattgtcccaagcaaaatatcagcaagggtgccaagggcaagtcagggaaacacgtgaatctgtacgccagcgatggtcgcgtccagggcgacaccataattcttaagggtcggcggcattgcgattgccaggcgggccagcacaagttgatcaacaattgcctgggctgcggccggatcgtgtgcgagcaggagggaagcggcccttgcttgagctgcggcgatcccgtgcgcacgcccgaggaggagcagcagctggccaaggcggccagggagaagggcggcacgaagagcgccgccaagcagggcaaaaaatccaccaaggaactgtccacgcaggcgctggacaaggccttggcccaaagggatcgtctgctggagtacgacaagaacagcgagaagaggaccacagttatcgacgatgagctggactactttcaggagaactccgtgtggctgagcgacgctgagcgcgaaaagtttgagaaactgcaccgagaaatggaggaggtaaagcacggcagtcgcatgaagcggaagatccgggtggacttcgctggccgagagttgccggaggaaccgaccatctccaaagagtacgagcagcaggtgatcagcgaactagcagccgtttctaaagcctcgggtgttggatccaactggagtgcatcctcggtcaccggccactccgccttgacactggcaccacatttgaacatgaccaagccgccggtctacaagcccagtaaggaatccaagagttggccagctcctgcagcaggcagcgattggctggagaggacctacaatcgggtgcaggacaaggagctgctggaaatgcaggacatgcgccagtgtctgtcgatgcatcagccctgggcttcgcttctagtggcgggcattaagaaacacgagggtcgagtgtggtacagcgagcaccgtggtagactgtggatcgcctccacttccaaggagccgcacgccgaagacattgcgcaaatggagggcttttacaaggtgctctacggcgatcccgacattaagtttccaagtcattatcccacaagcagtctgctaggctgcgtccacgtggacagttgtctgccgcaagaggagtaccgagagctatatcccaacggagaatcggagagtccttatgtctttgtctgcaccaagccggagcagctgaatattctactgcccgtccacggcgatcacaagatatacgagctgccactgaaaactcacacggccgcctgcaaaacgcttctaagggctcgggccaacaagggttaa

SEQ ID NO: 38688 - protein, 513 aa, DROSOPHILA
MENFLRGTLSKCLDCVITDQMLAAILNIKDDYEFDNYFGNLLSEDNEEHRMFLVNCRRMLLSGKQPRNNGKYLSPPLAPTSPNCPKQNISKGAKGKSGKHVNLYASDGRVQGDTIILKGRRHCDCQAGQHKLINNCLGCGRIVCEQEGSGPCLSCGDPVRTPEEEQQLAKAAREKGGTKSAAKQGKKSTKELSTQALDKALAQRDRLLEYDKNSEKRTTVIDDELDYFQENSVWLSDAEREKFEKLHREMEEVKHGSRMKRKIRVDFAGRELPEEPTISKEYEQQVISELAAVSKASGVGSNWSASSVTGHSALTLAPHLNMTKPPVYKPSKESKSWPAPAAGSDWLERTYNRVQDKELLEMQDMRQCLSMHQPWASLLVAGIKKHEGRVWYSEHRGRLWIASTSKEPHAEDIAQMEGFYKVLYGDPDIKFPSHYPTSSLLGCVHVDSCLPQEEYRELYPNGESESPYVFVCTKPEQLNILLPVHGDHKIYELPLKTHTAACKTLLRARANKG

SEQ ID NO: 38689 - DNA, 2345 bp, DROSOPHILA
cgacattaagtttccaagtcattatcccacaagcagtctgctaggctgcgtccacgtggacagttgtctgccgcaagaggagtaccgagagctatatcccaacggagaatcggagagtccttatgtctttgtctgcaccaagccggagcagctgaatattctactgcccgtccacggcgatcacaagatatgtgagcagttctatgtacttttccttacaatttgtgtgctgatttttcaataattcacagacgagctgccactgaaaactcacacggccgcctgcaaaacgcttctaagggctcgggccaacaagggttaaggttgggattcagtttcaaaacacattcttattagtttaatgcctgtatgaaaacagccctattttgatgatttgctaatttacatttgaagctcctagagtttctgagaaattaaagtggattggaatattttaaacatcttgtaatattggaaaatatcatgcaatacaatacgaattaaatattgaattttttaaatattaaagtagtaaaaatatcgtgtaaaactataatttagcaaaagaaattaatgtaataaaatacttctttgaagtttccttctttggaaagttataatctgagttgattttttttaattttgaaatagaaatatctcaaattgttagaaacagattaaagaaatgaccagcttataattattcagaaattcttcatcaaaaagaattctacatttgaaaacactgtgtatctctggatggtaatgattgtcattgaggttaattaaaattactactgaatttttcttttatttgtatttgtttttattgaaaacatttgaatccatttgcttacgatttcgcttttaaatggaatttgtaattcaatattttaaacgataacgatattcagagcgataacgacagcgataactcggcaacagctgatggtgaagcgctgatttgatgtacgttttgattttggaatacttttatgtaatggtgaaagtggaggtggaatactggtaaggggaatcgtagccacagcaagcactgaataacggcatccaatcctcctgcagcggcatctgcaactttagcgggcagtgccacctgctgcgcgagttcctgctggcctcgtcgcccgacttggacatatcctgtcgcacgggacggcggggatccttcgaggtgtccatcgacggtcagctagtgcactcgaagctttcctgcctggcatttccccagcacgcgagtgtcctggcccaagtgcagaaggcggagcgtggagagcccgtggagaaagtcctggagcagcccatcaaggactgcgtcgtgatgtgatctcctactttcacgcctagactgtttaaacacgatagcttcacgcttacaccaacatttgtggaacccatttgaaatcctgtgatatatggtatatacatatataataataaatataacattataatgctctccttatttgcaagatggatgaattgaaaaatgggtaaaggttaaacaacagttttcagtttaagtggagtcaactaaacaatcgcaataaatggaacgagtttgctagttgttctgggcttacactttattggaaaataacataggactgcacaaaaggatggtttgggtaatctaggccagacggtgacaatccttcaccgcctgtagcgatagcgcttgaagtggaaccacagctggaagatgttgttgtggaactggcagcggaagccccgcttgtagctaaactcccactcccggttgacgatcttgaaggcgatgtcctcgtacggtggtcctgtgtggaaacgcagcaccgcaaagtccccgttgtccgcgcagggagtgaggaagtactgcggcgtctgcgatttgtccataaggtccggatagaatatgttgaacttgtatccctgcacgatcttgggcgggggattgtccatgtcgtagtgcgtctggttgtacttgttccactcgaagccggtgtgcacgcgattgaagtagcgcggctttcgtggtcggtacttatcggtggccagctgcggcactgcatccagggtggtctccacactgaactcggcctcgtcaccctgcattccctgcttcgcctcgttgcgcattcgcagttcctgcggggtcagttgattgttatccactcgttctggatgaaggattagcagacgctgtctctgtgttcgccgctcgtcgtcctcctcctcgtagagaagtccttctgcctccggttcgtcgacgtcttcgttttgcgctcgtctgccggtgaagtcctcttcgcgtatatagcgcgggctgtagttccctgcctggtaaa

SEQ ID NO: 38690 - DNA, 288 bp, DROSOPHILA
atggtgaaagtggaggtggaatactgcggcatctgcaactttagcgggcagtgccacctgctgcgcgagttcctgctggcctcgtcgcccgacttggacatatcctgtcgcacgggacggcggggatccttcgaggtgtccatcgacggtcagctagtgcactcgaagctttcctgcctggcatttccccagcacgcgagtgtcctggcccaagtgcagaaggcggagcgtggagagcccgtggagaaagtcctggagcagcccatcaaggactgcgtcgtgatgtga

SEQ ID NO: 38691 - protein, 95 aa, DROSOPHILA
MVKVEVEYCGICNFSGQCHLLREFLLASSPDLDISCRTGRRGSFEVSIDGQLVHSKLSCLAFPQHASVLAQVQKAERGEPVEKVLEQPIKDCVVM

SEQ ID NO: 38692 - DNA, 2594 bp, DROSOPHILA
atcgctgcaaatgccggggatatagaattgggaatggctatggctagtggaaatggaaatgaaaatgcaaaatgctaaatgcaaaatgagagatgagaaatcccgcttgtaattaaatcgatcaacagctctgggtgagatgagtgattgtgactggcggggccatcgagcgattatacaattatatggaactgggcgaactgggaactgcggttgccgcctgccaaattggccgtttaggccataatatacccttcatctgtccgcctatttcccagtttgcccgtcagcctgccgactttctgatcattccgagtgccaacgatcgctatctgagttccatccagtcagtctgtttgtccatccatcgagtggagattttagcacgcaatctatattattgtggaatccaatagatggaatcggattgcatcgtgtgagcatgttgcatgctaatttttattccaattggattgagtggggcttactagccccattaagatctttaacaggtcggaagtctgtgtgatcgagtattatacatatatgtacatggtaaatcatccaacaaataagtccgattgataatatatgtatatatctaaataattcggttgcgagcaaatggcttactttcattttaattaacattgatattttcaaatgtattattccaaaaatgaatataccttacaaaccttggtactttgatagacctatcaggtttccagattgaagatctacattaatccgatattgtcattgtctcgagtgaactgacacatcgctggatagcgttggcgatgtcaaatatcgtctttggagcgtgacttgtgcgggtgacgaacttgggtgatgaacttggcactggagaaatgcttgcaatcagcaaaatcaagcgacgatgccatgtgcagacgactatggtgtgaggtcatgggtcagcttataagccaaggggccaagcaagagcagagccaaagagaaagcagctgccaagatgaagccatccactccagtcgcagccattccgctaatgacgatagtggtcgctgtcctgctgcagacgcactgcgtccgtggccagacccaggctttcgatctcgccaagctgctgcccaagaccggaacggagcccatctgggcggtaatcgatcgcaacttgccgcaggtgcaggagctggtcaccgcggccaggatggagtgcatccagaagctgcagctgcccagggaccagcgaccgctggggaaggtgaccaatccaagtgagaaggagaagtgcctggtggagtgcgtgctcaagaagatcaagttggtgagtagccggacgtttgtcacaaccagaactaaaaggtcactaatacttctcattcgcacccagatggacgccgacaacaagctgaacgttggccaggtggagaagctgaccagcctggtgacccaggacaacaagatggccatcgccgttagctccagcatggcgcaggcctgcagccgcggcatctcctcgaagaacccctgcgaggtggcccacctcttcaaccagtgcatcagtcgccagctggagcgcaacaacgtaaagctggtctggtagaggacatctccgcgccatggacaccaccaccaactaccacttgagatcttaactacgagtagaaagaaggtgtctcgcatattttggccataatcttagctacaatgatttctcagataattttaaccgaaaatgcacaatctattaggcaatataattatatattaaatactagttatacgattttctagtactagatcaagttttagttgctcactcgcaattgatttgaataaatctatatatacagtaatttatttcccatttttgcacaataaaaaacacaatctttcgcagttccaactacgggattacgtactacatatgtgattcccacccgataaatatgcataattcgtaacttgttggttgggcgctttattagtttgggaaaccactccaagttctctagctttggtaattaaatcgaactgaatcactaacaaaaaaaaaagggagggagaacatgcaatggtgggccagcgagcagctccatggcctcattccttgatctcgggaatcttgaagcccgaagagcgcatctcgcgcagcatgcacatagcgatcccgtgggctgcctcgcacctgaaaaaaaaccaaaaacaaataagatccttttcagaaatactttaaaaatatttcaaacaatttttaaagcttttgggagcacagttgcctggccacctataaaaggtattccaaaatattgaaactctcttcctgagaagaagtgtacgaaaaggttcttcaaaacacacggcaacttaaactcctggcacttatcttttctttcgaatacagcagaatattttcgaaatgcagcaagactgaaaaattcgccttagaaccgtttcaagtttttgctttgaagtaaattcactccgcatctggaatacacttcgctggactaacaattactagacactagggtcctccattgccccaccacactcacttgtcctgctcggcctttagctcctcgttgcaggtcttgacgatg

SEQ ID NO: 38693 - DNA, 528 bp, DROSOPHILA
atgaagccatccactccagtcgcagccattccgctaatgacgatagtggtcgctgtcctgctgcagacgcactgcgtccgtggccagacccaggctttcgatctcgccaagctgctgcccaagaccggaacggagcccatctgggcggtaatcgatcgcaacttgccgcaggtgcaggagctggtcaccgcggccaggatggagtgcatccagaagctgcagctgcccagggaccagcgaccgctggggaaggtgaccaatccaagtgagaaggagaagtgcctggtggagtgcgtgctcaagaagatcaagttgatggacgccgacaacaagctgaacgttggccaggtggagaagctgaccagcctggtgacccaggacaacaagatggccatcgccgttagctccagcatggcgcaggcctgcagccgcggcatctcctcgaagaacccctgcgaggtggcccacctcttcaaccagtgcatcagtcgccagctggagcgcaacaacgtaaagctggtctggtag

SEQ ID NO: 38694 - protein, 175 aa, DROSOPHILA
MKPSTPVAAIPLMTIVVAVLLQTHCVRGQTQAFDLAKLLPKTGTEPIWAVIDRNLPQVQELVTAARMECIQKLQLPRDQRPLGKVTNPSEKEKCLVECVLKKIKLMDADNKLNVGQVEKLTSLVTQDNKMAIAVSSSMAQACSRGISSKNPCEVAHLFNQCISRQLERNNVKLVW

SEQ ID NO: 38695 - DNA, 2254 bp, DROSOPHILA
accagatggttgctgtttttttgttttttttctggagactcacataacaagtggccatttttttccaatatatttaaaaatttaattacaaggcaggcattttaaatataagccttgtaaccccttaagtaagtccattacactcactttaaccacctattaccttgtatgcaaatgagtagttcggtttgattagcattcaaattagttgcaagttggcatttatttggcgaaatgtatttcatttgtgcatttagtacaactgatgacgttgaaataagtagtattgcgtgtggcatgagcccaaatcgctgataaagctaactgcaataaataataaatgtaaattataatatcacaaaaggcttatgtttgcattagcataactgaagcgtacagctaaataggccagaatgtttacatgctagctaggtgataaaatacatttgtagaggatatattagatatataatggtcgatcgatatgcgatgttaatatcagattccaagactttcatacggacagacatagccatatcggcttggctagtgatcctaattccgaccaggatggcaagaagttctgtgtgacatacaattttcaacgaatctagtaactggtttaaaaatagttatagctgtaacatgcttaaaaatttcataaaattgtaaatggtatttagctcaatgaattctgaagttggttaaaggtacaatatgaaaatgtccaaaactttcgatttgcctcttgcatatctcaattttcatcacagtatttaagcagtaattaatgggtatcccattagtcggtactagacttcagcattctctctagttgggaaacccgagtcggctttgacgactgtcagtaacattcctttcatttcgaacgtttaaaagtcacaatccgaatcccggtctaaaatacaggtcgaatatcgaatccaaattttaatcttttgttaaaagccacgccaatccggtcaacaacgatccaaagatgtccgatcatttcaacttcaacgaagccttcaacagccagaccatgcgtggtcgcgccaatgtaagtgattcagtacacggcagtacacaagatgcgcccaaatacgccaccgaaacccacaggtagccaaggccacctgggcctcgttgggactcgtctacgtcctggtcaagatgcaccgccgcaacacgaagcggcgcgagaccaagctctactgcaagggctgccagcaggccatgctccatggctagggcgccgatgctgccaaatcattgaagtcatggctccccaccgctccgacccattcgacccgtcagcaatccataactatttataatcagcaccccctttccggtcctcgatgccacagttaaaggcttggggaccaaactcatgtaccacctcgttgagtcaataaaaatcgaatcctgccaatgaatcgactttgtaatctagttggccgagctttgcacttcgctgcttgtcattaggttctcgctcggagctataggcagaacacactcagctctcacccggacccgaccccaaatccagatctccagatctccagatccagtccagtagcaatggccgacggctttaagaagtacttcaatgggacaaccatcaatggacgcgctaacgtaagagtgattctattgaacgcacacaagataaaatgaaccatcgctttggagctgttgatggacacaaaatattattttcagctccaaattgaaattcaaaattattaatttaacatttttttacatacattttttacaaatacatatactatgacccatttcgcaggtggcaaaggccacatacgccacgttggccctgttgttcatcgtgtacaagctgcgccgcggatccggcaagaccggcgagttggccagcggcaagtgcagctgcgaatcggaccacgagtcgtccctcaatggcgacattggcgtctacggcgcggatcccgactgctccgtttgccgggagcgatcggagcgggccatgaccgagttcgatcgcgagcagcagcgccgggcggcgggcgaggatgacaatggttgtcgcgacgatccgccgccgccaccacctccgcccacatcgggaggatcaggctctgctccgcggcgcaagtgtccctgcgaggagccgcagcgtcgggcggagggagccgtgaagcatagcagccacagcagctgggcgcgaggccagcagattcagccgccaaaccagtaccaacagtat

SEQ ID NO: 38696 - DNA, 192 bp, DROSOPHILA
atgtccgatcatttcaacttcaacgaagccttcaacagccagaccatgcgtggtcgcgccaatgtagccaaggccacctgggcctcgttgggactcgtctacgtcctggtcaagatgcaccgccgcaacacgaagcggcgcgagaccaagctctactgcaagggctgccagcaggccatgctccatggctag

SEQ ID NO: 38697 - protein, 63 aa, DROSOPHILA
MSDHFNFNEAFNSQTMRGRANVAKATWASLGLVYVLVKMHRRNTKRRETKLYCKGCQQAMLHG

SEQ ID NO: 38698 - DNA, 3078 bp, DROSOPHILA
acatacaattttcaacgaatctagtaactggtttaaaaatagttatagctgtaacatgcttaaaaatttcataaaattgtaaatggtatttagctcaatgaattctgaagttggttaaaggtacaatatgaaaatgtccaaaactttcgatttgcctcttgcatatctcaattttcatcacagtatttaagcagtaattaatgggtatcccattagtcggtactagacttcagcattctctctagttgggaaacccgagtcggctttgacgactgtcagtaacattcctttcatttcgaacgtttaaaagtcacaatccgaatcccggtctaaaatacaggtcgaatatcgaatccaaattttaatcttttgttaaaagccacgccaatccggtcaacaacgatccaaagatgtccgatcatttcaacttcaacgaagccttcaacagccagaccatgcgtggtcgcgccaatgtaagtgattcagtacacggcagtacacaagatgcgcccaaatacgccaccgaaacccacaggtagccaaggccacctgggcctcgttgggactcgtctacgtcctggtcaagatgcaccgccgcaacacgaagcggcgcgagaccaagctctactgcaagggctgccagcaggccatgctccatggctagggcgccgatgctgccaaatcattgaagtcatggctccccaccgctccgacccattcgacccgtcagcaatccataactatttataatcagcaccccctttccggtcctcgatgccacagttaaaggcttggggaccaaactcatgtaccacctcgttgagtcaataaaaatcgaatcctgccaatgaatcgactttgtaatctagttggccgagctttgcacttcgctgcttgtcattaggttctcgctcggagctataggcagaacacactcagctctcacccggacccgaccccaaatccagatctccagatctccagatccagtccagtagcaatggccgacggctttaagaagtacttcaatgggacaaccatcaatggacgcgctaacgtaagagtgattctattgaacgcacacaagataaaatgaaccatcgctttggagctgttgatggacacaaaatattattttcagctccaaattgaaattcaaaattattaatttaacatttttttacatacattttttacaaatacatatactatgacccatttcgcaggtggcaaaggccacatacgccacgttggccctgttgttcatcgtgtacaagctgcgccgcggatccggcaagaccggcgagttggccagcggcaagtgcagctgcgaatcggaccacgagtcgtccctcaatggcgacattggcgtctacggcgcggatcccgactgctccgtttgccgggagcgatcggagcgggccatgaccgagttcgatcgcgagcagcagcgccgggcggcgggcgaggatgacaatggttgtcgcgacgatccgccgccgccaccacctccgcccacatcgggaggatcaggctctgctccgcggcgcaagtgtccctgcgaggagccgcagcgtcgggcggagggagccgtgaagcatagcagccacagcagctgggcgcgaggccagcagattcagccgccaaaccagtaccaacagtataaacagcccgaggcggagcaagtgcgtccggctagccaagtgatgggtcaggtgcacgacgccttctacagggtgctgcgaggagtcgtgggagccgttttgggcaatgcggcggtcaacaccagcggcaccgcttccgattccccagctcaggcagccgcagtggaagtctcgcgggatgagctggacgaggatgaacgtgacgacggccaggacgatgagacgccgttaaagcgccgcacggcaccgcgctcttgcgtgcccacaggcagccaagagaacgcctcgggacagccggaggaactgggccgggaacaggccgacgaccagccgcaggcggaggagcaggcggagtacagcgcgttcagcgatggcttcacttccggcctgtcctttaccagcgatgaaaagtagttggctaggtctgggcgtaggcttcaagagatctgctaaatttttagtctaaaataaatacgaagaacttctttatctcagcattatgctttaacaatccattacttggcgcccccgggtggatccatttctttcagtcgttgcaagatactaaattaaacggggggcaattgctttataaagtattttatttagcttccgtttagttcagatagagttttctttgcggcatctaacttttaaatagatcatcattataaacgtttttagcccctttgtgttctcggggttatcaatatcaattacgtagcttattaactgttttgggcggggttcggactcgagatggatgggaatggattggattggattcaattgggttgcgtctaacgtttaagccttgtgtttaattatgagtggacttcaactaacatttatatttaaatttatatgtatatataatataatatggaaataactttaacgttttgctttttggtttcattatgcgatcgaccgattctttcgctctctcgccgtctctctctctctctcgctctctcattctctctctcctcattctccctcgcttgccgtctctctctctctctcgctcgattcgtcgtcttgctccgattcaagtgctaatttaaaatatatgtttatacgtgtatatatgtgtacgtgtcgcgtgagtgggtttaacttgaaggctgcgtgtgtcctagtgggtgtggaccgtaaactgctgggagattcgccaggctgccaaggtctccgatggatccttgatcgatttgttcggtaatgcggtaagtcgttaatttaattgttcatttcgggcaggatggacagtgggttcggttcaaccctcgtggctagccaccgactctaggtcgctgttgtcctcgctgccggtggcctcggtgggttcgcccatggccacgcgtgcgtactcgtccgtatcaatgctcttacagaagtgtatggcgtacttgag

SEQ ID NO: 38699 - DNA, 909 bp, DROSOPHILA
atggccgacggctttaagaagtacttcaatgggacaaccatcaatggacgcgctaacgtggcaaaggccacatacgccacgttggccctgttgttcatcgtgtacaagctgcgccgcggatccggcaagaccggcgagttggccagcggcaagtgcagctgcgaatcggaccacgagtcgtccctcaatggcgacattggcgtctacggcgcggatcccgactgctccgtttgccgggagcgatcggagcgggccatgaccgagttcgatcgcgagcagcagcgccgggcggcgggcgaggatgacaatggttgtcgcgacgatccgccgccgccaccacctccgcccacatcgggaggatcaggctctgctccgcggcgcaagtgtccctgcgaggagccgcagcgtcgggcggagggagccgtgaagcatagcagccacagcagctgggcgcgaggccagcagattcagccgccaaaccagtaccaacagtataaacagcccgaggcggagcaagtgcgtccggctagccaagtgatgggtcaggtgcacgacgccttctacagggtgctgcgaggagtcgtgggagccgttttgggcaatgcggcggtcaacaccagcggcaccgcttccgattccccagctcaggcagccgcagtggaagtctcgcgggatgagctggacgaggatgaacgtgacgacggccaggacgatgagacgccgttaaagcgccgcacggcaccgcgctcttgcgtgcccacaggcagccaagagaacgcctcgggacagccggaggaactgggccgggaacaggccgacgaccagccgcaggcggaggagcaggcggagtacagcgcgttcagcgatggcttcacttccggcctgtcctttaccagcgatgaaaagtag

SEQ ID NO: 38700 - protein, 302 aa, DROSOPHILA
MADGFKKYFNGTTINGRANVAKATYATLALLFIVYKLRRGSGKTGELASGKCSCESDHESSLNGDIGVYGADPDCSVCRERSERAMTEFDREQQRRAAGEDDNGCRDDPPPPPPPPTSGGSGSAPRRKCPCEEPQRRAEGAVKHSSHSSWARGQQIQPPNQYQQYKQPEAEQVRPASQVMGQVHDAFYRVLRGVVGAVLGNAAVNTSGTASDSPAQAAAVEVSRDELDEDERDDGQDDETPLKRRTAPRSCVPTGSQENASGQPEELGREQADDQPQAEEQAEYSAFSDGFTSGLSFTSDEK

SEQ ID NO: 38701 - DNA, 2333 bp, DROSOPHILA
tccttgagcgaggagtacctgtgtggcggcacggataccttgcgcagctcgcttctggcccgctttgccttgggcggcgccgatgctcgcgaagatcccagcacctggccctcaatgccggtcgcctcgtccacctgcatctccacgtcctgctgcccgcctccgctggctccgcgcttcgtcgctctcttcgccggctcgaatgcgtctgctctgatgttctctgcctccatggtgcaatctgttgtgcttttactgcgttgtttccaataatttctcaatccagctgctttgtctgctccacgtgctcagtgtgaccgcgctcgaatctgagatttcaaatacatctgtagctgaataccacaccactgaatttcgacgaaaataccaatgcgtatgtacaattctacactggctaaaaagtatgtagaatgtagaattccgaaatataatacgcctgaattcttgataagaaacatcattggatttgaaggctgattgaagtgcgaattcatatttgatcactcattgaattattgctgtttcaaaagtaataattcaagtacagcctaaagctataaggtgacgtcactgtcatatagaacaacacaatgtaaattctcaaaagatggcaaagggtaccgaaaggaataatggtttctgttaggcccatatatatgtatatatatactgttatatatatactgttaatatataataacagtatatatgtacatatatacttaatcttaattttggaatcatattcagataactgttaatcagctacagacgagtgggataaatataatttaaatatatcataataattttataatatatataatataattaaatataaatcatttttgcataattattaaatgcaaccctttcattttcaatcaatcaaaaggtagcctatttttgacatttggtttgctttggtccctattgaattcagttcacatctagaacccgtaccggagaaaccatttccatgtcacaacggaacttcaagatgccaaatccgaacaacgaatcccattcctatttcctccggaatattccggaagaattgcagcctcagtttacgcgtggattcaatcagtggatgggcaatcagtctacgatgactaagggtttgccatccaatacagtgaataagtctgcccagacggcatctgtcaatgatggcaacttgcaagctagcgtgatcgcaatgctggcaggaatggactcgatcttggacatggagcagcctaacagaagtccttcgcgcgaagagcacgagcgcctaaatgagctgttgttcagcagcaatttgctgtgagttgaagtaattcgtggtgagagtcctgacataaagttcatagtttcattagcatgctggacgtaaagaagcgaacgtttcccgtggaggacccaactgggtatttaacttcggtttcagagcaaaatccagatgggaatccgttggctaagcgactaaagctagagcgtcctcagggctggtaaacaagtctcacgaggaattaccttcattctacacatattcaatcatacatatcttttcagacactaatgaccaatgtctcttcctcagagtctctcaaccatacaggacattaacgaaccattaaataaatcactataaaaataaatcacaaaatagttcagaagagccgttttattttaccagttaaggtcggtaattgaaagagtttcgcaaaagaggcacgcaaaaaggtatacatacatagctcatacacctttagcttagtaatgggtatccgatagtcgatggtcgacgtggagtatgtgcatatgtatatgtgactttttaatatataaatatacatatatgtatgtgttgtgtgaatataaattcgtttataattggggaacggcattagaatgcgaaaaggtaatattattaagtgaatttaatgtcaaaaaggaaaccatgagtgtcctgcgtggcatagcagctagcttttaggcctgtgctcgccaatcgttatcgaaagatggcaatcgagtaagcgggtaaattgaagtttagccgcaggcgggtattaggttttcagattaatggtggtcagcgtaggcggcgctcctctcgcagccattaaaagtttctggggatgcaatgggacttacttttgcatcaaccgcagcgataagaaggccattgcaatgcctcctattggcctgcacttgaagcaaagttaagtaagccaaagtggagttaagtaaagttaagagcgagtaatgcggccaccgcaggcaggcgataatctcaagcttgcaattgcactggcaatttgttt

SEQ ID NO: 38702 - DNA, 333 bp, DROSOPHILA
atgtcacaacggaacttcaagatgccaaatccgaacaacgaatcccattcctatttcctccggaatattccggaagaattgcagcctcagtttacgcgtggattcaatcagtggatgggcaatcagtctacgatgactaagggtttgccatccaatacagtgaataagtctgcccagacggcatctgtcaatgatggcaacttgcaagctagcgtgatcgcaatgctggcaggaatggactcgatcttggacatggagcagcctaacagaagtccttcgcgcgaagagcacgagcgcctaaatgagctgttgttcagcagcaatttgctgtga

SEQ ID NO: 38703 - protein, 110 aa, DROSOPHILA
MSQRNFKMPNPNNESHSYFLRNIPEELQPQFTRGFNQWMGNQSTMTKGLPSNTVNKSAQTASVNDGNLQASVIAMLAGMDSILDMEQPNRSPSREEHERLNELLFSSNLL

SEQ ID NO: 38704 - DNA, 2428 bp, DROSOPHILA
gactactattgaaatacacccactgactaattcgtcgcgttgtattatcatcatctctaacttgttttcctcgtctttttaacagcactatacgagcattgcccacacgccggagtcgaatcgcctgaccatgtcgacgcactcgccctcgctgctggccaacggctcccacaagaccacatttccagcggcggcagcagttgcagcaccaccgcatcagcatcagcagcagcagcaacagttgatctcatatcccgctgttgcagccgtgaccacatcaacgccggcaggatcgccgcaatcccaatcccaatcccaatcgcactcgcaccccaacacccatcatgcaccatccctgcacggaggcagtcgatcgggcagcatcaccagcacggccagcggaggcatcaccgtcctcagtcagccgttctacccacagcagcagcagcaacagcaacagcagcagcaacatcgtcatccagcgctgactggcggcagcagcagcatcgatttcggggacatggcacatggactgcgccagcatcagcagcagcagcaacatctgtaccagcagcagcaacagcatcaccagtttatgcggtaagtcaacaaaataaatgagctcaccttggcgaacggcaagcggcgattgacgtcacacatgatggcaattacagcggattttcggatttcggacagcagaagaaagcccacgtatttacaacactttgagattcataaacaaaatctagcacctgtatgccaatttgctgtattcaaattgaacacacgggtcccattaatgttggtagggttaaagcagatttcagttcacaaaggttcgacattcctgaaaacgtatttatcagattgaactatatgcttataggatgtatgagcattctttcctagcacttttttttttagttgccttattcgtaccagtcatgaatatatgatgagaccaagtcgcatcaggaccaaaaaaccaaacccattaaagaccagacaaagtttttacgtttgccttgatccaaagacatttaatttatgtacaattggctgaaaattacacgtcaccggtgggcaacacttggaagccatcgaagtacttggccagcggaatcgccagcgagaagagtccatagctctttatgaaggtccagcagaagtggtcattatagatgatcgtcaatacggcgcgagccattagcagcagctgaagtgttttggttttctccaccatagcgccacaaaactgtccatgaattgtgaattgtgtattatggtgggggggggatttcgatagtgctggccaactggccaacagcttacctgattgctcgactcaacgggaacgaaaactatgtggactcctttttttttttcaacaaaatttctgatgtgtgtgctctccaaaataactgaaactgactggatcaatacggaaatgctgaaaacaccatgtcaactaggattccaagtgcgtctgacttcaaattctcggctactagattgtttttagggctacacgagtaaactgaatgcaaagcacggtcaaatgcaatttgctccactgtgcagtggcgatccgttttgtgatttatggtggcaaaagttgagaggcggtcagtcgtctcagccagctgtttttagcaaacggcacacacagatgcatttactcgcacattatgtatttcactttcattgccacacaaaaaaaaaaaaaaaccaacgaaataagttagtgaaaacttaatatttgaaattggaaatggagaaatgccaggcgatcaggggggcggaaaggctgccgccaataaggcaggcagatgagagatgaaaattgtgttttatggcgatgaactaaatgacaataactaaccgactaatgaacagcaaaatggcggcgcacaatgtgcataattaaaaacgattgtaaacgaactctctgtggaaaaggttttattcgccacgacgaggctgctatttcctagatacagtatgtatctatgtttgttggaatttccatctgatgtccgagtttttgtgacattattgttattttgccaacgatttattgcaagttctatggcaagttgataatgtttttgatcgcagatttaaagatagttgtaatatttgggagcaactcggatgactcgccgcagttgccacatttgggcagccccaatattggtcgccattgtggctgcgccggggcctcgggctcggtgatttcatcctagtttcccctcggacgcaacccactcactccagtgctccttctcatctggcgttcccatttcatacattcctcattttagtctcatttcattcatcgcccgactcgacgactcgcactgtctttccatgcatatttgtcattgttttgcgtctgtctgttctgaatgaaatttattttcca

SEQ ID NO: 38705 - DNA, 351 bp, DROSOPHILA
tcagttattttggagagcacacacatcagaaattttgttgaaaaaaaaaaaggagtccacatagttttcgttcccgttgagtcgagcaatcagttttgtggcgctatggtggagaaaaccaaaacacttcagctgctgctaatggctcgcgccgtattgacgatcatctataatgaccacttctgctggaccttcataaagagctatggactcttctcgctggcgattccgctggccaagtacttcgatggcttccaagtgttgcccaccggtgacgtgtaattttcagccaattgtacataaattaaatgtctttggatcaaggcaaacgtaaaaactttgtctggtctt

SEQ ID NO: 38706 - protein, 58 aa, DROSOPHILA
MVEKTKTLQLLLMARAVLTIIYNDHFCWTFIKSYGLFSLAIPLAKYFDGFQVLPTGDV

SEQ ID NO: 38707 - DNA, 2615 bp, DROSOPHILA
ctgaaaaattcgccttagaaccgtttcaagtttttgctttgaagtaaattcactccgcatctggaatacacttcgctggactaacaattactagacactagggtcctccattgccccaccacactcacttgtcctgctcggcctttagctcctcgttgcaggtcttgacgatgcgcctgccgtcgtcctcgcgatccgggaacatcatgttgatcatatcgaccgtcttgtcctcgttatactgcaactgatcctcgggcatcagctcgaactgctccagcatgcagtggcggaagcacttggtctcgtgcttggcgtcctccttgttcagcaccatctcgacgatgttctctgcggatatggtatgttatggaatggtatggtaggatgggtgagtaacccaacggtgcacttacccctcgacggctttggcgtgcaggcgtcgccaaagggctcgatcagctccaccacctcgtccacggtcatggacccctcctcctcgtccgccgtcgccgatcccatcagcacggcggcgcaggccactgctagcagaaggttcgtcatcttcaacgtcgtcgtcattcggctgcactgcatcatttttgctcttcttgtgaatagtggacggacagcaatcggcgccgggcaatttatacccgccgcaatcgtgtccagcacatccggtacaagcaaatcgcctcggatgtagatcaaccggcgatagccatgacattgctggggcggatcatgcaagccccaccacaaccacagccaaccacccattcgtccatccatcgcagcccagttaaaatacagcacagatgacggggccctccggctagcttttattgatcatctggtcaggggattgggcttgggtgtgggtttaggattgcggacaagagatatacatatctactttatttgctgcggagtcacctgttccgaatgccaaagtgtgacgcatctggtatcgcattggcagcctcggatggaaagcctagggaaacacgaataccttgatgttgttcttcaggcagctgagcagggcgtgggcgggatcgcagttgggggcgttcttcaggccgacggtggagtccttgcacagattgatgcccttgcggtactcgtccttgtagctgtccggcagcatgatgtccatctgcttgagggtcgactccagctggaactttcccttcttgatctaagcaggagcagagcggaaagaaggagctgataatgtaaccaacacagccgatggaaacttcttaatacgtactgcctgcatcatttccaggatgcaattgatgtagcagttggtgtccttgctattgggtatgtcaccgttgcgaatgttgtcggccacctcgacgctgaccttcggatacttgggcaggcagacgtcgcgcatcagctttccggcagaccacatctgctcctccgtcacctgcaagtggacagtatccatgaggcatcctccggcagagagaagagcttaaggacctacccctgcctccgactgggggattggtcccagggatatggcgacgcagaccagcagcagatggaacttcatttccgagacgatttggcggattccagactccagacccatcggcgactccttttatacacggcccccgacatgcaaatgacttcatattggttcgatcgaaccgctaagtgggtgtgggaattatgggttagcgccaatcgccgcccccactgcccatttccatatccaaatgggcgggcggtgggtggtgttcctggggcggattactttctggccgggctataatcttgccacgttaattgacagtgtacacaggtatgtggtcaccgtgcgaggtggcatgcgaggcgcgattctggccgagatgcgttgacaatcccattgctgggccgcatttccccagtgttcatcagcgatcatgcgaatgcaaataaggtttcaatctgagatctaacggggcggttccaaaatcggttccagagttagggtcgcatggataccgcgcatccagttttccgttttgaggtcaaacaatgtaaagataatcacaatcggtaataatgtttggtatatatcttaaaaaattataaaataaaatctatttttacaaatagtttgctatttacatatactccttcaagatgctgattttaagatatactatctggaaaaaaaagtttttatattttgatagtccaccagataccaccagatattttgctaccaccagatattttgcataccagatggttgctgtttttttgttttttttctggagactcacataacaagtggccatttttttccaatatatttaaaaatttaattacaaggcaggcattttaaatataagccttgtaaccccttaagtaagtccattacactcactttaaccacctattaccttgtatgcaaatgagtagttcggtttgattagcattcaaattagttgcaagttggcatttatttggcgaaatgtatttcatttgtgcatttagtacaactgatgacgttgaaataagtagtattgcgtgtggcatgagcccaaatcgctgataaagctaactgcaataaataataaatgtaaattataatatca

SEQ ID NO: 38708 - DNA, 480 bp, DROSOPHILA
atgggtctggagtctggaatccgccaaatcgtctcggaaatgaagttccatctgctgctggtctgcgtcgccatatccctgggaccaatcccccagtcggaggcaggggtgacggaggagcagatgtggtctgccggaaagctgatgcgcgacgtctgcctgcccaagtatccgaaggtcagcgtcgaggtggccgacaacattcgcaacggtgacatacccaatagcaaggacaccaactgctacatcaattgcatcctggaaatgatgcaggcaatcaagaagggaaagttccagctggagtcgaccctcaagcagatggacatcatgctgccggacagctacaaggacgagtaccgcaagggcatcaatctgtgcaaggactccaccgtcggcctgaagaacgcccccaactgcgatcccgcccacgccctgctcagctgcctgaagaacaacatcaaggtattcgtgtttccctag

SEQ ID NO: 38709 - protein, 159 aa, DROSOPHILA
MGLESGIRQIVSEMKFHLLLVCVAISLGPIPQSEAGVTEEQMWSAGKLMRDVCLPKYPKVSVEVADNIRNGDIPNSKDTNCYINCILEMMQAIKKGKFQLESTLKQMDIMLPDSYKDEYRKGINLCKDSTVGLKNAPNCDPAHALLSCLKNNIKVFVFP

SEQ ID NO: 38710 - DNA, 2573 bp, DROSOPHILA
gccacccttgcagttctctgactggaaaaccatgaaaatgtccttgccagctaaatgccactctctctcacacacacacaaccacacacacacgtccaatgcagtgcgggaaatttcttggtataaacttaataatgcatcggggcaaataaaggaaaaaagcaaaagaaacaacggcaagtcggaaagccaacataagttttggggctaacttgttatttttgtaattggcactttgcagttttattgaagcgttggagccccgaaaagggcgctcgggattttgggggttaccactcccgtcctttgtgcggatcaaaatccagattggttatttatatactgcgttcgttcaggtgttgtgatcgatgttctgatgctgcctccctaaccactcagccgggagtgactcagtgaccctgccgacatccatccctggtcgtaatctgaggtggccaacgttagccactttggcgatgagcagcctttgtccccttggcatactggctgcactggcttggttattggttatatttggttcaggaacttcgggatttgaagtgggtttggattagacaacgaatgattgcaacgaaggaagggtatgcaagcatacttcataatgaggattgttagtccttgtagccattttaattctcatgttgtatgtcgtaaaaggtaaaaggtataagtatttgaataagaacgagaacccgatacatttgtgtattgcttatgatatggccattttaaatctcaaaacatttatctagcaaaactgagttgataaatcgattaaacagagttggcctggactcggtcttcaatgttctgccagtgggagtcatttggattcagtcattccagaccccagtctcaaggtagcaactttcaaaatttttagttcctgtgttcgtaacaaataagtgaaatcgcatatcgtgataccagactgacagaatcgatagaattctcgaaggaacgaagagaagcgccgaaaatgcatgtggtgggggcactggtcaatctgctgctgatcttggcctgcatttacacgatgacctcactgaccccggcggaccatccgtatgccttcctggcggcatccttcagcctggtccacggagtgctgggcgtggttcgctcctttgccaacgagcccgacgagtgcggacgcacctttatgatctcagccatcatactggaggttatcccgctgccactggcgaacatcgagttctacctggtatccgatcagtcgggagtggcgctggtgcacggcctgtcgttgattccactgttctacgacatgatcggcaagatcagcgaggactgggacagctccacggagacgctgatggacctcgctctgttgggcaacatcggctccacgttgtatctggccatcaaggacggcaaccatatctacttcggtgtggctgccaccgcgctcctcgccagatacggcggtgcaattgtcgatagctgcaacgagggccttagcaacgttgtagagactctgggaaacaccggcatcctggcccttatgacctacgcactcactgagggctaattgctaaaacttaaatttgatcggttcgcgaaataaagccaagatgatgaatcagcatttgaaattggttgagccaactatcattgaatacaaggcactagggatttgtagtttggggatatgaattacaaatctacaatgagaaaggaataagcaatatagcactactatataagccataaaccatgtcaagggtatacagacttcggtgtgctgcggctaactagcctcactcactcgcgcgacttcaaattgccaacttagttgttatttgttcgctgtctggctgaaggggcagcgcgaaaaagacgcggttcaagggccgaaggacgacggacgacggacgagggacgaaggactggggtctcaggacgagggactcaggagggcagagaaggaaagggacggggcaatattcgtggacgcagcactgtgatggctctcacgtcaccacttcagcaaattgcggcaataatgcaacaaaggtttcttgggaaacacataccaaattgcataagcaaggcaaggcaaggcaaggccacggaagcggggtggtgtggcccgcttccttggggcggtgctggtggtggatggatgttcactccttggcgactggaggactgaaagactgagagacgacgtcagtcgcttggccgccaaagctcttgaaccgccacactcctgcatttcattttcaatttgatttttttctgcccttttcttttggatctttgttttttccgccacagaatgaagaacgaagaaattcccctcaacgactctgcgcccttgtttacatttttgttggctgttgtggtttccgcttttggggcccgcgtgcgattccgttttcgttttcgttgcaacatttttgtttgtaatttactttggaatgctggcgccacagtcgccgtcgtcgccttgtgcggttttcttagaaaaatctccagtcgccgtaattgcagtgcccgcagtgccgcctgtagtgctccggacgacg

SEQ ID NO: 38711 - DNA, 573 bp, DROSOPHILA
atgcatgtggtgggggcactggtcaatctgctgctgatcttggcctgcatttacacgatgacctcactgaccccggcggaccatccgtatgccttcctggcggcatccttcagcctggtccacggagtgctgggcgtggttcgctcctttgccaacgagcccgacgagtgcggacgcacctttatgatctcagccatcatactggaggttatcccgctgccactggcgaacatcgagttctacctggtatccgatcagtcgggagtggcgctggtgcacggcctgtcgttgattccactgttctacgacatgatcggcaagatcagcgaggactgggacagctccacggagacgctgatggacctcgctctgttgggcaacatcggctccacgttgtatctggccatcaaggacggcaaccatatctacttcggtgtggctgccaccgcgctcctcgccagatacggcggtgcaattgtcgatagctgcaacgagggccttagcaacgttgtagagactctgggaaacaccggcatcctggcccttatgacctacgcactcactgagggctaa

SEQ ID NO: 38712 - protein, 190 aa, DROSOPHILA
MHVVGALVNLLLILACIYTMTSLTPADHPYAFLAASFSLVHGVLGVVRSFANEPDECGRTFMISAIILEVIPLPLANIEFYLVSDQSGVALVHGLSLIPLFYDMIGKISEDWDSSTETLMDLALLGNIGSTLYLAIKDGNHIYFGVAATALLARYGGAIVDSCNEGLSNVVETLGNTGILALMTYALTEG

SEQ ID NO: 38713 - DNA, 3176 bp, DROSOPHILA
gcggagcttgaaaacaaatggtcaaaacgaaaaaattcacctagaatgtgcttatccttcctttttgtacaatatattacgttgtcagagagaccagatctctaattttgcgatatatttacagcacatgaaatacgttttttatttcatttaaggtgttcgtaaacagtgataaaaacagctctatctgaagctttaaactatttaactaactaaattaaccaaaaaaaaaaacgctctgcaggccaatttttacattcccattactttctcttgcaattatttgaagtgaccttttcaatatgaggaatggtttcaaactatatcgattcgatttcgattttttcgataacagtagcaatcaaatttaatgagtgcaacgaaaaataaatcttttctgcgttcacccacattttctgcaagtgtaagcaacgcagccagggccagtgtgtgtgagtgtgtgatggctggttaaggacacaaaagtcatgactggcatgagaacgagctcaagtgccattgaggaggagtgctcatattcccagacttgccacgcccccgacgccgctatcgccatagccgcccacccgaaggagcggcgcaagtgcgcgagtaaattcaagaaacaattttcaggaatgacttaacttttgcgtttatgtgaaaagtttcgcaacgtgatgttatgcgagcgtcgaaaggatatgcaattcactggcggtgtgtgtgtgtgtgtgggtggtcggcatatgcgtgcgtgtgtttgtgttcgtcggactaaatcacacactgctattctaatgaacagcctaaaagttgtgaatttgctcgcgaatgtaaagataataaggatagcttgaaaaactaaagtgaatttctttctttttttttctatctataaaaaataattgaatccactatacaaaaataattgaattaaaaagtcggtcatgaaaagggatatggatatatgtctttcatctcatgcacttctatttcaatgaacacagctgtctgcgtgtggtatgcctgcgcctgtgtgggtgaggatggagtgagtggtgtgcaaattttcacaggtgcagactccgaggaatctcagcgagagatgtgggcaacgtccttggagtccagcaagtccttctcggccagcaccagtttgaggcgtcagtttgaggtagtcgattcgcgccagcgaaaagtccagatcgaaaagctcctcggcgatcaggtggcggtatgccgtcgtttccatcgatccatccttgatcctcgcaccgatccggcagctatcttcacggatgcagtcacgtggctagacttcttgcagctcctcgcttgtgtttgtgtgtgggagtggaagtgtgagtgtgtatctgacacgatcgatagagaatgtccgtgctcgatataaaatataaccactggaggacagaagtcctttggtggccaccaggatcatgagaactatacctaatgcgcactgtgctctgaatattttggaattcaatgtgcgcagtagtagatagattgcaataacttaatatattatattgttgttcaattttacccatatggcatttataacttggaagcctttaaattctaattgcaaagccaaaacgttaaagtgggaaatgcgttcaaattgaaggaaatggaatgtgtttattgatttttgccagcattgacagcataaataaattaccaaaatgagtaaacaaatgttaaaatcttaattaacgttctgttagaccttgggcacatgctggacagcttaccagctaatggcgttaagccaagctacacgagtccatgataaggatgcatggagagggtttgaagtgttatgcctttggaaggtactggcggcccacgtggagccagtcaacgccgacctcggcggaatgataacacataactttgagtcggagtgcggcgacacctgacagccgcacctcacacccgcgtgccacttaccgctgatccggatacggatacggatgtggatgtgaatgtgaatgtgaatgtgaatgtgaatgtgaatgtgaatgtgaatggggatgggtatgtggatgtggatgtggaagtatatgtggatgaggctagggatatggatatggatatggatgttctggacaaagccttcactcattgtggcatgtgtcaaaattaatttcctaggcaatattttgacgggctttcatgctaagctgagagaggttcccccttttcggctcaacccccccggcgcttgcacaccccacccatggcggcaagtgagcaggtaccattagataccctgtacttcggattaaatggattaatacaagctaggcctatttaaattctatttaactaacatagaacatttgaatttggcacatgctgaatgaagcaaatttcttccaaaggacattttcgatttcgtgaagcaaatgtgaatgaaatgtccttcgccgcgtcacataactttactctgggtatgctagtagtcccgttatctgagcatacataagtgcctacgggtgtatcttgataccttccgccactaaatgctactgacatgcaaaaggttactttgccctcagctttttatttccttcgcttggcattcgtttggatttcggtttggatatcgttgcgtttcgttttgattttgttgcttgctttttttctggccagtcatggctcgaatctggccagaatgggatttttcatcatcatccaagcgattggagagtgggtaagagctgggggccacaggatatctcctcctcctggtgctgccatcactgccacaatatgcaaatctcattgcgacgcattgaagagaccacaaacgggggctgatgcctgatagctgatattaaaaccattgctcagatgcctgatgcctggtcttctacctctcaacccacatccacatccacctccaccaccacctgcacactcgtagtatccacaatcctcacagcaagacaacaaattacaaaaattaagagaacatttttgcggatgaaaggtatttgggaggaggggcacggccaggtggcacggcaggcgacaaaagtggccaaagtcctgcccatcagtgccagcgcccacttcccgcccctttgtgtgtgtgtgtgtgtgtgcaaattaatgaaattaaatcgtcttcatttgatggc

SEQ ID NO: 38714 - DNA, 606 bp, DROSOPHILA
atgaacacagctgtctgcgtgtggtatgcctgcgcctgtgtgggtgaggatggagtgagtggtgtgcaaattttcacaggtgcagactccgaggaatctcagcgagagatgtgggcaacgtccttggagtccagcaagtccttctcggccagcaccagtttgaggcgtcagtttgaggtagtcgattcgcgccagcgaaaagtccagatcgaaaagctcctcggcgatcaggtggcggtatgccgtcgtttccatcgatccatccttgatcctcgcaccgatccggcagctatcttcacggatgcagtcacgtggctagacttcttgcagctcctcgcttgtgtttgtgtgtgggagtggaagttgcggcgacacctgacagccgcacctcacacccgcgtgccacttaccgctgatccggatacggatacggatgtggatgtgaatgtgaatgtgaatgtgaatgtgaatgtgaatgtgaatgtgaatggggatgggtatgtggatgtggatgtggaagtatatgtggatgaggctagggatatggatatggatatggatgttctggacaaagccttcactcattgtggcatgtgtcaaaattaa

SEQ ID NO: 38715 - protein, 201 aa, DROSOPHILA
MNTAVCVWYACACVGEDGVSGVQIFTGADSEESQREMWATSLESSKSFSASTSLRRQFEVVDSRQRKVQIEKLLGDQVAVCRRFHRSILDPRTDPAAIFTDAVTWLDFLQLLACVCVWEWKLRRHLTAAPHTRVPLTADPDTDTDVDVNVNVNVNVNVNVNVNGDGYVDVDVEVYVDEARDMDMDMDVLDKAFTHCGMCQN

SEQ ID NO: 38716 - DNA, 2147 bp, DROSOPHILA
gattgggattgggttcgggctcgggctcgtgaacacagccatgaattgtgcggccaaagtgagtcaagtgcgggtgctgagattttcatttcatatattgcccacagcagctgctgggtcataatcatcatcataacggatacaacggcagagccctggatttgcttcagatgcttcagatgctgcctatacatctaggcatggtcagagtttatggcaaatggtaactatttagcgactatttcagtaaatttcaatctaccctcttcccgaaagtgtatactatttatgcatgttacgcttcaaaacacatggtgcgaaattcacatttattgggaaatattttataaacaaaatggacacattcatatacctgtgaaacgaggataagcataatttaagcctttgattttaattaaatgtgaaatggtaattattgaaatgcacaaatatatattaagatcctacagcatatactttaagatagatctgggagtttgattagtgagattatttaattggttgaacacgttcagaactggtttatttacttgatatcttaagccaaacataattaacttaaaaatatgttatcgttatgacagattaatttatttcttcatgaattttacctacctgggaaagacaaataaatagtgtaaattttgtaaactgctcttttaaggaaaataattagtaagcttatttccatatgttggctggcttctttaaaaattctaacttttgggcacggctagcgaaacttcatttctgcctactgtctgaacggatgatgggtcttgagtttttttttttcatccgaagatgtattgtaaagtcatgttattccggtgcgattgtacaaacacaaatgaagttgggggcggaagcaaccggggggactctttggccaaagtgctggggagtagcctcgtgtttgtgcatcatttgattaacgtaatcgaatgacacgccacatgtcagtcatccagagaggcagtcagccggagtcggccgactcatcctgctcctcctcatcctcctcctcctcctccttctccttctccttataaccataccatccaaatccccgtcctgcggccgagttaaacgaagtaagtcggtaaaaagtcaccagggcgtacatgtgaaagtcacttgggctctcgcatgtctctgtttgataaacaattgacacttatacggcagggcggatctgggggcgcacacaacacatgtagcaaaatcaattttcaccttttcacttgatcaatttcttaacggcaatgaaaagttttctgcgaagtaagctgagcgcacggctgcggaatgtcaagcaggccagaatgccagtatgccaggacttcaggacttcaggaccgccaggactccggcaggactccggctggataagtgtgagccatgcccgcggaggaggagaaggcacagatagcatcatttgcatttccacgctcacccacccacccgcacgcacgttaacagttagttgggctgcggaagtgagttccggaagggaaggagtgagtacgggtatggcatcgcacagtggtccacgttgagtgaaatcggtgatggcacagatttgtgatagctctggtcatatgtatatgatttgtacagtgtttttatttaatatcaacaccttatcaaaatacagcgattaggggattatactaacaaacgttttaaattcgttctatttgtagttaagtatagttaagaatttaccttggggctgctactggatctctaaaattgtgtttaaacataaaaaggttggaatatttcgtcagctctttcatttgttatcagtttgtatgttgatgatgaccatgttgatgatgaccatgctgttaacttacaggctgtcctaatacctgttattaattatagcgtcaccgaaaatctgaaaaagaaattaagtaaactgtgaaaaaagtttttagtctttcaaaattattgtctatagccactgtgcattgcagctttctcacttttcgtttcgttgcgtcccattaaaaattatgttgaaaagaaaagcagcagaggcggaggtgaagcagcagaaataacacacggacatggtcacggatgcggctgattcggatacgttgtgaaggagatgg

SEQ ID NO: 38717 - DNA, 147 bp, DROSOPHILA
atgtacgccctggtgactttttaccgacttacttcgtttaactcggccgcaggacggggatttggatggtatggttataaggagaaggagaaggaggaggaggaggaggatgaggaggagcaggatgagtcggccgactccggctga

SEQ ID NO: 38718 - protein, 48 aa, DROSOPHILA
MYALVTFYRLTSFNSAAGRGFGWYGYKEKEKEEEEEDEEEQDESADSG

SEQ ID NO: 38719 - DNA, 2698 bp, DROSOPHILA
ttcgaaatggcacacggaagccgaggcgtctgctataaatttttaacaaccatttaacttgaattttattagtccccagtcagcggtcaaaagttcgaggagtcggtggggtggcataggcatgggcatggccatggtcttcgtcttgtggatccaatatggcagttgggggcgtgactgatgctccaagttggtgtcatgtttgccttcctggaatatgctcgtatatttcggtatacaaagtgcccaaatgctgcccacaaagtcatcacaatgacattttgcatttcgcagttcatttcgacttgtcccattctgttcatttgttgttggtgttttcgttgtctactttctgctggttgttgatagtccccatagagcccccgatgctctctctctctctctctctctatctctttccctctcccactctctccgtctctgtctttatttttctttttccccctattccgtcttggctataaattttatatggaaagtagttgtgacttgtgggtcacttgttttgctgcagcttcagttcttcgcctgccgttgaccgataaccatgttattctcttctcctgaatttttggtttttttttttttacttctttaatctagtttgttattatttactcgttggcaaataaaattgcaaagtttttgtgtgattggttttgtcttttttttcgttggttttggtttttgtgggatcttgtttttcttgaacattctcaaaatcaatgttaaaccaagttaacttgcagttgagtaagatgtgcgctacagacagactaagaaaaacaataaacacgacaagaaaaaccaaacaactcgagtgctattaaacgacaaaacataacaaaacaacaagaaattaataaattaaaatacccccccaaaaataaaaacaaagagaaaaggaaagaaaagaaagaaaaaacaaaatcaacgattataacgataaacgataaacagcgttccgataattcccgccatggactcgctggagcgtctgatgcgagcggccccattgccacgaatgcttaccagtggcgttgtggccacagccgctgccgccgcatccgccgccgctggcaagggcatggtcagtgtgggcggtggtgcaacagccatagccgccggcggtggccaacagagggcgctggtccatgcctcgctggcggcggcgacagtgggccgcaagggacgccacctaacgggcaccttctgcctaaccggcgacaccatggagggcatcatacagtgtttggtatttctcaaagcattctcggtaagtgggatctggactgggagtggaagtgggaatgggaatgggaatgggaggtgtatcagtattacatagtacacatataaaatacaaaaattccataccatggagtgtagagatcaagggagagagaccaacatatataaacacatccacatacgcccccactttttcatccccatggcacaattcaatttagttttcggtttgcgctcgactaagtttttcctttttcctagcttttttttttctgtctgtttttggggcgcctgccatcaaaatgtgcaataggctgtaaataggcaaatacatttcgcagaatcatgcctgtggcaagctgatttttggattttataactacatttttgccaggcatgcagatgaggggagaacctttgacctagtttatgggccctttttaagccgacaaccataagccatccccaaacagccaccaccccaaaagaaaaaaaaaataaaaaaataaaaagcacacacatgcgggcgtgtgtaataaagattttcagcttgtctacacaaatttttgacccactcactaacgccttttcctctccgtttcgtttactttcaggtgagtccgtccaagtgatgataatgaagagcaaatgcccaacagatttatgaagtccccaattcaaatccctagacaaaaatcaggtattccaggtatctggatagtttttatgccatgagaaatgagcataaagtcggcttttatggcctggggtgttaatttaaatgtttattcaataaatttaccaattggtacgctgggctattgggcaatgttcaataaattggatctctgtttctctgaatttcggtttcacaatgaatgattgtttctaggacaactagtcgtccttaagtgccataactaatttgaaaagtgtctctttgttacttgctttaatttggttataagagcttgagcttcgtcttctgttgaattctcatttcatttcagttcatttggcatcgttgcctgccataaaaaaattgttcaataaaaacgttcaaaaaatgtttaacaaaacacaaaaatgacaaccgtccttcttgttactcgcgagaacaaccaccaattaattcttgctgatttatgaatctgttggagcatgtatcgcgttcaataaggccatcaaatcggaaatttcccgattcaatgtggctattctcagtaccagaaaattaatctcttctcctaattcggtgtcagcaaatagcatctcgatcctcaggggctgttttctgggctgtgagcaagtcattttagttgatttcaattttgtatatatatttctttaaccgattcctttttattgtataataccctgtgtacgaggtggttgcttgcttttgactgtgtcaacgtgaaaaata

SEQ ID NO: 38720 - DNA, 321 bp, DROSOPHILA
atggactcgctggagcgtctgatgcgagcggccccattgccacgaatgcttaccagtggcgttgtggccacagccgctgccgccgcatccgccgccgctggcaagggcatggtcagtgtgggcggtggtgcaacagccatagccgccggcggtggccaacagagggcgctggtccatgcctcgctggcggcggcgacagtgggccgcaagggacgccacctaacgggcaccttctgcctaaccggcgacaccatggagggcatcatacagtgtttggtatttctcaaagcattctcgatgaggggagaacctttgacctag

SEQ ID NO: 38721 - protein, 106 aa, DROSOPHILA
MDSLERLMRAAPLPRMLTSGVVATAAAAASAAAGKGMVSVGGGATAIAAGGGQQRALVHASLAAATVGRKGRHLTGTFCLTGDTMEGIIQCLVFLKAFSMRGEPLT

SEQ ID NO: 38722 - DNA, 3269 bp, DROSOPHILA
ttcataggattttttaggcaaaagcttagctttaaacgagagagtttggagcattctaaacatttttactgtcgtcattcattggtttaaaaagttgctctttgccatttatttttgagagggctttacgagctgttctatggagctgacactccctcggggtctcgagttttatgtttcttttatgaattcgaaatttcgacacactcacaccgatgccaaaaaaaagccattgcaaacttttcacacacacgcacacagcacaataaacataaaaaaaaaaatagcaaagctagaactttggtccactatctgcttttctgctgtggctagatctgctgtaaataactatttatagtatatactctatataagaattttgtatataaacgtaaatgtactggtatgtgtatgtgtcaatgtatgtgcgtttgcctgtctattacttaaaatacaactacaaaagcaccaacaaaatctttaaatcaatcaaaaatgatatatatatacatagatatataaattaggtatttaatttatgcaaatgaaaagtgcgcaaaaggcgaaagaaaaccgacaaaacaaacgacaagcaaattcgaaattaatttgcattgaataacaaaggaaccgcttcggtttcaatttcacttccagccaaggataaacctctagacaagataaaaaaaaagaaaaaaaaaaacaaaaagccgagaaaaaaaaacaccgacacaaaagagaagccaaatgagggaaaatgaagtgccaaagtgttgaaaataaagcgaaagccaagagacgaaattgaaatcgagtataaaaggtttttccgttcagttttaatcggtatcgcgcgttcacttccgttccgtttcgttacgtttcgtttggctacgatctgcgttcgccttagcccagccgtttccgtttccgttccgttccgttccgtttcgttccgtttccgctcggcaaacatttaaatggctaccagctgctgcttatgatggagacattcctcgtcctgggcctgtgtttcatcctgtacgaggcattggatttctttcagggctgcattcacagtaataccccatcgcccagcgatcaaatcgaagcctatcgccgcgaactcgacgaacagcgccagcagcagcagcaggaacaattcctggcaggattgacgccgttgctaggcgctcaatttgccgctgccgccgccgccgcggctgctgccgccggttcgcagtcgacgttgggcagcacgaccacgcccaccgcctccacggccagcgtgataagtgattcatacgatcaggaatcgcaatcgcaatcgcaatctcaatcacagtcccagtcgcaatccaatcaaaatcaacagcattcgctaagcactcctggcctgtttcgtcccgccgccttgggctactacgatccggaggatccattgcatgccacaaactccctaccgcgcgacttttactatctacagcagcagcagctaaagaacaaggtcagctcaagatcgctactctccaagttctcatcgaccaattcggataatcgcatacatccggaggctggagccggttcagggcatcatcatagcgtacttggagcagcgtctgttataacaagtcaacccttaccatctggcggtgagataccatccagtctcttcgatcagccgggacaaccggctgtggttgtgccaccactgcaattgcaaccctcatcaccgctatttgtggagcttaagagggcgattataagtcagaatcaaagatcacaaccgataaagtatcaggcaagagaatcaatcgaagagccacagtgccctcagtgcgaggaagagcagatacagtatttggccgagactttggacgatcttgccgaatccgaagatcagcggtattcgccagccgaagaggaggacgacgacgacgacgaagaggaggaggaggaggaagaggagcagaacgaagagcaggaggatcgggaggagcagcatccctacgtgggaggagctaccagtgagccagatatttgtgccgccacacgacaacagctaaccaggattcatcacatcgccattgacgacatcgccaccggacaggagcatcatcatcatcatcatcaccatctcagcatttcgggacaggcaacgtcgttgggcgccaattctcacgcagacttcagggaaatcgagtgcgagcgactgcgacgcaagtgcgttagcgttaagcgcatctatagcatatcggaaaagttctaattcagattcaaatcagatcactctactcaaaactcaattcgatatctcagctctctcatacctgtacagcccttcaccatattgcacttcaatcgatcaatataccgaaaccaaaatacaaaatcaatcaaaatcgagaatcgaaaatcgccaaatcaaaaatcgaagccaaatcaaatcgaaataaatgcaaaatcagttttcaaattccgctcaccaacaatcgaaccaaatgcaaccaaaatcacaaaattgcccaaagcgaaacaccccacacaaggttagcaaaaagttaaaaaccataagccaaccagctgaaaagaaacaagaaaccaagtcaaacacaagaagaaaaaaaaaaaggaaacccaaaccgaaaagccaaaaccaacacaacaaatagaagaaaaaaaaaaaaaaaaatgccaatgagaatttttcaaaaaatatttcgcacagcatatctcgaacattattatattttttgcctttatgttttctcacctgcttatattcactgttcactcacctgttctttatgcccctcacccttcaccactggtttggtcttcggcttgcactgttcaccttagtcctatttcacattgattaaatctaattatattgcgcatatttcacgataaataaaaggttgcctctcaccctaaataatcgaaaaaatgatataccaacaatagtcaaacttgctcagagaagtggtcatatttttcacacccaactgcactctttttttccttcgaacctcaataacatttctttcactttcacctaacaggacaagaacttttgcaccagcccactttttttttttgtacgtaaatcacgtgattttttttatcttcattgtccaccacatactaacacccgaaaatccaactcaactccaacttctacctctttatctctctctctctctctctctcactctcgctcggacatacactcacacacataagccaccgtcaatttgtcacctgtt

SEQ ID NO: 38723 - DNA, 1269 bp, DROSOPHILA
atgatggagacattcctcgtcctgggcctgtgtttcatcctgtacgaggcattggatttctttcagggctgcattcacagtaataccccatcgcccagcgatcaaatcgaagcctatcgccgcgaactcgacgaacagcgccagcagcagcagcaggaacaattcctggcaggattgacgccgttgctaggcgctcaatttgccgctgccgccgccgccgcggctgctgccgccggttcgcagtcgacgttgggcagcacgaccacgcccaccgcctccacggccagcgtgataagtgattcatacgatcaggaatcgcaatcgcaatcgcaatctcaatcacagtcccagtcgcaatccaatcaaaatcaacagcattcgctaagcactcctggcctgtttcgtcccgccgccttgggctactacgatccggaggatccattgcatgccacaaactccctaccgcgcgacttttactatctacagcagcagcagctaaagaacaaggtcagctcaagatcgctactctccaagttctcatcgaccaattcggataatcgcatacatccggaggctggagccggttcagggcatcatcatagcgtacttggagcagcgtctgttataacaagtcaacccttaccatctggcggtgagataccatccagtctcttcgatcagccgggacaaccggctgtggttgtgccaccactgcaattgcaaccctcatcaccgctatttgtggagcttaagagggcgattataagtcagaatcaaagatcacaaccgataaagtatcaggcaagagaatcaatcgaagagccacagtgccctcagtgcgaggaagagcagatacagtatttggccgagactttggacgatcttgccgaatccgaagatcagcggtattcgccagccgaagaggaggacgacgacgacgacgaagaggaggaggaggaggaagaggagcagaacgaagagcaggaggatcgggaggagcagcatccctacgtgggaggagctaccagtgagccagatatttgtgccgccacacgacaacagctaaccaggattcatcacatcgccattgacgacatcgccaccggacaggagcatcatcatcatcatcatcaccatctcagcatttcgggacaggcaacgtcgttgggcgccaattctcacgcagacttcagggaaatcgagtgcgagcgactgcgacgcaagtgcgttagcgttaagcgcatctatagcatatcggaaaagttctaa

SEQ ID NO: 38724 - protein, 422 aa, DROSOPHILA
MMETFLVLGLCFILYEALDFFQGCIHSNTPSPSDQIEAYRRELDEQRQQQQQEQFLAGLTPLLGAQFAAAAAAAAAAAGSQSTLGSTTTPTASTASVISDSYDQESQSQSQSQSQSQSQSNQNQQHSLSTPGLFRPAALGYYDPEDPLHATNSLPRDFYYLQQQQLKNKVSSRSLLSKFSSTNSDNRIHPEAGAGSGHHHSVLGAASVITSQPLPSGGEIPSSLFDQPGQPAVVVPPLQLQPSSPLFVELKRAIISQNQRSQPIKYQARESIEEPQCPQCEEEQIQYLAETLDDLAESEDQRYSPAEEEDDDDDEEEEEEEEEQNEEQEDREEQHPYVGGATSEPDICAATRQQLTRIHHIAIDDIATGQEHHHHHHHHLSISGQATSLGANSHADFREIECERLRRKCVSVKRIYSISEKF

SEQ ID NO: 38725 - DNA, 2605 bp, DROSOPHILA
atgtatatgtaaaatgggaatttaatttagttttttacgtacctactcattttaatgttgataagtcaaaaccaaaagtacagtgcgtttcgtgtgcctgaaaatttaaattaatcgtagtgataatgtaaatagaaagcattgcatcgactatgacgacctaagcgtatgaaacgcactgtgctcgcaaaattgccagcgttattgcatttcgtactcatgtacctgtttctctttctctctcttttttttatgtatgtcaccaccaccaccaccaccaccacaaccaccaaccacaccaaaaatcaccaaaacctcaatcaaaataatgtatgaccaaaaaaaaacaaaaaagtgtgcaattccaaataaataaccgagtattattatataaaaaataatgcaaaatttgtcaagtgtcgacggccgaagttgctcaatatgagccaaaaaagtagcagcgaccacgacggcaattcagctgccccacaacaacaacagcaacagcaacaacaacaacagcgactgcaactgcaactgcaacagcgaatgaaaatcggaagagtgcagcaacacaaatgatgcacatatgaatgaaaagagaaaatcaaaatagcaaaaagaaatccagccaaaagaaaaaaaataataattttttcctcccctccaattgcctggcaatatctaattgtttatataaatatatatatatatatatagcattaccatcttcatatatatttattatatatatgtaaatgtattatatatttgtgtatctgtgtgtgtattttcgtgtgcattccatccattaattctataacttaatctatataaaaaaaaaaaaaaaaaaccaaattaaaaaaaaacaaaccaaaacccaaacaaacaatcaaaccaaatcgcatgtgcaacgcgtaaaacaaatgaacaaataatttacaattcacacacatcgtgcaacaaacacaacaatctgaaccacaaaccgtgcaccaaaatggcggacatcatgcgtccgccgtacagtgagatcaaacggccggacgaaatcgtcagaatgacaaccgccgacaatctcaagttcgccgtcctcattggcctcatcgaggttggccaggtgaccaaccgggaggtggtcaacaccgttctgcatttggtaagtgctagttacagccaattagccgaaaaggccacacacacatatttccaacaggtttttatcgcgttcgagcaactagagttgatgccgataaatattgttacacgatagcgataatgtcgatcttttcaattgattatgttttgtttgccaaaatattagaaaattagccaaattagctagcatatttatagcgcattatttcgttagcaattgtgctttaaaagtggtaaacaagggtcattgcttttgtgggtcacggcattgaggcgagatcaaaatagtgattcggccaaaacactttggccaaaactagttcaatagttcaagcacatggctaatgggtttcatatacacatacactttagcatcatttctaacttaaacaaccattaacaaacagaatatattttaatctcttaaagcgcgtcatcaatttataaaacaaatagcattaaaattaataatattcatgcaggccaatgcaagtcacacaaaaaaaaaaaggaaaaaaaaaaacacccaatgcagtttaattacattcaggtgttgcaatgttgcgtaaataaaattaaaatcaaattatgtcaatgcaaacacacattcagccacatttaatttggcttggaaacttaaagagccgacaattaaaacgaaagaagtgcagagaatctcgacagcaatttaactctctgtttagaaagtaattttccttcacacagcaagacagactttttcacccattcccattccccatttccatttgaggaaaattaacatttccagcaagccgcaaatgcaaaggatgagaggggcgggtggggcatttgagtgggtggttgggtggttggttctggaggtcgttgtgaatgtgggtgaaattataagaagtatgccaaaaatctcgcccgacttgtgcggctgtgattaggatcaaaagactggggactaagacaatgtatatgccacttgtcccggcatttccccaccgaatttacccaacctccacctgcccgcgtttttcacttccccaagacacattattattataacatatttaaatttctggagcttaatgaaaacacgacaccgtcgctcatcattaccgctcattttttttttttttttttgtgtacccagttccctcgtggaaatcaaaatgaaaatgacaagagcccaacatcaagcgaacagtcaccgccaggtggcgctgccgctgagtcggaaaagttatccgagtttcgagcaaaaaaggaagattcataaataaaataagaaaaacagcagcttcatgcaatgggagaggccactttttttggcgttggcacagcttaaaattcgaataatatttctacgttctacactagaaaaacggtcttaaataacttaacctataattagttttctgtaaagtaatttcaagtgaagcaataaagtaaattc

SEQ ID NO: 38726 - DNA, 177 bp, DROSOPHILA
atggcggacatcatgcgtccgccgtacagtgagatcaaacggccggacgaaatcgtcagaatgacaaccgccgacaatctcaagttcgccgtcctcattggcctcatcgaggttggccaggtgaccaaccgggaggtggtcaacaccgttctgcatttgcgcgtcatcaatttataa

SEQ ID NO: 38727 - protein, 58 aa, DROSOPHILA
MADIMRPPYSEIKRPDEIVRMTTADNLKFAVLIGLIEVGQVTNREVVNTVLHLRVINL

SEQ ID NO: 38728 - DNA, 3079 bp, DROSOPHILA
ttctgactcatacgaaagggaagtttcgctctttctctctctctcgatttacggtgttttaaattcgccgtctaactgagtttgttgtagcggcgagatcgatcggttgactttggtttggcctaactgactacctcgaatacagtaagttgcgagccggcgttgtgaatgcacgtgttttcgcttaactcacctgggcgaatcccaaagaccaaagcaaaccattaaactcacataaaacaatacaatttataaaaacgaaaacactgtgttgtgcatcaatcaatatagtaatatattgaattacatccatacaaaacagaaacaaaattttttttgagtaatattttttacaagtgcgctgaaataacacaaataaatcaagaacccaacaagtgtttgaaaacccaaaaaataaattgggaaaaacaaaaatttctcataaccgaatattttttttttttgaaaacttgggggaaaaatcaacacttttttcgacaagtcaccgaaaacttaaaaaaaaattgatttttcaaaaaaagaaccaagactcgacactgccgaaaaggcaatatttttcaagtacattttttcgaagtgttttgacaaaacaaagcaaaattctcgaaccaaagaacaaaatcacgaaaggacaccccaaaacaatccctcaattataattgacttgactttgacttgcaaagccgaagaactttcaaaagacatgaagagggcaaaacagaagttaacttgagctcggctcatgaccaaatcaaaactgaaatcaagcaattttttttttttcaacacagtggacgagcggcgaacaaacatacacacacaattggattagtgttttgtttatttcggacccactgtaactgtccctcgtccacctgaaaatacgaagaaattcgtcgcctccttgaattcgtcgcgtgtcgccgtcgcgtttcgttaaatcgcttatcgttcatcgcaaatcaaccgataatccatcatgccgaagattttcctgatcaaaaatcgcctgcatcagcagcaacagcgcttgcttgaatcgcaaaacttgctgcagcacaagaatcaggatgatgagcgcttggtgccgcccctcagtccaagtgggagtggtagcggcccctcgccaacgcccacatcccaaccaccaccggaaccgcaaggtcaggggcaacaggtgctcggacaggtgcccgattcagatcaacagccactgagcctcacgcgcaaacgattccaccatcgtcgtcactacttcggacaatcgcgccacagtctcgatcatctcaatcaaaatcagagcccgaatccaaatgcaaatgcaaatcccaatcaaatacaaaatcctgcggaattggaagtcgaatgcgccactggccaagttcaaaatggtaagttgaacttttctaaaacagagtctaaaaatcttttcgctgccttatacataaatacacctttaggagcgattaaatttccgtttgccaaaccgttgtcacataaatgcgttctgttacttgtttggaatactcgaagcacaaaatatcaaagaacaacgcaaagaattttaatttacttggataaataattgctacaaatctgtcagtcagtttttttttttttttttggccgatggcaaatcggctggcaatacaatgcgccatatctattgcctggaaatcttttcaaatttcaagcttcacttttgggcagcttttgttattgcttttcgcccacaccataacgaactcgtccccagtgtatctttgtatctttgtatctatatctgccctgtctatcttccattctccaaaacggagctatgggtttacttcgacatcaatcactttcattgaatttcgtaagcgtattatttcgttttatttattttttttttttattttgccaaaaaagccaagcagagttctcatgtctctgttctgatctctgttttctgttttcagttttctttttattttctgtctgtttctgttatataatcgcccagcatgcttattaagtcatttcgatttaggcggtggtcttaggttaaaggtttaaaattttcataaatgattaggcgagaagaactttcttcgttttcggggcgagttttattaattaagttcttttcgattttatttgaaagtgaatttcgttcagcgttcttttggcgttttttttcgctaaagtcttttgtttctaagcattttttaactgccctttgtctggccttaattatatctatatttttatgcaaccattatggctcgacttcacttcaagagtagcttctctcacacgcagcctcataattttgccccttacgcaggcattatatttcatggttatagcttatatatattattttcacggagcgcgtagttgagtgctatatacaacatttattaaattaaataacatgttacgttctcggttcctcccggtttatcgccaagccaaccaagttcccttcatcatctctatcgcccatccacttaaaaatgtattatgaacgcttccgctgtataatttttatgagttctgcggatattgtaatggaagttatttgaagggaaatcgtttcgcaacgttatattctcaaagaaaaaatttttaaattggatagaattacacagaagttggtgagctcatcggattcgcataacttcataactaacactttgaagttttaagttccaactttgatcaatctatgcaggatttaatattatttaggtcttgcactctaaacatgtgttctcatgctgctctgatttcaaagaaccctctggtcacactgcttgttcacttttttttttttttgttcaattaccgctcgctgttcgtgtttttcttggctttagtgggctgtgcccatggccaagaacttcacacacttgagcgcacactcacacactagagcgaagctagaacgaacgaaaaaaaaaaaattatataactaccaaagtacaaggtactaaaagccagatacaagaaaaaatctcctctcaaccacgcaaaagtacaagttttgccagaagatgaagaaccaaagcca

SEQ ID NO: 38729 - DNA, 438 bp, DROSOPHILA
atgccgaagattttcctgatcaaaaatcgcctgcatcagcagcaacagcgcttgcttgaatcgcaaaacttgctgcagcacaagaatcaggatgatgagcgcttggtgccgcccctcagtccaagtgggagtggtagcggcccctcgccaacgcccacatcccaaccaccaccggaaccgcaaggtcaggggcaacaggtgctcggacaggtgcccgattcagatcaacagccactgagcctcacgcgcaaacgattccaccatcgtcgtcactacttcggacaatcgcgccacagtctcgatcatctcaatcaaaatcagagcccgaatccaaatgcaaatgcaaatcccaatcaaatacaaaatcctgcggaattggaagtcgaatgcgccactggccaagttcaaaatggcggtggtcttaggttaaaggtttaa

SEQ ID NO: 38730 - protein, 145 aa, DROSOPHILA
MPKIFLIKNRLHQQQQRLLESQNLLQHKNQDDERLVPPLSPSGSGSGPSPTPTSQPPPEPQGQGQQVLGQVPDSDQQPLSLTRKRFHHRRHYFGQSRHSLDHLNQNQSPNPNANANPNQIQNPAELEVECATGQVQNGGGLRLKV

SEQ ID NO: 38731 - DNA, 2040 bp, DROSOPHILA
ttaaataatttcccatttgtttcttaagcattatcattgccaattgcgaccactgtgcggacaacggcatttgtgcaacaaaacacaactgttgctaaaacccatgattctccttaacccgggccaatgcccaaaatgcaaatcgcttcagtgcgatcgaactggagtaatcgatatatacatacatacgtatatatacatatataaaacgatgctgatgttgatgttctgcattcagatcgccgcattgacaatttggtcgatggtcgcgccaaggcttttccttgcagtcgggggaaaccgctagacgcgactacaaacgaccggatgaatgggggattagagaaccgagacttggtgatttggatacgtgaataccgccgaccggcggcgatagcgaattaggttttgcaatgtggatggaaatttggcgagtacgcacgccaggcagccgcaggtgaccgatctctttggatcacgaaatgcaacgtgacgtggccagatcgaagttatatatatatatgtatatgtgcaatcaatcagaagggtggaagggaaaatgttttttttttgtaattagacagcatctacacttcatttgctcatcatgtggcagtcaatgtttaagaactgttaaaaggaaaatcagaaaactaatcagcaagcaatatgaagacaacaagatcgtttgctctcgaattcctgagaagcttgctaaggcttttagtcatgggaacccagaagtctgctcgcgtccaatgaaaacaaacaatgcgttaatacagtttcattcgttttgccataaaataaaaaatacacaacaagggccggtggtggcgcaaaggagatggccaggagcaaggccatcgataagactggcaattcatatacatatatatttactcagctttagcgtttttgttttttgcgcttttttgtgtttttttttaaagcaatttttgcttaatgccatcccctttttggcttaaccgatcaatctttatggcagctcgcataaaaatttacgactcatcatcgatggcaggagatgaggcacgaggagcaggagattcggcaacaaatatccacaattgagacgatggccccgactagagccaaaggtatagtggatgatgccgcgtcgtgtgcgaaggatatcgttcagaaagccattggtcatctcattctctatgaggcactcctgcatcagatcatccggcagctggatgtgaaatgggaagcaatacatgtgggccacatccagtttgatcgtctcattggtgctatcgtccaggcaaaagaacgtgttcgtatcgcccacttgaatgcgcgcacagctctgcaatgcggagtccttcatcagcagaagcacatgatccaaggagcttggcatgtacagggaatatggttcgccggtcttaacgaatgtatcccgatatttggtaaatgccattagtggatatgtgccgccacattttcgctcaaacacatgaatatcctccaccaaatatttgcatctctctggcaatttgtatttgtactgttcgcattctttgcattttgtgtgatcgatgatggccaggatacagctgaaatggagcaagaggagccacaagctgaacccgtacctaatccctgccagctccatccacgaaccgtttgtccttaccgattcgccaatacaatctgctgtgcgtcagtgtgtgtctcgaaatcgattcatttcgaaatgcggcaaatacaaataataattacagactaatgtagacagatggccagcagtttgctggggtcgaatgactcactcatctgggtcgtgacttgaattcgaagcgaaccgaatgtgtggattccattagctccgctaataggtttggggaatttatgcatttggagttttaataaatgtaatcgttaaatgatatgaaatagtgttcacacatgaacacgaatatatttaaagacttacaattttgggctccgttcatatcttatgtaaatgaatcgagagcgataaattatatttaggattttggtatc

SEQ ID NO: 38732 - DNA, 453 bp, DROSOPHILA
atggcatttaccaaatatcgggatacattcgttaagaccggcgaaccatattccctgtacatgccaagctccttggatcatgtgcttctgctgatgaaggactccgcattgcagagctgtgcgcgcattcaagtgggcgatacgaacacgttcttttgcctggacgatagcaccaatgagacgatcaaactggatgtggcccacatgtattgcttcccatttcacatccagctgccggatgatctgatgcaggagtgcctcatagagaatgagatgaccaatggctttctgaacgatatccttcgcacacgacgcggcatcatccactatacctttggctctagtcggggccatcgtctcaattgtggatatttgttgccgaatctcctgctcctcgtgcctcatctcctgccatcgatgatgagtcgtaaatttttatgcgagctgccataa

SEQ ID NO: 38733 - protein, 150 aa, DROSOPHILA
MAFTKYRDTFVKTGEPYSLYMPSSLDHVLLLMKDSALQSCARIQVGDTNTFFCLDDSTNETIKLDVAHMYCFPFHIQLPDDLMQECLIENEMTNGFLNDILRTRRGIIHYTFGSSRGHRLNCGYLLPNLLLLVPHLLPSMMSRKFLCELP

SEQ ID NO: 38734 - DNA, 3041 bp, DROSOPHILA
tttgctcgagtaaaaatcatcatcactatatatgttagtaaatctagtactattatatagttgtatgcatatcactttcatcagtatatggaatatatttcttatcctgtttgtcttgtagtagtgcccactgttcaatagctgcagggtagttgattttcggtcggttttggtggtggccatgatgatggcttcgcttgctgattctgcaaaccatcagcccatcgccccaacgccccctcatcccggccacttccctcagccactggatggcatgttgctgcctcaacgccctcagtacgctattatatagtgggtatttatgtttgtatggtatgtgtatatgttgccgttgttgctgctgtctggtcgtctgtggagcatcaaggcactggggcagcgaggcatcaagttcgcaatgggcgacatgagatggctaacacacacacacacacacacgcgtgtatctgtatacaacagcgaaaagatagagcgagtagcaaccgcagttacttttggctacgactgcatagacaagcctcaattaagttgcaattgcagttgttgctgctgttgttgctgctgctgcgactgctgctgctgctgctgctgctttgttgctgccggggaagcgttggcggcatcggaattccactctggagctgcccacgcgcgcgctgctcggctgcctgttttgctgataaagtccgaaatgatgtactacccatgtgctggtggctcattttgtttttcttttcttcattcttcatacttcgtctctttcgctttcccattttccactccgccagcctgctgcctcccactagcactatttttttctttttttttttatcccagcacaggagcgcacttttgcccgcgtattcggtttgcattttacatttttgtatttatttttctttgctcttattataacttaatgattttcctattttatttcctaatgataatgtgctttctctatgtgcccttgaaattgttattttggattattgctccttggaacggtgaacgtttcggtggcatcagttagctcggttagctcagtgttgccagttccatcggcgattagattggattgacgcggcgtggtcgagaatacgactccgaatcgttgagccttcatcttgatctggtccagtcgcccatcgatttcggagaaaatttcctcgcttaaaaccttcaactcggcgatctcgtagcgaaagtcgttgatatgtcgagcgatcagggcatgtcgtagatatcgacggctatagcgaaagccactggacatattcgttttggtcacgagcagggccatctttttggtaagcttgacggcggccaaggagcgatgtctctgctggcagttgcttagatcgttggcgcactcctcagtccaggccaagtggacgcggttctgtccccgaatatcggcaattcgtcgctctagacacgtccacgtttcgcccaaactgcgcaacatattccggagggcatcgtagcggcacaggagttcggttagttggcactgaatgtgatgctgggcacgttgaatgcaccgtatctccgattgcttcgcattcaggccactgcaggagatcggatcctctggcattaccgatggttggctaatatcctccaattgctgattcctgcggagttgactacgcaatatatcgattcttttcaatatctcgtccagaccctgaatggtaatcagggtttttgtctcctcatcggtggttatgccctcctcgcccattccgcatggcagtatttccatctcctcctcctgtgagtcggtttcctcatcatctggtactcgatccaaggaagggcctaacctctgatagcctggcgaaatcatctgctctcctcccaactgacatttggtggtcgttcgcgctatgatatcgatgtccgccagattcgccttgtgacagtcgcccagatcgcgcagcagatgaaaatcctcgtcgagcggataatcccttggttcgccatcattggtaggtatcatcttcaccttatccattttgtttttattaatttttttttttaacaaagtgtagatttaagtctgggtgtgtgtgcaatatgtgagcgttaaggtaaaaaaagcatagcccacttaaattgggtttttcaaactcttagtgattccttagtgattttaaaaaccactccaaaccgctcctgtctttttggcccggcgctgataagaaaatttatggctgctcagttgctctggcggcataattgcgcacccacatccaaatccgcagaaacatccactccactccacatggagtccggcagtagaaaacgaaagaaaaaaaaacaaaaagaaacaacgatgagtaggaaaaaacaaaagaaaagcagagagctgtgggccagaggcttgtgggctggcttttggcgtgtggcttcagcggcaattcttctagtcagccctcgcctcctttcttaccacgctagccaccattaccattgagccaccatcaactgccggcagttgactttgtttacccgcaagttgtaattttctgcgaaaaccgtcagccgcagaattgcttttctccatctccatctcacaaagctcagtcttctgtctctgataaatcccgcttctgtcgtctgtcttccactcagtcacccctgttcgccgcttttccttctgggctcctattccatgctgccccttttcttcaattgcaattggtgcccccgaccgtggtcttgcggtgatctttcttctgggccctgccttgctaattgcttgccagagattcgggcctctactgcataggacatcagcccaaaaaccattcgaggcagtgaacaaaattgaagtagcaaatcttcttcagaaattagagatatgattcaaaatttataggccaggctctatataatcttgcattattatataaacgaacaattgctgagttatttttgtatgtcagagaaatatccgaatattgcgttcagtgttttttctttttccacgcaacatcagcgattgacaggct

SEQ ID NO: 38735 - DNA, 1041 bp, DROSOPHILA
atggataaggtgaagatgatacctaccaatgatggcgaaccaagggattatccgctcgacgaggattttcatctgctgcgcgatctgggcgactgtcacaaggcgaatctggcggacatcgatatcatagcgcgaacgaccaccaaatgtcagttgggaggagagcagatgatttcgccaggctatcagaggttaggcccttccttggatcgagtaccagatgatgaggaaaccgactcacaggaggaggagatggaaatactgccatgcggaatgggcgaggagggcataaccaccgatgaggagacaaaaaccctgattaccattcagggtctggacgagatattgaaaagaatcgatatattgcgtagtcaactccgcaggaatcagcaattggaggatattagccaaccatcggtaatgccagaggatccgatctcctgcagtggcctgaatgcgaagcaatcggagatacggtgcattcaacgtgcccagcatcacattcagtgccaactaaccgaactcctgtgccgctacgatgccctccggaatatgttgcgcagtttgggcgaaacgtggacgtgtctagagcgacgaattgccgatattcggggacagaaccgcgtccacttggcctggactgaggagtgcgccaacgatctaagcaactgccagcagagacatcgctccttggccgccgtcaagcttaccaaaaagatggccctgctcgtgaccaaaacgaatatgtccagtggctttcgctatagccgtcgatatctacgacatgccctgatcgctcgacatatcaacgactttcgctacgagatcgccgagttgaaggttttaagcgaggaaattttctccgaaatcgatgggcgactggaccagatcaagatgaaggctcaacgattcggagtcgtattctcgaccacgccgcgtcaatccaatctaatcgccgatggaactggcaacactgagctaaccgagctaactgatgccaccgaaacgttcaccgttccaaggagcaataatccaaaataa

SEQ ID NO: 38736 - protein, 346 aa, DROSOPHILA
MDKVKMIPTNDGEPRDYPLDEDFHLLRDLGDCHKANLADIDIIARTTTKCQLGGEQMISPGYQRLGPSLDRVPDDEETDSQEEEMEILPCGMGEEGITTDEETKTLITIQGLDEILKRIDILRSQLRRNQQLEDISQPSVMPEDPISCSGLNAKQSEIRCIQRAQHHIQCQLTELLCRYDALRNMLRSLGETWTCLERRIADIRGQNRVHLAWTEECANDLSNCQQRHRSLAAVKLTKKMALLVTKTNMSSGFRYSRRYLRHALIARHINDFRYEIAELKVLSEEIFSEIDGRLDQIKMKAQRFGVVFSTTPRQSNLIADGTGNTELTELTDATETFTVPRSNNPK

SEQ ID NO: 38737 - DNA, 3477 bp, DROSOPHILA
caaaatatatgtgtatatccatatttctatatatatatatatatatacatataaatataaaggaaaacaagaaaatgagcagtgcgaaatgtagcaagtggaatagaaaatactctcacgctcaacacttttctaacccgtttgtaatgcatatctgtagggcctaccgtttttaatcttctataagaactttccaacactaccacgtcgactgtgtgatggaatgagactgtactgaagttttttttttgaaatttatgtaaatagcagcaatagtaaatagtatctaaacatgtctgcaatagagcattcccaagtcgtcgcaaggcaattttacatttatttatacattttttttttttgcaattctctgttgcatgatggaaaaagaaaggcaacaagaacatgcaaagaaacggcgaaataagaagtgaagaagaaaagcagcggctatgaatgtgcagtgtgtccgtgtgcatttatgtatatgtatatgtaagacttttgtgagcgggggagtagtagtgaaatgtaagaaaatgaagagaaaatagcacaacaataataaacaagtgcagcaaaaggagcaggagtcgaactccctgggaagtaaagcactcttctgaaaacggttgatgggggtcttcaaacccctataattccaaatgcaatgcatctactgaggattgcagtgaactctgtaattaggtttaaattgtcaatttttttgaatcatttatagtttgatgggcaattgcattgattggattcctaaaccatagaacacttttcgtggactattaaacattaggattaaattttaaatttattcatagatattaatatacatattcaagacgttcatattttagttgaaaataagaacgaccttcagttatttactttatttatctcctttagtaagccctttgcagcactgtattcgctgccacttcttgccatgcctctcgtaacactacacgtagtgcaacccactcactatgccctttgcaacactctccctgccttggtatcccaatccctgaaatggacttacgtcttcggagtcgtcctgcgactgtaggttctcggaagaactggatgattgcatttgctgctgttgttgttgttgctgttgcgagttctgatgctgctgctgctgcggattctgatgctgctgctgctgcgcgatggcgtcgctgtcgctggaggaggccgtcgacgaggaggtggccgccgctgctgcagaggcggcaactgcggccgaggcagaggcagcgacggctgcagcggccgccgccgactgatggaagttggaattatttgtcaactgctccgagcagcggacgcacgtgggtatgctatagccgggcacctggaacaactgtagggcgggggaatagaatagaacagaacaggacacgtgaattagagagtgcttccaattggaaaaaaaaaaccaataatgctctttatttattgtggcaactcaatcttattccacacataccctcccccttccatgccaactagccctttctcttttccaccaactagaaataagagccaagaagataaacacacgcacacacacaggcacgcacacatggagagcgaaaaagaaagaaaagaaactacaataacaacagcaccagcagctcgttgctttgttgttgttgttttcatttcatgttattttttttcttcggtacaacgttttgttattctttcgctttttgttttgctttgccgccgctctgccagcggcggcggcagaggcgtcgcctacaaaaaaggggttatttggtaattgtttaaataatgaactaaaaaccaagcaaagttagatctgttttgttagttttataaccgcttaactttaaatttttgggcttagatgcccaatatagtaaaccctctgtcactaaattaacgcgcagccactgcgtatttggctgccttggcgcaatttctgtcattttgttttaatatgtatttctttttgtgcggttcatgggcggcgggagggggctgaaagaggggggcctgttcgggggaataggttgaaaaggagtcaaagtgaaaagcgagtggcgagcgtaagcaaaatgtaaaaataatattttttcaagttgtcggcttgaacaacttttcgggctgagttggctaaaaataaaaattgttcagcaatagtttggggtcgcatgtgtatgtgtatttcttatttctgtgtgtgtgcgtttgtatgtgtgtggggaaaggggggcaatgcgcgcgcttttgaaccccgccccctgcgccaacaacccgcccgcacaataacagtagcgcgaattcaattgtttaaactccaccaaaagaaaaaaaatcaatagaaataacaaagtgtatatacctaaatcacatgtgtgtatatctttttttttttgttaacataccgttgccgtttggaagcacaatctacagatggtgtccattataacagtaaataaggaataggatggggagcaggagaaggaggatgcactttgttgctgacttttgccccctctgcggtcgttgttgttgttgttgtcgtccttctccctcgcaatttaccgctatctttaccggttaacattcagcgccgtttttctttttcgtttattattatttagttcgttttttttctatctttttccttttccttcctactataagtttgtgaacacgatccaaacgatgtgtggttgtatttgaaactaactttttggagtttggtttgcgtttggatttcggtgatcgctatatggcatattatgatggcaaaaacaaaaaaaaaactatataaatgatatagaaatttgatttatacgatattttcgtggtacacacacacacgcgcgttgtttatgtttgccttgcacttgcacatacaagcaaaaatgcggcgctgttgttgttgctgcttcgaagttctgcttcttttttttgcttaattcctttgccctttttttggcgtagttacacgtgaaaaaaaaaacaaaccagcgcgttcgaatgcgttttttttttgtattttacaattcacgacgaagtttttgtccgtcgtcttttttcccttttttttggggcccgatgttattgttgcgctgtatgcgtgagccgtgtgtgtgtatgtgtggggaaaaaacgaatacgataagaatacgcggtatagttgtgctgctctaacccacaggttggcttggccggtgctccttggcctggcctatcgatatttctatcgatttccgtaatcgaaaacgaggcgggtaatggaatcgttgttgaaaacaagttttttaatttattatttatttaatatttaattgcaagtccgaaagatttattttatcataggttattttatttaaataattgatggtgttttttaggcagccatagaatcatgaactttattttacaacagaataaatataaaatcattttacagaa

SEQ ID NO: 38738 - DNA, 447 bp, DROSOPHILA
atggacaccatctgtagattgtgcttccaaacggcaacgttgttccaggtgcccggctatagcatacccacgtgcgtccgctgctcggagcagttgacaaataattccaacttccatcagtcggcggcggccgctgcagccgtcgctgcctctgcctcggccgcagttgccgcctctgcagcagcggcggccacctcctcgtcgacggcctcctccagcgacagcgacgccatcgcgcagcagcagcagcatcagaatccgcagcagcagcagcatcagaactcgcaacagcaacaacaacaacagcagcaaatgcaatcatccagttcttccgagaacctacagtcgcaggacgactccgaagacgtaagtccatttcagggattgggataccaaggcagggagagtgttgcaaagggcatagtgagtgggttgcactacgtgtag

SEQ ID NO: 38739 - protein, 148 aa, DROSOPHILA
MDTICRLCFQTATLFQVPGYSIPTCVRCSEQLTNNSNFHQSAAAAAAVAASASAAVAASAAAAATSSSTASSSDSDAIAQQQQHQNPQQQQHQNSQQQQQQQQQMQSSSSSENLQSQDDSEDVSPFQGLGYQGRESVAKGIVSGLHYV

SEQ ID NO: 38740 - DNA, 3161 bp, DROSOPHILA
cgagaccgcgtcaagtgtcgcctttttggtttaccctaatacccgctcataaacatgactgcgctatactttcatgccaatctctgcccggaaattcagttgaagttcacttcgcacagtggttgtttttgcaccattttccaatcttaaacatcactgggctatattatcatttcaataagaagtaaattgatgaagaaaacctttcaatcggaaacaaaaaattggcggcagtgttccgatgaacatatgctagtgtccactgtaccggaaatatacgcatttccacgacagtgtgagtgaaacataagttttggcgctgcggccgccattttgacgtttgtttttgggcggaaagtgagggggcgaatgattaattaaatttatcacgttgtcgtgcggcggattgggcggcgttcccgccccctttctgttgttggttaatttaaacgtcgaagcctgtgacaagatacattaagcatccttgcaaacagtaacgctgttccactagtgtaagccccattcgcattcgcattcgcaaccgtgtttgtatccgaaaatgtatctgtagtatctgtatatgacacacatgcgccgcaaaaagaggagcaaatgagctgagcgcgtggccgaaagaagatgccgcgttaattaggctggccgcaacaatgaaatgccaactggcacaaacagacagcggatacaaatgatatgtgagtgcctgtcacgcacagtgccgccaacttggctattgggccagcaccttcgggccacgaaactatagccaagttgtagttttattaaaaaaaaaaaaaaacagcagcaagtatttcgcttaacaacgctatgcaactaattcgattcaatcgatgtatcttgaaatgatctatttcttgttcctaagcacagctggttgagttggcagccaactctgtcaaattaattttaaattaaatttgctcgctaatttattgaattaattagtcgaactcaattcgaattagcgcttacccagaagtgtgtaggcgagaagcagcatgcagatgcccaggtttgtcagcagggcggaccacaccgtttgtgaggtggccttgcggctcttcttcttctccttgcttccgtatccgggtggcgtctttccggtctcaccagcagcaacaccaccgccaacgccaccgccggcatggccacctcctggcgtcgaactgaaacaggagcaccagccctgccgcttgcgctgccgttgttgttgctgctgctgctgctgctgatgttgctgctgctgctgttgctgctgctgctggtgttgctgctgcagctggtgctgcacctgcgcttgggcctgaatcgaggccgcctgcggatgtgcgggtgtcagcggctccttgcggctgggtggtgtggccatcaattggagcggcaagagtttcgcattgcttttgagcgtgccgcaattgctgttgctgctcatgttgctgccgctgatgttgctgttgttgctgccggcggtgctgccagcaatggaggtcagcggcggatggggcagcgacatggagagcggcaggctgggcggcggtgccatcatgtcgctcacatagccacccgctgtggggtatttcaaaatgcccggcggcgccatcgaagtttgggccaaggatacgaccacctgcaaaagttcacagatgtcaaaaaagtacgcatttgtagataaatatcgtatttcaaaaagatactttttttttttttttaaatatgtatttttaaattagtttctatgtgaactactcacttgaccgctctggccgcccgtctggttggccacctcaatgtcctcgagcgtgggcatgggcagtaggggcgtggtcttgaaggtcgtcgtcgctggtggcggtgcgggcaggaggagcgggggcagctgggcgggcgacatgctgggcaggatgccgatggacacatagttgccggccgtgccgccggcggacgaagtgggcggaatgcccccacccattccggtgttgtagtgcagggctgtgggggcggccatggagccggtgggcggggcagcggtgacggtggacgcggcgattgtgtgggcggtcagctgcgaggggggcggaggcggcgccccgttttgcattgacatcggttgatccgggttcatcttgcatttggtcgctgttttgcccgctccttgcctcgcagttcaatcaatcaatcaatcaatcaatcaagctgcggattgaagaaggacaagccatacttaatgggttggataatggatagatcttgtgtcttaaatgtttctaaaaaggaacagtgtttaatttaaacttgagttcctctatcgaaaatgttataaataatttcattgcatacccattcgtggttttgattaaacattattacccaagccgtttgacatccaattggcttgatgccatttttgttttgagctacacaaacacacacacacacacacacaggctaaaccttaagccatttagctcagcatttcgaattgcttgacataattttctgctaaaataggcaaatagatacgattaaccgatttggtattccgccccgatggccaaggcaatcgcttacaattccggccaaaatccgcaagtgccgcaaatgaaaatcgcattttgggtattgagaatagccgaaactttgggccttttgcaggtggaaactgaaacagttgagtgcggttcatcaaagcaataattaacaggcactaaagcacacacatgaatgtttggatatcagaatgctgaagacatttccattaatttgtacaattgaatgcttttcattaagttgcaattactcgaaattaatcgcttttgccaaaatgcccaaaaactgacggggttggcattgggcttttagtgggtagttagggtgattcgatgggtgtttccatgggcaaagcctaagcggcttacgcacccaatcatcaactctgccatcgtcgattgaagttcgctttgattgagaagcagacgagcgtgaaatttgtttagttttcacttcgaaacgccaaggtttactcccaactatttaggtgaagaacattattagcctggcatttcaagtgtgactaccaaatgtgtactgcataatcatttttgcttactaatttgctaaaaatt

SEQ ID NO: 38741 - DNA, 1038 bp, DROSOPHILA
atgaacccggatcaaccgatgtcaatgcaaaacggggcgccgcctccgcccccctcgcagctgaccgcccacacaatcgccgcgtccaccgtcaccgctgccccgcccaccggctccatggccgcccccacagccctgcactacaacaccggaatgggtgggggcattccgcccacttcgtccgccggcggcacggccggcaactatgtgtccatcggcatcctgcccagcatgtcgcccgcccagctgcccccgctcctcctgcccgcaccgccaccagcgacgacgaccttcaagaccacgcccctactgcccatgcccacgctcgaggacattgaggtggccaaccagacgggcggccagagcggtcaagtggtcgtatccttggcccaaacttcgatggcgccgccgggcattttgaaataccccacagcgggtggctatgtgagcgacatgatggcaccgccgcccagcctgccgctctccatgtcgctgccccatccgccgctgacctccattgctggcagcaccgccggcagcaacaacagcaacatcagcggcagcaacatgagcagcaacagcaattgcggcacgctcaaaagcaatgcgaaactcttgccgctccaattgatggccacaccacccagccgcaaggagccgctgacacccgcacatccgcaggcggcctcgattcaggcccaagcgcaggtgcagcaccagctgcagcagcaacaccagcagcagcagcaacagcagcagcagcaacatcagcagcagcagcagcagcaacaacaacggcagcgcaagcggcagggctggtgctcctgtttcagttcgacgccaggaggtggccatgccggcggtggcgttggcggtggtgttgctgctggtgagaccggaaagacgccacccggatacggaagcaaggagaagaagaagagccgcaaggccacctcacaaacggtgtggtccgccctgctgacaaacctgggcatctgcatgctgcttctcgcctacacacttctgggtaagcgctaa

SEQ ID NO: 38742 - protein, 345 aa, DROSOPHILA
MNPDQPMSMQNGAPPPPPSQLTAHTIAASTVTAAPPTGSMAAPTALHYNTGMGGGIPPTSSAGGTAGNYVSIGILPSMSPAQLPPLLLPAPPPATTTFKTTPLLPMPTLEDIEVANQTGGQSGQVVVSLAQTSMAPPGILKYPTAGGYVSDMMAPPPSLPLSMSLPHPPLTSIAGSTAGSNNSNISGSNMSSNSNCGTLKSNAKLLPLQLMATPPSRKEPLTPAHPQAASIQAQAQVQHQLQQQHQQQQQQQQQQHQQQQQQQQQRQRKRQGWCSCFSSTPGGGHAGGGVGGGVAAGETGKTPPGYGSKEKKKSRKATSQTVWSALLTNLGICMLLLAYTLLGKR

SEQ ID NO: 38743 - DNA, 3132 bp, DROSOPHILA
ttttcgcattttatttgtgttgccggccattcttattttttaccttgccgagtctggtgctattttttgtgtgttcatttttttttttattttttgcattgttcgtcggacatttcagttgcaggcaactctggacgggccgagctgccctttcaccctttccgcccacttcctggtgtccttgttttgtttgccggccgctttcaagtgcgaaaactctcggatgagattcattcagtgattttctcacctcgatctatccttctcgttcttggcggctatcgcgcactctttctctccttttagccaactgtcagtttgacagaaatcgcctgcagtttggcgggactgtacttttatcttttcttgtttgacggcctgtatttttttttttattttttttcagcatccttcgttgcaaatctgaattaaaggccttaattgttttgagctactatttgataccaacgtttgcattgaataaaactttaaatttgcactcaggttttgtttcgactgtaaagccgctgcagcagcttaaataaatgtcggactgaactattagtgcattatttaatcgctttcgcacacaccttcacctgttatccgtgcactgcatttgcaagctttttaaattcaaatctttatattttaaataacctgaatggaatgaaatctcctgctgagtgcaacgtgcgttgataaccgcaatggtttggttgcctcactagtaaaccccccgcaaactccccttttatcgcacacacagactttccacaggatttgaccatttttatgtggcgactatgaaacgaaactggaatttaaataatggcaatgaaaacaacgaaagcattttcgctcttataataatcttatttggtatgcaagttgaattcgggtcatttattgtactgaaagatttacaatttgttgcgtgaaattttttttggtaagaaaaatgaaaaagtaccttaggattttttcaataaaaaattctctactgtggcgcttcagtttcatttttagcttccgttttcgcttcagctggtcggtttcgcggttttatttctagttctagttccaattcagactttatatctaggttagcgattaacgtctcatcggtcacctttctcactgcgtccttgaccgaattatccatggcattcttaaaagttttcaatactctattcttgattggtacttccaagagtacgggatccatctcgagaggctttgcttgatcttcgttctggacttgtttttgcgttctcttggccttaggaatcctcactgagtgtagatatttaaggagctcaatttttactttactatcaaaggagtattcttgatcgtctgaggtgtcatttgattctttcgcggttttagtcgctgccacaggtcctttcctggacatccttatggcccgtttccagttctgtttcgtcatcattttagggggcagaacattaatcgccttaaatgatagtgggaatattcttattgtatctgacatcattggagtcggaaacaaatgtgtgggaaacgaaaccagtttaggttcctcgtgcaaaaatagttccaacttaatgtacgatgtctgattcaattcgtcaccctcgccgttcatcaaatccattgcctcctcatggcgaagcatcaggtaatcattctcgtgattgagaaagtccttcggttgctgcgatagaaaaaagttccttgttttccgaataacactgcgcgattgtatatagtaacgatcgtatgcagtcagcgtataaaacatacgacttgaggtctccgggcccatcagccatataacatatatggtgttctccggcgtaccatgcattttctccagcttctcgccgcatattctgtccggcagcatggagaaccaagaggtcttgcaaatcattagattcatcattaaatgatgctcgtaccgaccgaaactatgaggtagaccgcaattgggataactcaagtaccggcgagctggtcgagtgtgcggcttaccctcggtgccagcatacaggagtatattcaacacctgcggttcgtcgtatttcaaactatttagattgaaggttttacgcaatcgttgattgtcatagatgatcgccaagttggtattcggactattgttgtgcttgcggagcatgtgtaccagcatattcgatgggaaaaccaattgattgcagttactcaaaatacattttccgggtgcccgcgatagatgattcaaaatgtgtttacgatcacgattattatctttttcctccacatccattggcgtcgcctcgattttcctactgtgacttcttttcttaatcctcggaacaaccattttaagcgccaaatttccgtacttaatgcagtgtatatatatacaaaaaaaaaaatgtatatttaaaacttggaaaatgtatagacgttcggtgctgatgttttggcttccgaacgaaaactaactgggcttcgttaaagtgttcgagctgaatcgcatgacgactgacagcgattacacggcccacttggccgcaagaaaatgaatacagcagccagatactgggctcccaatcgatgagaaaagtcggaaaactatctccacggagttgagctaacgagcagcgcacacacagaaatacacacggatgggcaaccaagttttcccttacattttccgttggtaaaagtgtcggaaaaacagggtgttactgcacgtcatatattcgtgtatttttgattaagcattccccagatacgaattaaatcaataacttttggctgcccaaaaacaaattgaattcaaaagttcgaggccataaaacaaagccacaaactttgaaggcactcgcaattgctgctcgacttggagttacccaataaaaataattaaatataaaaatatacaaccaattgattacaagaaaaatgccaaagaacgccttgggaaattgttataaaaaataattataataaatatttgctcaatttatttggagttttttggtaagtggtaatttcagtgcgagtctacccaactttcgggatcacctgccgtccgtaaaaaggtttgcttctgaagcccccctcaataagcgtaatgaaacgtaatttgaatgg

SEQ ID NO: 38744 - DNA, 1179 bp, DROSOPHILA
atgctggtacacatgctccgcaagcacaacaatagtccgaataccaacttggcgatcatctatgacaatcaacgattgcgtaaaaccttcaatctaaatagtttgaaatacgacgaaccgcaggtgttgaatatactcctgtatgctggcaccgagggtaagccgcacactcgaccagctcgccggtacttgagttatcccaattgcggtctacctcatagtttcggtcggtacgagcatcatttaatgatgaatctaatgatttgcaagacctcttggttctccatgctgccggacagaatatgcggcgagaagctggagaaaatgcatggtacgccggagaacaccatatatgttatatggctgatgggcccggagacctcaagtcgtatgttttatacgctgactgcatacgatcgttactatatacaatcgcgcagtgttattcggaaaacaaggaacttttttctatcgcagcaaccgaaggactttctcaatcacgagaatgattacctgatgcttcgccatgaggaggcaatggatttgatgaacggcgagggtgacgaattgaatcagacatcgtacattaagttggaactatttttgcacgaggaacctaaactggtttcgtttcccacacatttgtttccgactccaatgatgtcagatacaataagaatattcccactatcatttaaggcgattaatgttctgccccctaaaatgatgacgaaacagaactggaaacgggccataaggatgtccaggaaaggacctgtggcagcgactaaaaccgcgaaagaatcaaatgacacctcagacgatcaagaatactcctttgatagtaaagtaaaaattgagctccttaaatatctacactcagtgaggattcctaaggccaagagaacgcaaaaacaagtccagaacgaagatcaagcaaagcctctcgagatggatcccgtactcttggaagtaccaatcaagaatagagtattgaaaacttttaagaatgccatggataattcggtcaaggacgcagtgagaaaggtgaccgatgagacgttaatcgctaacctagatataaagtctgaattggaactagaactagaaataaaaccgcgaaaccgaccagctgaagcgaaaacggaagctaaaaatgaaactgaagcgccacagtag

SEQ ID NO: 38745 - protein, 392 aa, DROSOPHILA
MLVHMLRKHNNSPNTNLAIIYDNQRLRKTFNLNSLKYDEPQVLNILLYAGTEGKPHTRPARRYLSYPNCGLPHSFGRYEHHLMMNLMICKTSWFSMLPDRICGEKLEKMHGTPENTIYVIWLMGPETSSRMFYTLTAYDRYYIQSRSVIRKTRNFFLSQQPKDFLNHENDYLMLRHEEAMDLMNGEGDELNQTSYIKLELFLHEEPKLVSFPTHLFPTPMMSDTIRIFPLSFKAINVLPPKMMTKQNWKRAIRMSRKGPVAATKTAKESNDTSDDQEYSFDSKVKIELLKYLHSVRIPKAKRTQKQVQNEDQAKPLEMDPVLLEVPIKNRVLKTFKNAMDNSVKDAVRKVTDETLIANLDIKSELELELEIKPRNRPAEAKTEAKNETEAPQ

SEQ ID NO: 38746 - DNA, 2714 bp, DROSOPHILA
cttttttatccagcccggctactcgatgaaaatgccaatatctgagcatatataggatatggtggtggtaggtaggaaagttagggctgttatgcccagatacaaatgcatcgtaaacatgtcgtcgcgttatattgggatctcaagtagcccacatccctggcagttgccattgtctactcattgttccctttctacgttttatttgctgtattttttttttcttctgcagttaccacccttcttggctacctaaaagcaggggaaaatattctagacatttcaccatttctacttactctcacttaccttgcttcactggttcctttggttgtccggcaactattgttgctggatatttagcattagctggtgtccgatttctactttttaacgatttaagctagtttaaagttgcaaaagaaaaaaagtgtgggacttcagatagcctcaaaacgacagggaaaatcacttaaaacacccaatcgatcggatctgatttgatctgcccgctgcggccgtcctgtcgactgactgccaggacataaaaacataaggacaacaatttatggcacatttgcagcttcgaggaatccggtgtatctgttcgggtcataaaaacagtgatgccccagaaaaggcagaaaaaaggggcaataaagttggcaaagcggaatcaataatgtgagcctggccataaaccgttgccaaatttgtgtgccaaggtgccaaagtttgccacgccccgatccagattgatttcaacatattaaccaactttggaacgctgaaggccacgaaatactcgacaagttgttaataactttttttccaattttgcaataaattgcataaattcgcaaatattgaaacaaacataaaatcattgtgttcacttgagattttattttatttctataatgttcgcatgcccaattatgtagataatgataaaacaatcctttatgagaatgatattgatggggttaagaagttaagtctatgacattacgccctcgattataacctcgaagtagatggagaaccggttgccaccgccattgcacagctcgtcgagctgatcctcgttgatgctgacaaagtatggatctagcccgtttatgaactgtctaatgggcatccgactggcaaagttgcgtatccgccgacgattccgcctatagacgctctgaatttggctattcagtagggctaaatttgcataaatgggacgccgcgttaagggtgaaaggagccaaaacagatagacaccgccccattctgccgttacgtccctggtttcttgcatgtccttttcatcgatctgctttaagagggatttccacgtggtcctgcagaccatcaccaaaatgggcaggtgataggttaacatttggtggcatggcggcaggtccaactgcggtgccgtaaggtcaccttgggacacggagctccaattcagcacggccaagcattgatcgttgtcaatgatcagctggcgataggggagcatcagcagagtgcgctgacctgtcgacacttcgcgcaggcgcagttgaaagggcaaagttcgcgcccgcggatccaaatgtttggttatcatgtggcgcagcaagtgggtatgctccaccacagcctgacaatcggctaacggacaaatggccggcttgctatgcccgatcgactcgtcaatcgaagaagccctgtcctccatattttatttatttgaacactacaaattaaggtaaacaaggtacaaatattgagttaaaatgaacaggccacttagcatcaatacaattacagtattttatgaagtttgaacaagccatcaaagagtgctagttaaagtacattcccgatgagaagagctcttgtatctaacataagggaacatttttcaaaatcccagataaaatgatttttcggactgatttggagtgtatcgctgccttatctggggaccgtaagccccagtttttgaatgtttcaccatcattagcatttcatcttatttcactcaggtgcgcgaccgtgcgtgcaacatttccacagaccaaatggcaacaacgacaacgtcagacactcgcattttccccggctgcagagctctttgggggtggaaagtgggtggattttccagctgcatttccacagtccgtccgtgcgtgtccggcggccgggcacaaaaaaaaaaaaaagacccaagtgaggcggccaggccaacgtgacgtgcccatgatgatgcacagggaaaaaaggacaataattctaagaaaataatgcctaattttgctatcgaacctagtaaaaaaaaacacgttgttctcacaacttaggtattcagctttgatttgctgttcacttcgtgctaaaaaccaaaaccgagtcaaagtttttccctgtgtgcccatggaaaaggctatgactatgactataactatgactatgacgatgagtatgatgctgcccagctatgctctctccctttctagccctgccacccgtccctgccgttctgctctacgaagctgttgatggcgtattaatgaccggaatgcggaatgtaacagaaaatttcgacccactctcgtatagttcttattttcctgcagttttcagtgcactgcagcaggttcaaaagtgggtttgggggtctccgtgtagatccagggacgggggaaatggggggggggagtggggaaagagggatg

SEQ ID NO: 38747 - DNA, 714 bp, DROSOPHILA
atggaggacagggcttcttcgattgacgagtcgatcgggcatagcaagccggccatttgtccgttagccgattgtcaggctgtggtggagcatacccacttgctgcgccacatgataaccaaacatttggatccgcgggcgcgaactttgccctttcaactgcgcctgcgcgaagtgtcgacaggtcagcgcactctgctgatgctcccctatcgccagctgatcattgacaacgatcaatgcttggccgtgctgaattggagctccgtgtcccaaggtgaccttacggcaccgcagttggacctgccgccatgccaccaaatgttaacctatcacctgcccattttggtgatggtctgcaggaccacgtggaaatccctcttaaagcagatcgatgaaaaggacatgcaagaaaccagggacgtaacggcagaatggggcggtgtctatctgttttggctcctttcacccttaacgcggcgtcccatttatgcaaatttagccctactgaatagccaaattcagagcgtctataggcggaatcgtcggcggatacgcaactttgccagtcggatgcccattagacagttcataaacgggctagatccatactttgtcagcatcaacgaggatcagctcgacgagctgtgcaatggcggtggcaaccggttctccatctacttcgaggttataatcgagggcgtaatgtcatag

SEQ ID NO: 38748 - protein, 237 aa, DROSOPHILA
MEDRASSIDESIGHSKPAICPLADCQAVVEHTHLLRHMITKHLDPRARTLPFQLRLREVSTGQRTLLMLPYRQLIIDNDQCLAVLNWSSVSQGDLTAPQLDLPPCHQMLTYHLPILVMVCRTTWKSLLKQIDEKDMQETRDVTAEWGGVYLFWLLSPLTRRPIYANLALLNSQIQSVYRRNRRRIRNFASRMPIRQFINGLDPYFVSINEDQLDELCNGGGNRFSIYFEVIIEGVMS

SEQ ID NO: 38749 - DNA, 2648 bp, DROSOPHILA
cttcgccctagccgccgcataatcagagcaatttcaaagttgcgtctgtcagaaaggcagaaaatgtggcctttcattccatacttgccctgccaccatactgatttttgcaccaccaactacttcggggtggcggaattttttttggtggcttttttgttggcacttcctttttgacaccggcgttccgctacgtttcacggctgccatttcacctggcttcacgtcgcacgacctcgtcgcccatcgtgtctatcaatgcccgggcgattgtcctcgcacaatccgcttgtcagccggaaaatgtgaatttatcacacgagcacgtacgcatattccccgttgtccttttttgccaggagccatccggatgtatggatgtgctggccacccccgttggctcacattcgttcagattagttaatattcgcatttgaatatgagcaggcgcttatctggaccggagcacacggacttccccacccactggatgtcgcttggcgcctctctatgcgcttctcaaaaagtccagctaagtgggcgaaaatcgcagcatgtcttaattgcatcctgctgctggcaaattcacttctgccacaattaagagccaatttcaaagctagcagccccaaggggtttcctaatcagcgcgacaggaggttgtcgcggttgtcggccaatgtcgcctgcattcgctttttcggcatcgcatctctgctttgtttccgccacggcgctacttaaatgccaaattcgcgagctcaaaaagtccaaaatgctgccagctgcgttgctctttctcttttagctgcttcatctgaagtatacaggcaaatgggaatagagggtcaaatgtttcaagatagatagatagatagatagatagaacttatttgtatgaaaacaataattttatgaaatacatataccaaattacaaacgaacaatttatttcagttgttgtggatgtgcagcgccgtggaattcattgaagaacttcctacatatctgtgatgaccagcagcggatcgtcatcgcaagcaaaaggatttggatttggatcgctttggcgataaaaatgtgacggcaagttcggcgtaacttttctgatagagatctccggactttcgtcggactctgatttctcttgacaccccatctgaaactgactgtttggaatgggcacccaaacgtgacggcgtgcctgcaggacatcctggctgtgcattcgattggccctgcatatgcgcccaatgctcgtgtcgtactttaaagccagacgagtcatcgtgtcctcggcggtgatcgaatgtcttgtccagcactcggatcgcattcgactacagttgcagatattgggaccccgatcttccgtcaggctggccatagcttcggtttctaggtgaagggtgaaaaaacaataagcaattgtgtttgtttatcaatacgtacgatttcttatttgagcactatggcaatgcctaccagcattcattataatcgcatactcggctggatattcgcacctcctttgatgccgatcatctgtgtcaacgaatgtctgtctgcgggcgtccgattcgcggtttatgcaaattacttgccatacatatcgccgccagtgcgtcgtaatcaactcatgggccatcgttgcgtatacgtaatcaactcatccgacgcgtcgtgtgtgagcgcataatacgccctgttggctgggaaagaatgggaaatggaaggaaaaggatgctgctgctctacgtccgggtcagccgcaaaggtgtcgtcatcttcgtcagcattggggtattttcgcttttattttccctttttttttttggggggggggtttggtggggttctacttaagccgccttgcttataatcccttctgcgccagccgtgtttcacgcaattcctgccggaataataccgtgtactcgacgaaaattgggaataatttacggattagtcatggacttggttaatgcgcccagcgaatcgctgttgagtggaccactgcagagttgtttacgcatgtttgttgcgatgattcttatatttactacaatatattactttaatggcggcacatcgtgtaacagaatgaaattgaaaaggaatgcaattgtatttgaggtaaaaactggttaaagtaactgtaccttttacatcatattcatggcagtcccaaggcagtaaagtgacttaactcataaattggagaagaatacattcacccctagttgaatctgtcttcacttccgcatccaattggatttgtttactttactttgcattggatctggaggcccaatttgatttcggtgtttgcacacgcaaaaaagtaaacccttgtattttatattatatacaatatatacaatcccccgtgattccagccatattcattcgtttgtcaatggcttcatttggctgccgtaagatatgcgaaattgatatgaatgacaaaatcgagcgggtaagggattcggggtaaatctagtgtgaagtcgtttcactgcgtgaatttaatatgggtttaaacgatgcggggtgtcctttttcccataattgcagagaaaaacaaagaaaagaaacgagttaaacagcttgcaatatattttttggtgttagctttaaactagtta

SEQ ID NO: 38750 - DNA, 561 bp, DROSOPHILA
atggcccatgagttgattacgacgcactggcggcgatatgtatggcaagtaatttgcataaaccgcgaatcggacgcccgcagacagacattcgttgacacagatgatcggcatcaaaggaggtgcgaatatccagccgagtatgcgattataatgaatgctgaaaccgaagctatggccagcctgacggaagatcggggtcccaatatctgcaactgtagtcgaatgcgatccgagtgctggacaagacattcgatcaccgccgaggacacgatgactcgtctggctttaaagtacgacacgagcattgggcgcatatgcagggccaatcgaatgcacagccaggatgtcctgcaggcacgccgtcacgtttgggtgcccattccaaacagtcagtttcagatggggtgtcaagagaaatcagagtccgacgaaagtccggagatctctatcagaaaagttacgccgaacttgccgtcacatttttatcgccaaagcgatccaaatccaaatccttttgcttgcgatgacgatccgctgctggtcatcacagatatgtag

SEQ ID NO: 38751 - protein, 186 aa, DROSOPHILA
MAHELITTHWRRYVWQVICINRESDARRQTFVDTDDRHQRRCEYPAEYAIIMNAETEAMASLTEDRGPNICNCSRMRSECWTRHSITAEDTMTRLALKYDTSIGRICRANRMHSQDVLQARRHVWVPIPNSQFQMGCQEKSESDESPEISIRKVTPNLPSHFYRQSDPNPNPFACDDDPLLVITDM

SEQ ID NO: 38752 - DNA, 2906 bp, DROSOPHILA
ggctctgtttttcgtggcgattcattcgcagcagtttatcaaaggatttaggtgtgggattacctgtgttaacaccaatggggatttctttttctctgcattgggaaagagttgaaaataggattagcagatatatatttttataaatttcgttgtttttagatacttatcaatgcaatgtaaaacggaaataccttaagtttctttgaaaaatatataaaattaagttgctgttcaatatcgatgtgtgcttaatgcttcagcctccccttcagcaaaccgagagactcgggctaattgaaccagttccgcagtggctgcatctatgcaaataaccccagttgccctcttgtcgtctcaatggaggtcctgccaccaggagtctcccctttcagcatttctggggagactgctgcaaatgggggccaggacatcaacaccaataccaacaccaacagcaacagcaacagcaacagcaacacgaagaaaaacagaaacaacgactctgacgacggcaatatcaaacagtaaatagataaaaacaacatgacttaatgagtggtatttatttttatgctaattactttcgaataagcaggaggtcctgtgcagagcagtgcagtttgccttaatgagtggggcaataattgttgttgttgttgttgttgttgttgttgtttttgtcgctgaatcctgctgcgggacgactccttaaggactcctgtgcctcgccagtgtttgcataaagtaaatgccattatacaagcaagttgcgctgtaaattcacttcaaatgtacaaaagcactcgccctgaaagccgtaaagtatgcgatatgacagtgcataaaggatgcaagagttgctggagaggatccttcttggcggcacagtcccgttcctccttcctgcccaccgcatgacaaattcacattcttctgcacactccgctttaataaatgcaattataaggtaaaaataaacaaaatctcaggctgccggttattccaaaggctcatgcaggatcagttcgagatggagatgatgttctgcgccacatatctccttcaattcttgctgcgttatcaaaagggaatgccggtccttgggcagatccttgccaccgatttcggtatacatttggcccgaatttgccacacaacgcatggcgctccggccaaccgacaaggtgctgttgaatacggtcatggcaacgtggagtggtcggatgcagggtgcactttgggtccaaattatcaagatatcggagtccataatctcttcctgctcggcttcagtggtcgtctttagatcgttattcttttggccactatcgcaccttttgatcgattcttcactgcatttgggatgcgtatcatttgagaaatctagatgttttacctgcttaagatcttttgactgtttaccattaagatcttcttgcgattccatttttctgtccacaagtgcccagcagaggaatgttgtcctcttcaccagcaccataatgggcagatagtccttcagcgattccagccccgaatcctctttcaatcgattgtgataacagaattctcgttctccgggtaattggctatgcttaccacgcacgccgccgtaaagaagaactcccagacatatggtctgcgttccaatcagctgagaaacatcaaagaccagggtacagcgttctccgttgaaggccacttgcaaatgctttttcacatttgatcggaaatggcgttgggccaaatgttggagcatatcatccttgaaaacggtggaaatgcatttttctatgggacattgtgctggcagctgacatagatggttcagtgtaagtttcgtttgtttttcgggctcggtactggagaggccaattagtctgagtggcttatttcggtccatatttctcgaattgtgttgaatgttttaagtatataaatataatgtacgctaataaattttttgaagctatgcaaacggcctactgttgttgaaacatcactgcttagttggatataattgctctgccgcgtaaaattagcctttttcattatattaataaattcgatttaacttttgtaatgaattaacttcatgcgtgtaaccctttttctttttattaaatcatatgctcctttactctgctaaatgagtttatcaatggtttatgatttccgtatttaaatcagcaaacacatttcatttatgtaaaacagagcagcaagtaattattaccatcaatattcccattcgaaataaaactcttgataattttcctaacaaaagaaggaatacttcagctctattttatggatatgtttcccatgcgaactaatcttaagtgataaaaaaaaaaaaaatagtacaaaacgttaaaactaactcatccatcgtgtccttggaatgtggtcataactgattctttcgctttcgacctggtcgcacggcatacagatcgtcggagatcagggatctgccagctctggaggcggccagaagacgtctttcgtgcaccttacgatgcttggtgaggtgatccgacctggcgaagcacttggaacagtagtcacatttgtacggcttcacgccggaatgggagcgcttgtggcgggccagttcatcggatcgggagaaccgccagacgcaatctggccaactgcagacgtagggcttctcgcctagatgccgcctcaaatgggccttcagatgcgcgggcttggcgtagatcttttcgcaattgccaaaggtgcacaggtaaccccgttcgccggcggcattttcactcatctggagggcagaaggtggggcaacagcttcagctggactggcggaatcactgctgccgggcgaggaagacgatcgatcgggaacgaaaatctctgaatgtggtggccccgacagc

SEQ ID NO: 38753 - DNA, 906 bp, DROSOPHILA
atggaccgaaataagccactcagactaattggcctctccagtaccgagcccgaaaaacaaacgaaacttacactgaaccatctatgtcagctgccagcacaatgtcccatagaaaaatgcatttccaccgttttcaaggatgatatgctccaacatttggcccaacgccatttccgatcaaatgtgaaaaagcatttgcaagtggccttcaacggagaacgctgtaccctggtctttgatgtttctcagctgattggaacgcagaccatatgtctgggagttcttctttacggcggcgtgcgtggtaagcatagccaattacccggagaacgagaattctgttatcacaatcgattgaaagaggattcggggctggaatcgctgaaggactatctgcccattatggtgctggtgaagaggacaacattcctctgctgggcacttgtggacagaaaaatggaatcgcaagaagatcttaatggtaaacagtcaaaagatcttaagcaggtaaaacatctagatttctcaaatgatacgcatcccaaatgcagtgaagaatcgatcaaaaggtgcgatagtggccaaaagaataacgatctaaagacgaccactgaagccgagcaggaagagattatggactccgatatcttgataatttggacccaaagtgcaccctgcatccgaccactccacgttgccatgaccgtattcaacagcaccttgtcggttggccggagcgccatgcgttgtgtggcaaattcgggccaaatgtataccgaaatcggtggcaaggatctgcccaaggaccggcattcccttttgataacgcagcaagaattgaaggagatatgtggcgcagaacatcatctccatctcgaactgatcctgcatgagcctttggaataa

SEQ ID NO: 38754 - protein, 301 aa, DROSOPHILA
MDRNKPLRLIGLSSTEPEKQTKLTLNHLCQLPAQCPIEKCISTVFKDDMLQHLAQRHFRSNVKKHLQVAFNGERCTLVFDVSQLIGTQTICLGVLLYGGVRGKHSQLPGEREFCYHNRLKEDSGLESLKDYLPIMVLVKRTTFLCWALVDRKMESQEDLNGKQSKDLKQVKHLDFSNDTHPKCSEESIKRCDSGQKNNDLKTTTEAEQEEIMDSDILIIWTQSAPCIRPLHVAMTVFNSTLSVGRSAMRCVANSGQMYTEIGGKDLPKDRHSLLITQQELKEICGAEHHLHLELILHEPLE

SEQ ID NO: 38755 - DNA, 2243 bp, DROSOPHILA
ctgccagccccattttcgcccatttattccgacctcgcaactgccttggcttataataataatgaaaatcaaggaatatgtagcgaacgatgtggccaaggccatgtgacctgcatattagcagggcaactgagcaactgagcaactgaagcagcatgatgaatatacattatgttcattgtccttaattgaaaatcgcacacaccctctctcacctcatctcaattactgtgccacaaaaaaaaaaaaaaaaacaacaaaatttcattattttaaaggacacatgcacgtttacactgcttttttcagcatttcgcgcttccacgcttttccccccaagacacttttttcccccatttttccacctcctttgttgcttttgccttttgggctgccattggcaggacatttttggctagaaaaattgcgggtgaggatacttaacgccgccacatgtatagtttttccacatttttttttttcgcgcacgtactgaacaccaacgccttttcactcgcctcgtgccaccggcaacatgcaacatgtgcaacagcagcagcatccacagcagcgagttgctggctgtcggttttcttgtcatttcattcatgacatttcaattaccttaaagagcttccaggcgcggcgatgccagcagccaatggattaaaattgagcatcattaagatgaaaatatgtattttttggatttatggtttaaactctgggaagaaaacattagaaacttgggtgatttttttgtccatctggtttttgtatcttcaacttcatttgtaattaaagtttcaattttttttgaaaagaaaacccttgattggtgctagatttcctttctccactttcgcctgatgtctcttgcaaatttgatttgcaattaaggcagtaatttagctttaaccgatattaagtgttggccttccacttaaaccgtctgccaactttgccaacttttgccagcggctggaggcctgggtcttcattaaaacggattcgtgttgccgttcgcttgatgttgctgctgttgcagatgctggcgctgatgttgctgctgctgctgctgctgttgctgttgctgctgttgctgttgctgctgttgccgatgttgcaggggcagcagctgttgcagctgcggcaagaaaggggcgagggacttagtagctgagtactcttgcaactggcaaatggcattatttttgtttgacaagtcaaagcggcgcgacatcgcgactactgcgacgacggccgcaagagtaagagcacttcaaagttgtacttctaggcgcgcccaagtgcgtgtgtgccgcaccacaaccctacccctccccactgaaacaaagaacccccttgaagacccccttttggccatgtgttccagtcactcggatgccggactaacgagtctcgacgcggggcaaccaaaagtcgaaatgaaactaccgaaaaataaacattttcgaaattgttgctttttacatgcagaacttatagaatatggaatcgtcttctaaaaacaactacactagcaatgtttacttataaatttagacaattgtgctgatcggatatgaatatagttttatccttgatcgaaattagcgctgattgcctacagcgaaggaacttaaagcgctctttactctcttcgcgttttctcttagttggcgcctgggaaaattcaccacggggatagcacggcgcaaactcaccacggtgccgaaagtccgaggaaaactattacggcagcgagctgaatgcacgaaccaactggctcccattgacattttcacctactttcgacctgtcgctttccctttggctgaaaagcgagccgaatgcactgtggcagcttgaccaagtcccagttgcctcgtttacccatttcccccaatttcctccatgaattttccaaatcagctggtcgaaaaaaaaaaaaaaacgaaacgcaagtctccttcgaaggaaaacgccaatgtttcggtctcggtttttgggtcgagcaacaaatttaattacagcctgggaaagtgccctgaaatcgcttaagaaattaacgagctagtagttaatgattccactgtatccgtttttgcgatttttctctgtttttgttgccgccgcacaataaagttgcattgaaataaggcgaaagctgtaaatggcgcataaatagcaaatcgaaggcgttgttaatgccctaaaatgtgcaaggagtattccgatgt

SEQ ID NO: 38756 - DNA, 243 bp, DROSOPHILA
atgtcgcgccgctttgacttgtcaaacaaaaataatgccatttgccagttgcaagagtactcagctactaagtccctcgcccctttcttgccgcagctgcaacagctgctgcccctgcaacatcggcaacagcagcaacagcaacagcagcaacagcaacagcagcagcagcagcagcaacatcagcgccagcatctgcaacagcagcaacatcaagcgaacggcaacacgaatccgttttaa

SEQ ID NO: 38757 - protein, 80 aa, DROSOPHILA
MSRRFDLSNKNNAICQLQEYSATKSLAPFLPQLQQLLPLQHRQQQQQQQQQQQQQQQQQQHQRQHLQQQQHQANGNTNPF

SEQ ID NO: 38758 - DNA, 2902 bp, DROSOPHILA
taataccgagattgatgatactcgggcagccagctgcatgagtatcacgacttcctgcagactccatacgtgccggctgatgagcagagaggaggagctgcgactggaggagcaccatccgcgcgcttcggcgatattatgaccctggccaagggctacttggagcagctaccaggaccgggcaacgcatcctcctatcgcttcgtggagggcggcacgtgttaccaactcaattgccccaactcgaatcccaaacagcgacaagccttgtggcaggttcagcgcatccgtcatcgggacggggacaagggtcatcactaccactacgagatgaagttcagtgtgacaccgctcgacaacaaggcctggcagccgcatcaccaacagatgagctacatccaaaaggagtccgactatccagccagtttcgggcgtttggcggcacacgatcacggcttcgcccagcgccgccaggatagggagagatatggcgctgcaaccggtggaaacgcggagcaatcgcaagcgacatttgtccatggcatttttcagccagctccgccgccaaaactcaacatcggtgagtatttaaagggcgctgtggcgcaaggcggtccaaaaatagagttatatactggtggtctgctcaatctgggactgcggcccaattatgtggtcccgactacatttcgaccaagctatccgactgcgctgaaatttggaaatcatccggaattggaaagattcccatcacacagcggtgatttgggtaatgctggtaatgttggtccagcggtccctggggatttggcaggcatttcgggcgctgtaacccatcatttccatcaccatttctatgtggcacctggtgccggcgatgcccaattgcatccggaattgggctaccgcttgcccaactcctcgccaccgcaaccgatcacaccggctggcaatccgtcctcaaacttatatacccatcatcagacagtgcagtttcccagctccaattcgggttcttccgaatctctggaggaacaagatcaggatttactgctgcggacaccacaaatttatgggcaggcttccaagtatcaaacagccaagctgccacctttgcttatctatgcgggcggcaattccggcgatgatgacaagtcctttgtgcaaagcgaaccgctggaggagaccgtctatcgctattccgagccggatcctttatatgtccaccagaaccccatcgatgtgctgcaggataagcagccgccggaggaggaaaccgataagggacagcatcaggagcaggcaagtgaccaaaagcgaggggaacagcgcccagtggtcagtttggagcagcccgaactgagcacaactgtttcagcgccatcttccaacgctggcacaaccactgagactgcaagcactgagagatccacacacgtcatccccaccacgatcgccagttttgtgtccacctccacgcactttagtccattgcgctccattagtaggtatcgcaccacgccaaagataacagctggacgatccaccacaaccactacatccaccagcacggaaccaccgctgaataagtgggccaagcggcgaaaggagcaggacagcaaggccaagagcagtcaccgccacgaagccttcgttagcaccacttcgtcaaccagcacgacaacttcaaccacagcaactccgccgtccacaatcgctgcatccactggcgttccattggcgtcgccactgccaccggcaccatccaaggaagtggtggaggtgctcacccagaaatcggttagtcgatctgtgagcatcaaggtgggcgagaacggcgaggagatacccatcattgtggacgacgaggagaacgaggtgaagccagtgctgactaattagctgcctacccatctatcttaaatcctaattatcctatcctatatttaagcctagccgtaagcacacttaatcccacaataaattcaagtaatccgtacggcacggggtcagactcacctgcctcctcgttggcgtacttgtaattgggcactggcgtcaagggaatcaacttggcataagtcgttggcatcatttccgtaatgcgctgatgatacgaaaggctgtcaaagatgtatgtagttgagtatcaatggtttgtacacagacacggttataacctaccgtaggcacttctgcaacacctcctggatgaatttgggacgcggatgctcgccgtcgaggagcagacagctgtcccattcgtcccatgaccatgtgaacttgaagttgctcagatgataggagaaccaattgacgaaccgatcgaaacatgacgtgttcatcgagtcgatgcgcataaagaggatctcggtggcctgggccagaacctggggcagcgtggccggctgcagtttgcagagttcgatcaaaatggagccgtagcagatgtccagatagcgcggcgtgggcatatgaaagagctcggcgaagaccacctcgacgatgcagtactccagcgggatcttgtgcttgtacggaaagctaagcagctgggcggcgcaatcctttcgctcgtgatggtatgtttcaatgatatggtgtagatgctcctcaatcaaaaagcgctctattgagtgggcacccggcagattgggcccatcggggcagtcggtgtagtcgaacatgcggtacaccacccagggcatgggatactcaaagttgtcgtgatgcggcggcggcacaatcgtgggcagattgtgctgcagtgcctcgcaaagtattgaatcgaatacgagatagggtcgtggtatatgcttctccgcccaattgtcctgccgcaacttgcgtatctgcgcccacaggcagtccaagtactcctcctgtggatgcggagcgtctg

SEQ ID NO: 38759 - DNA, 1764 bp, DROSOPHILA
atgaccctggccaagggctacttggagcagctaccaggaccgggcaacgcatcctcctatcgcttcgtggagggcggcacgtgttaccaactcaattgccccaactcgaatcccaaacagcgacaagccttgtggcaggttcagcgcatccgtcatcgggacggggacaagggtcatcactaccactacgagatgaagttcagtgtgacaccgctcgacaacaaggcctggcagccgcatcaccaacagatgagctacatccaaaaggagtccgactatccagccagtttcgggcgtttggcggcacacgatcacggcttcgcccagcgccgccaggatagggagagatatggcgctgcaaccggtggaaacgcggagcaatcgcaagcgacatttgtccatggcatttttcagccagctccgccgccaaaactcaacatcggtgagtatttaaagggcgctgtggcgcaaggcggtccaaaaatagagttatatactggtggtctgctcaatctgggactgcggcccaattatgtggtcccgactacatttcgaccaagctatccgactgcgctgaaatttggaaatcatccggaattggaaagattcccatcacacagcggtgatttgggtaatgctggtaatgttggtccagcggtccctggggatttggcaggcatttcgggcgctgtaacccatcatttccatcaccatttctatgtggcacctggtgccggcgatgcccaattgcatccggaattgggctaccgcttgcccaactcctcgccaccgcaaccgatcacaccggctggcaatccgtcctcaaacttatatacccatcatcagacagtgcagtttcccagctccaattcgggttcttccgaatctctggaggaacaagatcaggatttactgctgcggacaccacaaatttatgggcaggcttccaagtatcaaacagccaagctgccacctttgcttatctatgcgggcggcaattccggcgatgatgacaagtcctttgtgcaaagcgaaccgctggaggagaccgtctatcgctattccgagccggatcctttatatgtccaccagaaccccatcgatgtgctgcaggataagcagccgccggaggaggaaaccgataagggacagcatcaggagcaggcaagtgaccaaaagcgaggggaacagcgcccagtggtcagtttggagcagcccgaactgagcacaactgtttcagcgccatcttccaacgctggcacaaccactgagactgcaagcactgagagatccacacacgtcatccccaccacgatcgccagttttgtgtccacctccacgcactttagtccattgcgctccattagtaggtatcgcaccacgccaaagataacagctggacgatccaccacaaccactacatccaccagcacggaaccaccgctgaataagtgggccaagcggcgaaaggagcaggacagcaaggccaagagcagtcaccgccacgaagccttcgttagcaccacttcgtcaaccagcacgacaacttcaaccacagcaactccgccgtccacaatcgctgcatccactggcgttccattggcgtcgccactgccaccggcaccatccaaggaagtggtggaggtgctcacccagaaatcggttagtcgatctgtgagcatcaaggtgggcgagaacggcgaggagatacccatcattgtggacgacgaggagaacgaggtgaagccagtgctgactaattag

SEQ ID NO: 38760 - protein, 587 aa, DROSOPHILA
MTLAKGYLEQLPGPGNASSYRFVEGGTCYQLNCPNSNPKQRQALWQVQRIRHRDGDKGHHYHYEMKFSVTPLDNKAWQPHHQQMSYIQKESDYPASFGRLAAHDHGFAQRRQDRERYGAATGGNAEQSQATFVHGIFQPAPPPKLNIGEYLKGAVAQGGPKIELYTGGLLNLGLRPNYVVPTTFRPSYPTALKFGNHPELERFPSHSGDLGNAGNVGPAVPGDLAGISGAVTHHFHHHFYVAPGAGDAQLHPELGYRLPNSSPPQPITPAGNPSSNLYTHHQTVQFPSSNSGSSESLEEQDQDLLLRTPQIYGQASKYQTAKLPPLLIYAGGNSGDDDKSFVQSEPLEETVYRYSEPDPLYVHQNPIDVLQDKQPPEEETDKGQHQEQASDQKRGEQRPVVSLEQPELSTTVSAPSSNAGTTTETASTERSTHVIPTTIASFVSTSTHFSPLRSISRYRTTPKITAGRSTTTTTSTSTEPPLNKWAKRRKEQDSKAKSSHRHEAFVSTTSSTSTTTSTTATPPSTIAASTGVPLASPLPPAPSKEVVEVLTQKSVSRSVSIKVGENGEEIPIIVDDEENEVKPVLTN

SEQ ID NO: 38761 - DNA, 2616 bp, DROSOPHILA
attgcattagcagaaatcaaacatgcaacgcagccaagagtcagccgaccaaacagatggatggattggatggatggatggtggagctactgctaccaaatagttgcaacattttcaattatgaaatgcttctttttcagtggattgtgtgcaggcccgatccggcgatccatccgattatataaagtgaggcgagcgtaaatcataaaagcggcgaatgtatcttgcagataccgaaaattgcatcgcagcgcagcgcgtgccgtcagcaacaaaaaaaaaacgacgttagctcatcgaaggtggcaaagtgggcggggggcggtcgtgcaggtggtacagtgggtggcggtgggtggcgttgggtggtggtgggcttctctgttgtttttgttaattacacggcagcagcagccggttgctagttgcgcatgcgcctcaaatttgttgcatttacgcgagatatttattatgatttcgccgaggtttctgcgccgttttatttttcatttttctcttttgtattttgtttgttttatgaatgcggcaaatggtaaatggaaattgaagaggaagattgcatgatgcaccactagatgcggttgttagctcgttgcatttggcaactttgcccattttataatttctgatatatatttcattctaattgataccatgttcagtacatacgagtatgtatgtacatatatctcctagcaggctgtgaattaatgatttcgaaccaaagtcaatcgtttggcagatccctttatttccagtcattctcaacaaacacattcactgggtcgtgtcatacgagtcgacccttaagttaatatacatacatataagttaagctagaatcgagatgtcaaagcaaaacgttcagaaagatcaatgcgttcgttgcttgcactgcaaaaaagtgatccaatgttcacgtttcgatagcggtggcttactgcgtcacatcgaatatgagcatccggaattattcacaatggcccgttccaaacttagaaatgtttacaatccctcaacggatcagagctactgggcttgcgaggtacgaaaaagaatgatgtctaatgtatcggattcggaacttaattcacaaaatttggggcgatgtaagttgataatgagactagattatatacctaatgtgaatatgattcgcaggtaagaacaaaaagaggacctctagcgatagcatatcgaaaaaatcatcgactgccaagtgcaatgtggctgctgccaactattcatgtccgcactcaaaagccaagaacagtacatgtccaaaagccaggaccaatggtccgtgttcaccgcaccacatgatctttcgaaagatggcctacaagtcctccgctaggcgatggtgtgccatggatggtagtatcttctgtcccgcttgcggttataagaagcgtccagtggtcaaatgcgcatccggatggaattccagatggtgttcatgggccttttgctttatgccctgtctgaagagctcggataatggggagaatatatactgtggccattgcaacacctttttgggcgccttcaatcgcgagaagcaaagtctcaagccgaacaagctgtatgcttaatgtcacagctttaaagatgtttcaacgcaagtatttcccatttggtcgcagtctttcaaaattgtttgtttacaaagcatcattgtatagctcttatagatttaaattacaaatttacgcttgcacgcctcaaataaatacacaaaaggaagattgtttaatttgtttccaataaggcagttttattagcttgagtcttgtatattgtaaacttgttgactatttgtatattgtacaattcttcttttgctggaagaccctaccgaagaatccccaaagactcttgtagattcccaggtcgtacatattttggccgtggcaaatacaacatgacatggagagcagatctccaacctggcgttgtgacagatatgagcaattaggtgagtggttggtgtttctcgcttttttttttttttttttttgttgttggtacacctgggccaccctggtcagcgagttgaaatgaaattggtggggaaagatggtggcagagggctaacggaaactgctgaccacttatccagttcggtcagctttcatctaagtcgcagcaccatatcttttatggcaataaaacatattacgagttgtttgctgctggtgtttcttagtcacttggattttttctcattttgtgttttctcgtttctttgggcgcagttaaaacgacactcgtctcggggtcaaaaggtgctgagaacgagccgccaaaatgatgctgaaattgtggaaaaccgaaacttgtttcacctgaactctgctgctgtcgtgttgaaatacatatttcggacatttggttcagatcaccgagcagccaagtactttcccaaagaaatcttcgaggagccctgagaaagtttcaggccaaatgaaaggattaagggggcagcacgaaaaagttgactaattggtcaggcagctgatcgcagatcgtctatatcttttcaaagacaattgatcgaagcagtgcggaagggtgaggttagggattttaaca

SEQ ID NO: 38762 - DNA, 564 bp, DROSOPHILA
atggcccgttccaaacttagaaatgtttacaatccctcaacggatcagagctactgggcttgcgaggtacgaaaaagaatgatgtctaatgtatcggattcggaacttaattcacaaaatttggggcgatgtaagaacaaaaagaggacctctagcgatagcatatcgaaaaaatcatcgactgccaagtgcaatgtggctgctgccaactattcatgtccgcactcaaaagccaagaacagtacatgtccaaaagccaggaccaatggtccgtgttcaccgcaccacatgatctttcgaaagatggcctacaagtcctccgctaggcgatggtgtgccatggatggtagtatcttctgtcccgcttgcggttataagaagcgtccagtggtcaaatgcgcatccggatggaattccagatggtgttcatgggccttttgctttatgccctgtctgaagagctcggataatggggagaatatatactgtggccattgcaacacctttttgggcgccttcaatcgcgagaagcaaagtctcaagccgaacaagctgtatgcttaa

SEQ ID NO: 38763 - protein, 187 aa, DROSOPHILA
MARSKLRNVYNPSTDQSYWACEVRKRMMSNVSDSELNSQNLGRCKNKKRTSSDSISKKSSTAKCNVAAANYSCPHSKAKNSTCPKARTNGPCSPHHMIFRKMAYKSSARRWCAMDGSIFCPACGYKKRPVVKCASGWNSRWCSWAFCFMPCLKSSDNGENIYCGHCNTFLGAFNREKQSLKPNKLYA

SEQ ID NO: 38764 - DNA, 2741 bp, DROSOPHILA
gtgaagtacatgcagaacgaggtgaaggagttcaagaagctgaagcatcacatctctcagaatcacgagagattgatccaacagcagctgccattgggagcgagacgtctgcttggcctggacgccaaaaccaacaacgatgatctccatcgaaggggtcaatactgcagcacgaggacgccgaatggttcagatgaaccggtgttgttttgtgacttctattcggacatgcaaatgcgattggagagcaaggatgtggacattgatgtgctggaacgggatctaaaggccaatacggatgcggtcattcgccaggtgtccaccgaaatccggaaacagttcaatttggagcagcttaaggcggccaaggcccaaatgcctgcgaaggcgacaaaggctacatagtaatgattgccattacaaacagatggactggcacattcccttcacaaagcaaccaaatatttttggtcacaaaatagcttgtacgattaatctgttcttaattagtatttaggtatgtgtgcaagagacgtgtgcgagtgtgtgtgtgtgtgtgtataggataagttttcaggtatagttttatcaggctttatacacggaaatgttcgaaaggaggaggttctttcgatgcataatacagcatcgttatgtcactttaattaataatatcttttaatgaatatttaaacaacgactttttcacattcgataagaaataagctttgaattgtattcaactaagaactcttttgtttatttctgttttcagacagcttatttttatatttgttatattatgttttatatttgtccaaaacctcctacctcgaatttcccaaaaaaatatcattaagatcgcgtatttatatttaccactagttttacattcagttatgttatcttaatgcaaaaaaaaaaggaaatctacaaaaataacaacagccattatccaatcgaagaactgcaggttcccgagaggagtttctttggtggattaccatcggattggttgggtttttaaggcctccaacagactggaaagactggcaaaagaatggggattgtcagcgttgctcacaagcaaaccgctccagccgcaattccgggcaccttcatagtccatatccaacttgttgccaatgtgaagggcctgctccgctggaatttgcaatctctgcagcggaatttcgaagataccgcgttcgggcttcataacaccggcttcgtaggaagtcagaatgaaatcgaatttgccggcaaagcccatggcgtccaggacttgtggcagtgacgaatcgaaattggagatgatgcccacacatttgccggcatttcggacgttctgcaccaactcctgggcaccattcacgtgactccaacaggcgctggtccgaaaaacggaaattagccgctggccgatcttctccagcttctcgggcgccagaccgtggtccacgcagctaaaggttcgagccaccagctgaagccaccaacgctgccaatccaatcccggcgagtaacggccaaagtttggatgttcgctgctcatcgccttgaattgctggcgaaagcattgttccaatcggcggcgatccactccggtgaccccgaactcctctgccgtctgatggtactggcgaaggggatcctccaggcgaagcagcgtgtccgttacatcgaaggtcaccaggcgaaagcgtttcaaattcgcaacaaattgcgaagtcaacgacattttggccaacagtgtggtattgtttgtccactagatattacgtatatgcatttggtatattttaattttcgaaaaacctccaaaaacacatttgcttagttgagaatcgtttattgaattaaatgaagatgcttttcttcattttaaagttacagattttctacttgtatgaagagtttatttttttttttgaatacaaacaattatttggaaatgccgcaaaaatacattgcctaaattctggtatttttcgcaacaactgtactgtgtgtatttgtcggcatatatttgctgcccgccggcgggcacactaagccaaacgaaaataattttgttacaaaaaaaatcaacaaatcgtattgttaaatggccgtgcgaacacgaacgaccataaatccgccgcagcgctcgatttcaaatcaaatcctcgaggcagtcggtagttaataataccgcagagcggccagatcgggggatatctaccatccatatccgtgtatcctccaactagagatcggagcaaatagtggaggagatcccgaatagatccggagttacgtgattcccggcgacacggatacgattctggctgggattgggctattggaattggtgtactgctaacggcggatcatcgatgcaacaatgaatgttcacaagcggccacgtctgaatatggaattcggctcctccaccagcaataccaacacttccacatccccgtcctccgtaaatatcagcaatgcgaatccaacagctggacctggcctcatgaccattaccaatcaccacaccgctgatttgtcagaggccctggtccacagttcctttgccaatggtcagcaaagtctgattctcaccagcgacacgggaaatccgctgatgaatagccaaggtgctcagatatttctcaccatttgcggagacgagaactcggacgattcgcaggagtactatacgattaaacaggaaccgggatgtgatctagatatccattcgc

SEQ ID NO: 38765 - DNA, 741 bp, DROSOPHILA
atgtcgttgacttcgcaatttgttgcgaatttgaaacgctttcgcctggtgaccttcgatgtaacggacacgctgcttcgcctggaggatccccttcgccagtaccatcagacggcagaggagttcggggtcaccggagtggatcgccgccgattggaacaatgctttcgccagcaattcaaggcgatgagcagcgaacatccaaactttggccgttactcgccgggattggattggcagcgttggtggcttcagctggtggctcgaacctttagctgcgtggaccacggtctggcgcccgagaagctggagaagatcggccagcggctaatttccgtttttcggaccagcgcctgttggagtcacgtgaatggtgcccaggagttggtgcagaacgtccgaaatgccggcaaatgtgtgggcatcatctccaatttcgattcgtcactgccacaagtcctggacgccatgggctttgccggcaaattcgatttcattctgacttcctacgaagccggtgttatgaagcccgaacgcggtatcttcgaaattccgctgcagagattgcaaattccagcggagcaggcccttcacattggcaacaagttggatatggactatgaaggtgcccggaattgcggctggagcggtttgcttgtgagcaacgctgacaatccccattcttttgccagtctttccagtctgttggaggccttaaaaacccaaccaatccgatggtaa

SEQ ID NO: 38766 - protein, 246 aa, DROSOPHILA
MSLTSQFVANLKRFRLVTFDVTDTLLRLEDPLRQYHQTAEEFGVTGVDRRRLEQCFRQQFKAMSSEHPNFGRYSPGLDWQRWWLQLVARTFSCVDHGLAPEKLEKIGQRLISVFRTSACWSHVNGAQELVQNVRNAGKCVGIISNFDSSLPQVLDAMGFAGKFDFILTSYEAGVMKPERGIFEIPLQRLQIPAEQALHIGNKLDMDYEGARNCGWSGLLVSNADNPHSFASLSSLLEALKTQPIRW

SEQ ID NO: 38767 - DNA, 2569 bp, DROSOPHILA
accgccagttaaccactctggaccactctgcaccactcggcatcactccgcgccactccgcagcgcccaaccaccattgacggcattcaaacagacaaggagttgagccaagtggaaaaataatgaaaacattcgaggataatgatgacgtcgccgtcgacggcccttgaaatcgatataaggtcggttgtttgtgagaggtcgggggattgaaggtctatatatatatatatatgtatggctatatggctatatggctaagccggggataagtgagccaaccaccccgaaaggaagccagcttcctgggacaaaacctgccagcacccaggactccggggtcgacattccagattcaggattcttaactcgcgagcaggggggtgaaggggggagcactcgacacaacaaccgtcagcggaagtcctcgataggcctcaaggaagtaaacactcttgaaaaccacgcaaaagcttatcgccctctagattgaatattggtctaaaggtttaaggaaaaaaaaatagtggtagggtgctgaaaccgtcacaaaagagagaattcgatcggttatagtatagatttttatatattttatttatttgtgcgaagataataatttcataaagcttagaacccattgtatgttgcagagtacgagtgaatacggtcaaatcgaaagatacattgttttcacagcctgtttggttgttcctaaaacatctgatcgacttaaagctccgatttgaaggatctcattccagaaataaagagacaatccccatttggtagctctgcctgtgttgtgatgcaagcaagtcctgccaaggaacaggaatggagtcacgtaaaatattttgtcgtttgtaatctatttacacaaaaggacgctcccgactcccggctctcagcttcacagtttcccaaactcatacccccttgtcgtgttgtgttatgtttttcaagagcagcagaacaaggacattcacatggacgaacgatggatgatggagcagcatcaagagcaggacctgaaactggaatatgggatgtgcgatgcaggatgcaggatgctggttgctggttgctggctgctgaatgttggacgtggaagctactgctggacggattgtcatggtgaggcgacatttcatgacaaatcctttgtgcatgcattccagacactggcacgagcaaggctgaaggaccaagagcacaggctgaattgcactcaaacaaactattgccacatttagcaggtagcattctcatttggtagactttcattctttttcaacattttcaattgtttacataaatctctgcgatgacatacatacatcagtttaatcattacattatcataaatacattattatgatcacttttgtactacaaatttcgtccagtgctgtgtctgctcctctggtgttggcgacacagttgacgcgcactcgccaaattcttgccccggccacgcccaccgcctaccgcctaccacctaccgccccccctgcacaacaacaccactttcagtggcagtgggcggcagtgggtgtgggcaaataaaaagcgaaatgaatgtacacccatgtgatattgagtgctttactctggctgcccatcatcgtttttatcctccatctctgtccgtctgctgtccctttcttttgacaaacacaacaagaagaaaagaaggcaaacaacaacaacgacaaccagtggatgtactatactttttgctgatgctcccaatctcgcacccattatcttttcgccttgctcgtcttttattcgcatttcatttcttttcctcgagcagattggtttttttttttgccatatatgaaggaaaacgactgtacatacatataaaatataagatatggaattatagaaattacaagaataataaatataagcttacttatcgaactacccacaaatcgatataaagtcattttagaaaatcgtatataatttcatataaacatgttatatttcacaatttcacattgcagctataatttcgaaatatgttctaactatttcatttatgttatatatttaactttaaaagatattcatcaatgtaccaggtatcgaatctttcgaatccttatccacttgggctttctgcaaagttgttgcccgtcggctaatcacaccaaaaaatatatattctgttttaccgtggaattgaaatgataaaacaatctagataaatgtacaacagcagtgttagtaaatgaaagattattacgtaaatataaatgaaaacccactgctcttgaattgtttatattaatgcatattctaatttcatatgatatgatatgatttcatatccaccgtgcaagtaaaatgtgtaattttaatggcaggaggagcaggacgacgttttcttgtcctttccgccatctgtctactgcccagtgtgtgtgtatatcttttggagatatatgcagggagacaacaaacaacaccccccccccactgtactccccctgcgacccacccacgagaatcctccagccgaaggactatgtgttatgtgccgtgccgccgt

SEQ ID NO: 38768 - DNA, 297 bp, DROSOPHILA
atggatgatggagcagcatcaagagcaggacctgaaactggaatatgggatgtgcgatgcaggatgcaggatgctggttgctggttgctggctgctgaatgttggacgtggaagctactgctggacggattgtcatgtgctgtgtctgctcctctggtgttggcgacacagttgacgcgcactcgccaaattcttgccccggccacgcccaccgcctaccgcctaccacctaccgccccccctgcacaacaacaccactttcagtggcagtgggcggcagtgggtgtgggcaaataa

SEQ ID NO: 38769 - protein, 98 aa, DROSOPHILA
MDDGAASRAGPETGIWDVRCRMQDAGCWLLAAECWTWKLLLDGLSCAVSAPLVLATQLTRTRQILAPATPTAYRLPPTAPPAQQHHFQWQWAAVGVGK

SEQ ID NO: 38770 - DNA, 2545 bp, DROSOPHILA
ttcttctgccggaagttccagaagcatgctttcgcagcataaaagacaaaataaggagtccagggtatgggtaagttgggagctttgatttcgtttcgttctttctggcttctctgctgttttattgcggccgttgctgagattcattaataattcaaaaaattgcacatggccggcggcgatgacagcaacgtcgacagcgacgctggcagaggcagagcgtgtaatcgagttgttaactcaaagtgacaatgaacgcgggcagcgacgctgacgtcgccatcaaaagcatgtgcacaacaacaattaaatgcagtcaacacacgatcacaaaacgaaaaacaaaaaaaaaaaaaaaagaaaatatattttttaaccagagcggccaaaacgacagaaggagatggagagtgcgactttgactttgttgctgcaattgcttttaatgcttttaatgaaatcaacactttttactgccacttgcacgcaatctactgcttcgtacgtttctttattttcgcctcacttgggattttttcttacgttttgcgcgcaactttttttttcgggctggcagcttaattaaaagccaaaacagctaaaacatatttcgcgccttttgttgcttaacaattaaaatcaacaacaacaaaagcccaacttcacactcaattaacgcgatgcaggcagacaaacaacaaaaagcaaaacaacatacataaaaatataacagcaaaacaacaccatacatatgtaaggcataaagcaaaaaaagttttggtgctgctgtgaaattatatatatatgtatacctcctttttttcgtcacccactagatggagtggcttggaaagtgtgggggagtggggcaaaacgcagcacagactgcaaaacttttgtttgccgtcaattgactgcacacacaaaatagcggtggaaggtgcaaaagagtcagtgagttgcacagacagagataggaagtcgaatgcaaagagctatgttccttagcaggtttcctgcgttctagatcagtacacagtagttcgttggtgtaaatgttggtgaacatattgtagtagttctgggcttagttgttgggttttttttttttggctttggcttttgcagtcattggtgtaattattggtgtacaactagtggagctttgaatagtaaatatttctatatacatatatattgtaatttatattgcagttgttaaatgggttgaatttctcacaaaatctcacaaatggtgaagggcttaggctgaatgcaaacggatagcacacgtcattgacacctaaaacccacattcacaacaactcagtgccactacagtgacacctctctaattacgccacacacaataatggcagacttggaacatacatatttcacttgtatcaatctgactgaataatgtaatgcatgttttgagtgcaacaagagttctttggtgatatctgcacaccattgacccatcaacctgcaagtgcccactgcatttcgagcaagacctctcgttatccactctctatgtagatgtgcgtgcgtaattgccttttggcttcgtgttaattttcctcgtggaaaacgcacgacaggaaaaactggtatggggccatgtcgtaggtgctacataaatttgatttttattttcccagaaaaccgaaaccgaaataagaagaatttttattcataaaaatcaagtggcaacataaattcgtgtgtgttaccaaaaacgtaggtgtattttgtgccgatgtttgttcttttctgtttcagtttcagtcactcgaatcggattttgtttggcagcctaatcaggcaaacagaacacgcagagcagttaaaacgcaccaaatgccccatacaatttgtataatttttcagcccagaaaatattaaataaatatgcacacatacatagacatgtgcatagcagcaataataataataaagaaaaaataaaaccaaagcaactcgtcaatttttgccacttaaaattcataaagcgtcgcctgagactcagaaaacttcggcagaccagactatacatacatacgtacatacatatgtacatacatacatatagtggcaagaatgacagggagaatcggggaagtgggaaaggaagacgaaggattgcattaaactaaaagtcctgaatttgacattttaagcatttccatttttagaaatttatttctgaaaatctaattcaaacgagttaagtcatttgtttagccataactctggggcaatttgataagggtcgagcaggtaatgcaagttcttgaacatttatttattttaatattttgacagttatgttgcatattcgtggccactggccactggccaagcaacattagcaacatttagcaacacaactcccgctcatattagtccacaacttttggtcaacatgaatgaagtaacgacgagggcaccttttgaaagtgatacttctaatttctggaaaatttaaataccatcaaaacaggcaaactcgaagataagatcaggttcaggtatatcg

SEQ ID NO: 38771 - DNA, 396 bp, DROSOPHILA
ttccttagcaggtttcctgcgttctagatcagtacacagtagttcgttggtgtaaatgttggtgaacatattgtagtagttctgggcttagttgttgggttttttttttttggctttggcttttgcagtcattggtgtaattattggtgtacaactagtggagctttgaatagtaaatatttctatatacatatatattgtaatttatattgcagttgttaaatgggttgaatttctcacaaaatctcacaaatggtgaagggcttaggctgaatgcaaacggatagcacactgcaacaagagttctttggtgatatctgcacaccattgacccatcaacctgcaagtgcccactgcatttcgagcaagacctctcgttatccactctctatgtag

SEQ ID NO: 38772 - protein, 40 aa, DROSOPHILA
MQTDSTLQQEFFGDICTPLTHQPASAHCISSKTSRYPLSM

SEQ ID NO: 38773 - DNA, 2132 bp, DROSOPHILA
cctttaaacacccctttgccgcagctctctgccccatccactgggccattcatctggccaactttatcaaagggttgactttgtctaagcgcctctgctccagtcgcctttctttaattttcctcagaggatgcttggatggaggatgcttttacaaggctggagattctgcagatttggtcgatatgggagtgctggggcgggacaacgccacctgatggcgacacgtagctcgtttatggcagcgcctgatggcggcgcctgtgggaaaatgctatccaacccgcgcgactcttttcgtttgcactcagaaaaattgatttgacttagatactatagagttaactgcactatataataaatatataacccctttcgcgaagtgtaccatccaaaaagggtgtggcacatggctcacgttcgaaactcccactcccaattcagctgcaactccatcaggtccatgtccacgtttatgtcttaggacccgagatctcggtggctgatgccctttgaccaatctgcgccaaatgccagcaagtgaatggcaaaaacagacagcaagagaaaaaccagaagctgaaggaatccactcaatgagttggccatgggtttgctaataaggcgacatgtgagttatgagtgccgagtgccagaggtaaatgaataccaagtgagtggttgggaaaagacgtgaatgtcagataccgaaattattcggcattatgccaatattttaacgtaacgaaggcttaaagttcgtaggatttcattgaaggtagcgttattatacatacattttacatatgtacatcaaaagtacgtggaagatatgaatcaattttgttatttctattgctgttgatagaaaaaaaaatccgtttaattaggattctctcaattcagataacgaacttgaactataaaaagcaaacgagtcgtctttagacaaaaagcggattgtgttaagtggaccgattggaaccggcaaatccgggagttaaccagcaacaccagcgattagatctcccgataggtggtgatagacggttgcgacatttgtggttaatggagagatggtgatgctatcagatggtatcgtgcctacacagaaacggaggcatttggtcattaggcatagcattgtcacaatatttgcgcgtcgcttgggtggtgcgaggtcgattgagagatagttggatagttaagaccatgtatcatcagacatatacgcgtatcgtatccctcaccctcgatgactttttcaagtgcacacgcgtcgcagggctaaaatgacaaagacggcggccgccgtcaagccattgagatttaattgcacaaacgccagttgagcaataaaatttatggcctacaaataataggtctcatccgatccgaatccgaatcccaatccgaagaccaattcgtatgaggcgctgagggggtgtagcagtgctctttaccctggacaatcgaggctctttgatgaatggccgcaatgacaactcagatgaaagcgcaatagcgctggataccaaatgtaaagtgtccaaacaactggtataggttagatgatatttaaacagcgaaatatctattctattgatttcaaaagtttaacatttaagttgcactcctagtactttaaacatttaactgtgatgattagtagaatttaactttagtctcttattcagctggtattgcaatcgatactttataagtggatttattttggggttcctttttcgccagaataaccaaaagtcagcccgcagagcttgtgcatgtgcgtgtgatttgaaagcgaattcaaaaaaaaaaaaaaaaaaaaaaacttaagcccacagctgctgataattcctgcgatctcttgcatcttccttttgttttcatgatatgggggtgcatgtgggatttggttttgcgactggggatgcagtcaagtagattcaattgccgctaaccctcgatttcagatggattttggatctgccttagtactctactttcttttttgttagttcaaatgttctcgatttcattgatttcaattgctgcattgcattgcccaaaatatcgattacaataaacacacacacacagaactacaaagggcgggacacgggcaa

SEQ ID NO: 38774 - DNA, 132 bp, DROSOPHILA
atgaccaaatgcctccgtttctgtgtaggcacgataccatctgatagcatcaccatctctccattaaccacaaatgtcgcaaccgtctatcaccacctatcgggagatctaatcgctggtgttgctggttaa

SEQ ID NO: 38775 - protein, 43 aa, DROSOPHILA
MTKCLRFCVGTIPSDSITISPLTTNVATVYHHLSGDLIAGVAG

SEQ ID NO: 38776 - DNA, 3698 bp, DROSOPHILA
cgagcaacagtgatgatcatttggctttcggtatcataacctaaatcataattcgaaaaaaaaaatcaagctaagaacacattttgcaagaacgacaagtagtagaatatacctcacaccgaacgatgtacattgtaaagaaaaatatctcttatgcattgtttataattaagaattgagaatcatagcaaacaaaaactaaagcatatgataactttgaactactcctttttttttaagcaaagtttcagtttattttatcgaatattttcttgctaattttcagatggaaccatgtcatctctggctggctaaatggctctacgcaactgcaactctttcgttgccccaaattggccttgaggcaatgattggctgccgctgctgcccagatgccggcactaccctccaccccccagatggaccacccccttgggccaccacaagagccccagtccccccgctttttttgcgtttctttcgcactgatctcagctgtcgtcgcttgttagtgcgcacgcgtgtctttctctctctaagaagcagacagcgcgtgtgttcccctctccatcgcactcaacgcccgcccagtcacgtcctctcactcactccgccagctctcccactcgcacccatcacgatcgtgaggcgttgatggcgatggcgctgaagctggcgcgcatgtgcaacgcagccacaaaatcgcaattgccgggaccaaaaaccaaaatgaaaaaaagtacggaaaaaaagagtaaccaaaagcttgagctggcacaacgttgtaagacatagtttgttgccagagccactcccccccccctccttcccctccaccacaccgctgtgcccctgtgcctgtgtgtgcgggacctcccgcagataattgcccatcatctcatcaagttccgcccagctatttaacaaccgaggagcaggagctgcaggaggaggttcgggggccccgagagcaatgaaacccacaaaacaagacaccaaaatgatgaacgcgaccacgcaaagtagaagtagctgcccgatctgggagtcgaggaaggagtctggctccagaccatacaatcccgagggccgctacgtgagttttaccctagccaaataagaaatatgcttattatttcactacagtaaatattcctcttcccgtaattaatacaacacacatttttttttttaaatatttttatatttattgaattacatagtttagttttacatataagtcgaatatacttggttcacttaatgattacgtctatttctataacaaagctaattatactctctctatcttataggttcagcaggaacttctcgagcggccttgggctggcgccaccaacattgagcagcagcttggggcggcggctgcagatcggctccaaatcgcagcagtccaggttgcagctccactgcaaccacaggcatcaatagcaccaccgacgacgaaaaagcaggaggagaccaagaagatccaagcatgttaatcgagtcatatcgattttggcgtggttcgtgtctcggacgttttgcccaaccaccgtccttcgcccccccaaaaagggggagggtccgatcccatcagcgaactcgtaactaaattgaatccaattgcagacgagtcaggccaaataactgtgagacataatgaatgagtgttggccaaattgcaacttgacttgccagccgggcagttaagggttaatggatgggcaccaagggatggcttgcagggggggttcagaggatggtgctctgcatcttccagtttatggcccagccactaatatctcaattggccagcggaaggttcgattaactgcaccattgggccacccacctggggcatctgcacttggacatctgcatgaatgcatccataagggcaaatgaatcattcattctaaaagagtgtacagtattcacagtttatttgaatgtaagtagatagaataataagtagatagaatgttattgaaaagctttagtgttgagtattttggtccacacataaacaatgacacggggccttgtatatgtgtgcgtaagaaatgtaaaaattaattttccgtcaaaaaacaatccgatttttaggcagaacattgtaaatattggttcaaaaatggtttgtcatacctcgttgcactcgtaattcaattcccaatcgattggcattcaaatttgggaactttaattttttgccaatttttgcaaattttgatgatgttaccccttatcaaaaatgtgaaaattcacggaaaaattaatttttgaaaatccatttaaaagtgataggggtagttagcattggtaattagcttcacaaaacagtttactgtttagctttatgacaatttttagccaagttgtgatgaaaaaactgtaagtaaatatcgaattttccggtcaaaaataaacatatttttaggcaaaacattgtaaatattggccgttgcgcttgtaaattttttaactagaattttttcccaatttattaaattttgatgaccccctaccaaaaatgtggaaatttactccttcgaatccgccagccccttcgaggacgcctacccacgctatgcaggacttagaggacactccgattatcaccatcgacgacgaggttcttcacgacgaggacgacaaggacaactcccaggtatccgctgatggtggctagcaaataacaaaccccagtgataaaggaaaaataaaatatacacgaattttcaattggaattgactttttattgggaaaattgggtgaagtttcgattttagccggagtttgatttacagtggccaccagctacagattatggtctcctggtactcataggtccataagtttgccaaaaaacggtgaatttttgggaaaattgttagatttttcgatttaaattaccaggcgaacaggaattccagaaggtgaccatcgatcagttggttcccagtatacacctgctactcaattatggttgcctagtaacaagtaatccaaaatctaaaaagttagccacaaaaaaccattatttttagggcaaattgttagatttttcgatttaaattaccaggcgaacaggaattccagaaggtgaccatcgatcagttggttcccagtatacacctgctactcaattatggttgcctagtaacaagtaacccaaaatctaaaaagttagccacaaaaaaccattattttttgggcaaattgttagatttttcaatttaaattaccaggcgaacaggaattccagaaggtgaccatcgatcagttggttcccagtatacacctgctactcaattatggttgcctagtaacaagtaacccaaaatctaaaaagttagccacaaaaatctgaatttttagggcaaattgttagatttttcgatttaaattaccaggcgaacaggaatcccagaaggtgaccatcgatcagttggttatcagtatacacctgctactcaattatgatcgcctagtaacaagcaaccaaaaatctataaaatttgccacaaaaaaccataatttttagggcaaattgtttgatttttcgatttaaattaccaggcgaacaggaatcccagaaggtcaccaacgatcagttagttatcagtatacacctgctactcaattatgatcgcctagtaacaagcaaccaaaaatctataaaatttgc

SEQ ID NO: 38777 - DNA, 408 bp, DROSOPHILA
atgatgaacgcgaccacgcaaagtagaagtagctgcccgatctgggagtcgaggaaggagtctggctccagaccatacaatcccgagggccgctacgttcagcaggaacttctcgagcggccttgggctggcgccaccaacattgagcagcagcttggggcggcggctgcagatcggctccaaatcgcagcagtccaggttgcagctccactgcaaccacaggcatcaatagcaccaccgacgacgaaaaagcaggaggagaccaagaagatccaagcatccccttcgaggacgcctacccacgctatgcaggacttagaggacactccgattatcaccatcgacgacgaggttcttcacgacgaggacgacaaggacaactcccaggtatccgctgatggtggctag

SEQ ID NO: 38778 - protein, 135 aa, DROSOPHILA
MMNATTQSRSSCPIWESRKESGSRPYNPEGRYVQQELLERPWAGATNIEQQLGAAAADRLQIAAVQVAAPLQPQASIAPPTTKKQEETKKIQASPSRTPTHAMQDLEDTPIITIDDEVLHDEDDKDNSQVSADGG

SEQ ID NO: 38779 - DNA, 2702 bp, DROSOPHILA
caaaagtctgcagagcaaagtgtgaaagccatgaacgcgaccacgaagcgggttaattacgtacaacaaacaataaattacttggtccagaagatacaaaaagagggcgaagacgaacaaaaaatgaaataaactgcaggaaaataagaaagaaattagttaaaagagaccctaatcagcttagtggactttttgctttgctcggaaaagatgattaaatttctgtgtcaaaatcaaaggaatattgcgtatacgccgtgtgcggctggactttcggctatgtccttgttttgatggtcttcgtttcgctccttttcagctgtcactcctgtaagcttctttttccacttctttttttctttgcgctcattttccctgactccttcactttatacgctgcctttgtttttgcaagctcacacaaaaaccaaacatacccagcaagccagaaaaaaggcgaaggaattttttaattataaaatgtgtttatccggaattaattgtttttgttgttctttccattttagcagctgtcctgaaaaagtaatccagcaaaaataaagtctttttatctctgcatttctctttggtaaattactcgcattttaagccatgactttttgtagtgcacgaaaaaggattcctaaccctttctagaaacacttgtcgggttattttccccagaattccacttaattctaatattgtatattttaaactctagttttggaatctgataaataatttactgatcgtatggcaaaaacagctttacacacgagtctaacgcaaattggtttagctcaaatcaatatcccaacagctttacttataattcataatatatttatagttttggcaccacatcgatttttttcatacaacccttgaatttgccatcaagtggtctaattggccctgactcatttctacatttctacaataagctcaaaaactcattttattattcgttgcagttcatcgaggtctcaaaaactaaatggctcacaattcaacactgcagcgcaaaacgaagctaacccgcttggagaatcctttggtggccccaacgtatcaacagcagggaaacggctgtggactggccaaggagaaagttccgaaaatgaatgccaaacggttcaccagaccatccaagacccaggcggcagagccagcacccaaggataccattcacgataatgcgaaaatatgcaaccactttgatctatgccgggcttccaagaatccgatcagagctgctggaggaggaaatactcaagtggtttcaaaataccagagcgcggttagtgtgagcaaccaacctgttcgatcaacagtccccagagccactcatccaaaactggctcccaaggaggtcagggaagcaagggaactcatcttcaaggatcttaaagaggcgcgagctgccaaggaaccaaaggattttaggcatgttaaagagaccaaagaccagcaggatcccaaggaacccaaggagcccaaggtgcccaaggaacccaaggatctgaaggcaagtggagcccgccagaacatcaatcgcaccaagaactacttcgacaagtacctgaagttcgcctttgatctgagcactcccgatggtatccagaaactggaggaccacttttttccgaaccaggaccccactgcccctggcgtctcaaactctaacagggaaaagtaaatattttcggattttccgaatgcaaaaactattgtgatcttgaaggattcatgcccaaatttgaagtacttttattagttaacattaaattgcagcggttgaattatttgaaattcttgtgataaccaaatgatacattgttaaataaataactcggtcgatttctctttatactttaaatttgcatacgaatttttcgatctaaattgacaatgaacatttaatcgtttcatacaaatctggtgcagtgacgtttgtccctcagtttaaattgtttaatataaacaatttatgttttttccctaagggaattcaaacccatgagtgtaatgagcgtttataacacttttgtgagtgcttggctgaaattagaaaaaacgctgcacaaaggaccatttaaatagtgggtaatgttctacagggataaaataaaatttattgtgtggtccaaatgccgcactctctctctctctgtcttttttccctatgcaaatgtattgctctttgttcaacacaaactcacgcacacatccatctgcgcacccacactttcgcacacttaccaacacactcacaacgcccattcagcagagcaacaaaagctgcgcactgggcattgtaaatcataatcaaaacaatagaacaaatgaagctaatgtgccgcatgcaaaacaacaatcggctgaatgagtggcagaaaggacgaacgggtggcgggtggtgggtggtcaggatatgtgatcctggtcgtgacaaaccattaaagctggcgaattaaatttcagaatctcttcattagggggaaagtattcctaattagaagtataacatatttcaactggcttccttcagaattaaaggaatgtaaatatgtcgatttaacacatgaaaaactgaaaaagtgaataccgacaatccgcggtgagtgtattcatagagtattcatctagcaacttctatagctcgcttttccgggcgacaaaaaatggttgtcaatgtc

SEQ ID NO: 38780 - DNA, 702 bp, DROSOPHILA
atggctcacaattcaacactgcagcgcaaaacgaagctaacccgcttggagaatcctttggtggccccaacgtatcaacagcagggaaacggctgtggactggccaaggagaaagttccgaaaatgaatgccaaacggttcaccagaccatccaagacccaggcggcagagccagcacccaaggataccattcacgataatgcgaaaatatgcaaccactttgatctatgccgggcttccaagaatccgatcagagctgctggaggaggaaatactcaagtggtttcaaaataccagagcgcggttagtgtgagcaaccaacctgttcgatcaacagtccccagagccactcatccaaaactggctcccaaggaggtcagggaagcaagggaactcatcttcaaggatcttaaagaggcgcgagctgccaaggaaccaaaggattttaggcatgttaaagagaccaaagaccagcaggatcccaaggaacccaaggagcccaaggtgcccaaggaacccaaggatctgaaggcaagtggagcccgccagaacatcaatcgcaccaagaactacttcgacaagtacctgaagttcgcctttgatctgagcactcccgatggtatccagaaactggaggaccacttttttccgaaccaggaccccactgcccctggcgtctcaaactctaacagggaaaagtaa

SEQ ID NO: 38781 - protein, 233 aa, DROSOPHILA
MAHNSTLQRKTKLTRLENPLVAPTYQQQGNGCGLAKEKVPKMNAKRFTRPSKTQAAEPAPKDTIHDNAKICNHFDLCRASKNPIRAAGGGNTQVVSKYQSAVSVSNQPVRSTVPRATHPKLAPKEVREARELIFKDLKEARAAKEPKDFRHVKETKDQQDPKEPKEPKVPKEPKDLKASGARQNINRTKNYFDKYLKFAFDLSTPDGIQKLEDHFFPNQDPTAPGVSNSNREK

SEQ ID NO: 38782 - DNA, 2267 bp, DROSOPHILA
acggaaaaatggcaggggaaatctaaaaaaaaaaactaaaacaagtaacttttgagccattgttttcttgtaaacggcaaccggaaccaaccggcagctatgctatttgatcccatggaccagttttggccataatccgcgccgcttttgtcggcagctgtttggctcggcttggatgcaagtttaaagctgcaacttttcgccattgcccggtttagatggcactttatattttatcgccaccaactttttcttcgaggttgcggacatttggggcacaaattccgacattctgtaattgtgcgaattatgcgtgtaattggcattacaatttccttcccaaactaaactaatgaagctttgcaagcggggagctttgaaaggccaaaagtttaatagattatagttgttgatgatggcagaagatacttgcaaattgagaacattatataaccgtttgaagtggaattgaaaatacagataattagaaaatatacgtaaagtgcttggagttctatttccgttggaacggcgattgtgaagctatttttcaaatgtaataccacactcttgcgaccaaaaattgctttgtcattaaaagtaaatgtgcaactgttcgccaaaggtccgaaagagtttggtttccgcctggcaatcccctttatttttcttaagtttgtgtgccaactcgttagctttgaggcagttgagaagttcaagttgtgctggctttaataatccgagcatcaacagccggcaaaaactaggggcagaaacaaaacttccagccaagttgcaggacacaggggtggcgttaagaccacaagtaacatttgtaaaatgcacatttaaaactcgcaggcacactcagcatcagcaagccgaaaaaggataataagaaacgcctttcgcctcctggcttgacttcagcaacagcagtggaaacttttcaatttattgttaaactttcgcactgaggcgcacaattataaagtgtcatttagtgccgatggacggggggttggcaggggggtccgggatccaggaccggtactgacagcgaattatgaagagtgttggccgcccaccgaccgctgacacttgtggcaggccacttccggtggcagcgggcagtggcggtgcgaaggacgacaatgtccttgttgtcatcatcatggtcctcatcctcattctcattctcatcctcgtcgtcgtcgtcgtcttcgtcgtcctcgtcatcctcaatgacctcgtcgccgttggacatttttggctgcctccctgctaaacttgccactcaagtgcaagccagtttcatgcggcgcattcaagtgctgttgtcgctccttgttgccggcaaagtgtcacaaacacaaatagagaacgctccgccgcacttgcggctcctccagctcctgatccagctcctggctccccaccggattctcctcgggggaggcagctgcccctgtccctgcctcatccagctgctctgtgatttacagcgtgcgacttttatttgaagtgggacattcattttacgctaaagtgaacctaaatcaacaccattgcagaagcacaagctagcggaattatccaaatattcaactcctggcgatggtcggatttctaattaggattgggcccatttcggaattggtaaaaagaaaaagcattaaataaacattatatattctgatccatgaccccatttttttctgcatatgctattaaagacgtattcagaaatattgaaatacgtatttgtatagaagatggttatgattcaaatgaatatttctttgtcagtcacctgtgagtttaattattcgctaactgtacccccagttttctttcctctacttgagcaatctgactgcattttccaattgctccggaatttggtggccaagtccgggaggcgtcccttgtggtgacgcttgattgaaatgcctggtaggccaggcagcgatcccggccactcccactcgcagcccggagcaactgccaagctgctccgcacttaagttggcttaattagtttttgaaagttatgccaacgccggcgcctgagccgcagccacgcccccttaatgcatttggctttctgctgctgcctttggccgggtcgattgcttggcaaggaggatggaatggcaggggggtcaaacggggcaactccgcattggtgtcttgggctggcaaccacaacagaggcatccggccaagagcgaaggcactccagttccgccaagttacgctttgat

SEQ ID NO: 38783 - DNA, 267 bp, DROSOPHILA
atgtccaacggcgacgaggtcattgaggatgacgaggacgacgaagacgacgacgacgacgaggatgagaatgagaatgaggatgaggaccatgatgatgacaacaaggacattgtcgtccttcgcaccgccactgcccgctgccaccggaagtggcctgccacaagtgtcagcggtcggtgggcggccaacactcttcataattcgctgtcagtaccggtcctggatcccggacccccctgccaaccccccgtccatcggcactaa

SEQ ID NO: 38784 - protein, 88 aa, DROSOPHILA
MSNGDEVIEDDEDDEDDDDDEDENENEDEDHDDDNKDIVVLRTATARCHRKWPATSVSGRWAANTLHNSLSVPVLDPGPPCQPPVHRH

SEQ ID NO: 38785 - DNA, 2519 bp, DROSOPHILA
gcaatagtgcagtgggagatttcattaaatttcattagagaatgtgattagagagacgcacgacgcaaaaggcctagaggcaagtgcagacaggacattcaaagtgcatttaattaagcagcatggtgcagttgcgggagggagggaggtaggtaggtaggtggtgtgctccatcgaggcttctgggggaggacaagaaatgaatcaaaacaattgtaaatactgcaacacaaaagcaattagtgacacacaaagcggaagtgcaaaaagtgaagctgttgaaaataactctgcaaaacacaaagagcggccgaaaaaaggataacaagatggaaggcggcttgtggggggctttggggccaaatggcaactgcaggaggcgccaaaataaacaaagcgcattgctagttaggccagacttgatgaaaggcccgggaaagctcctgccggccgggggaaaatttggcggcggccgaaactggatgcgcaactgaaaagtggccaatgtaaatctaattaaaagcaaaacaaaagccactctcaacatgccactcaaattataatgcatatagcgtgggcctccgcccagttgaaagatagttgagaaaaatggagaatgggaggcgtgcccagagaaatggagaatgggaaagcgccagggtgtgagcgatgtcaagtggaaagtctctcctcttcgttaaccgaaatgagtcgtggttttacttcgactcttagtggaaagtcaatggaaataaaaataacaatcactaacaagtcacttaaacttttttaaaattacgttgtataacatttaatttttaataccctgctttgtttttcctaaaagtgaaaccaatttccatgctcttttttcccaagtacccattttatactagcaccgaaccactgtgcaatctgcagtggtgcactcgcccgccgagttcacacaatgaaccagcgataaatgccaacacggaaatgcatagaatttcacggagtcatgaggggaggttctaatttggtgggactgccaggaggagggagcaggagggagcaggagtgcggcgatagccgaggcctagtgatgtgtccgacgacgacgggacacggggtgtcctcggggtgtcccagaacttggcacatggagccaacgttgtcgcatcgcttgccaaaatccgcattaaatttatgcacttttgttgttacgggcaaacgtagccggaatgtccgtatacggatgcgggctgggcatgcgagcctgggcacggtacgggtgatttccccagttccgcagcaagccggtgccaagatgggaggctttggagcgggagtgggccagatgatgattgcattgacgatgatgctggcagcgccgctggccgctcatccggctcaggtttctggcacggatccggcttttcggtccggatccgcagccaagaagcgaatcggaatcggcggagaaaaacaatcccacactcaagccaaacacatccgccgctgcccattttggctgtgattttgcaattaaatagatttcaacctctccgccttaccactccccaaatggtttccttcctccgccggcgactttcgagttcaatgacaaaacccttggacccatctgcaatgggcgacagacagcaatatttttacgtaaggccgatgtctttcgtttgcagttcatttggctgggtccgtgcagtttgcctttacttcgcaatttatttgtaaataagatactataaatattcatatgtgctcctaatagttttgaactcctttgctttcgggcatttttatacatttatttaccatttaatgcgacttttgagacttggcaaaaggaaaagattgcaaatggtcgccttggtggactcattgatggaaaaaaatatgtacaggtttgcagttgcatttcatttgatttccgacttgaatagcatgtaaaaaaaaaattcttatgccgccacatatctggttcatttcaacatcgaaaaatggctttccaaatgcttcagtcgactttttctgcattttagtcttgggttcgaccatcactaaatattgaattggacccaaagtcaatttaagctgggccaaaacagtaaaacgcagagtcccatgaataaaggggtctatttcaattgcctgtgcgtgccatgattggtttgtttccgatcagcagcaatacaattgacagcgggatgtgctggtaatttaagattcatttggaacgcacaaggcgaaggaaactggaagtctttctcacatccgagatacacttggatttcaaattgaggactgtgagatctaattgtaaagacaaaaaaggcccgtcaaggatcaaagcttaatcgttggaaaattaaaaaaaaataaatatcttcaaactagcctttgaatgcatcccagtgtaagtcagtaacagtacttaatgtatttataccttcatccaattggggtttcaagagcttcaattgtttttgcgagtgtagacgtgtccttttggccccatc

SEQ ID NO: 38786 - DNA, 519 bp, DROSOPHILA
atgaggggaggttctaatttggtgggactgccaggaggagggagcaggagggagcaggagtgcggcgatagccgaggcctagtgatgtgtccgacgacgacgggacacggggtgtcctcggggtgtcccagaacttggcacatggagccaacgttgtcgcatcgcttgccaaaatccgcattaaatttatgcacttttgttgttacgggcaaacgtagccggaatgtccgtatacggatgcgggctgggcatgcgagcctgggcacggtacgggtgatttccccagttccgcagcaagccggtgccaagatgggaggctttggagcgggagtgggccagatgatgattgcattgacgatgatgctggcagcgccgctggccgctcatccggctcaggtttctggcacggatccggcttttcggtccggatccgcagccaagaagcgaatcggaatcggcggagaaaaacaatcccacactcaagccaaacacatccgccgctgcccattttggctgtga

SEQ ID NO: 38787 - protein, 172 aa, DROSOPHILA
MRGGSNLVGLPGGGSRREQECGDSRGLVMCPTTTGHGVSSGCPRTWHMEPTLSHRLPKSALNLCTFVVTGKRSRNVRIRMRAGHASLGTVRVISPVPQQAGAKMGGFGAGVGQMMIALTMMLAAPLAAHPAQVSGTDPAFRSGSAAKKRIGIGGEKQSHTQAKHIRRCPFWL

SEQ ID NO: 38788 - DNA, 2025 bp, DROSOPHILA
tatgcaaaacgcaaatctaatttttcatcgaatgtgtatatgtggcaaatagttcatgcaagaatttccccgtcattttcttcctcgctgatgaagttgttcggaataatgaataatgtgcccgatttctggacaaagtggggtggtaatgctcatatggcgtgctctataccaagccgcaaatccatatggtagcaagtttaagcacccatcccctccaccacctgctttggggttttatacttatttctgtcccaagtagtccttgcattctaattcctgctgtcataggcgagttgaaaactttcatactcattcagtcactgccttccgcatgtaaaacactagttttagctcacacaaaatatcggttataacattttttttggatttcggtaagtgcaaaataagtattctacttttttcgattaagaatattatatttgaaattcaagagtcaggcaagaatgttttttgtaaagcaaaggaccttggcgataggaggaatacgaaattttcgtctggatttgcagaagcgaacgctatgctggtctaaaggacctgacaagacttcggcctcagttctcaacagccatttgcccaagagcaaccaaacagagttaattcccgaggagccacggaagccggagaagctaatgcagaatgtggctccacgtcgcaatgaacaagagcagcgaaggatacgaatagttgaacaccagtcgcatctcaaagagctgctccaccaaagacctgtgaactccgagatggccatacaacgtgtgccttttgtcaaaccgtctgacggttcggaaaatcccatgaaaagacgatatgatagtgccgaatcgctcctcgaacaggtctgtgatcccaaagaattggccaaggaggttattaagttggccaaggaattgcgcatggaacgccagaaaaatgaaattctaatgcaaagtgttttggatctaaaggaatcaaaatttttggagaaacgcaagaaaaatcctaaatgcagttctaaataaaaggaatctcatatctcataattcctctaatccttttatattaaatttaatttgtgcaaacttttgcgtaatccctccctaattttgtaaggaaaatgtagtttaaataaaaacacatttttaaatttgtaagcatataaaaaagcacattactatttttctttgaaagtgcgggtattatctaatggaaaataaatatgataacaagtaaggcattttcaccattctccataaagtccggcttttcccccatgcaatgacgttcggcacacagccgaggaaatggcagagatgtcacttgtctaaaaatagcgctgtgatcgcatataaattataattgaaattatccatacactggttggctgataaaaagcgctgcctcgaatcagaatctgaatccgagatatatatgacaagtggaggagggaagccgaacgaaacgaaacgaaatgaaacgaaaagagacggtgccgttgatgacttgatttcaaatttgaaatgatattttaagaaactaatgcctggtggtgcggggatctggtggcctgtcttatccacccccaaaaccccacatcatcccgccccataccaactgccccactagatctacaccctgcgacacttcgtgggcatgttaaatgtcatttaatagttgacagttgcacttgcttttgctgttgctgttgctgctgcaatgattattgcagtttattttttgtatctagcaaaaatttatgtgtaggtggttttaaatttatgtggtcgtcgttgtcgttgtcgacgccaaaacaagtcgcgaaaaattcttttgaatttggttcgtttttctttaataaaagtaaattttattgcttacactaaaaatgcattgcactgtgtgtgctgtgggctaatgctctcgcagcttcagattcagatgcagaaccgcaaagatacatttaaagatacaaatacgtatgttgatgcagatcatttgcttattgaagacatcctgtgactt

SEQ ID NO: 38789 - DNA, 598 bp, DROSOPHILA
tcggttataacattttttttggatttcgagtcaggcaagaatgttttttgtaaagcaaaggaccttggcgataggaggaatacgaaattttcgtctggatttgcagaagcgaacgctatgctggtctaaaggacctgacaagacttcggcctcagttctcaacagccatttgcccaagagcaaccaaacagagttaattcccgaggagccacggaagccggagaagctaatgcagaatgtggctccacgtcgcaatgaacaagagcagcgaaggatacgaatagttgaacaccagtcgcatctcaaagagctgctccaccaaagacctgtgaactccgagatggccatacaacgtgtgccttttgtcaaaccgtctgacggttcggaaaatcccatgaaaagacgatatgatagtgccgaatcgctcctcgaacaggtctgtgatcccaaagaattggccaaggaggttattaagttggccaaggaattgcgcatggaacgccagaaaaatgaaattctaatgcaaagtgttttggatctaaaggaatcaaaatttttggagaaacgcaagaaaaatcctaaatgcagttctaaataa

SEQ ID NO: 38790 - protein, 185 aa, DROSOPHILA
MFFVKQRTLAIGGIRNFRLDLQKRTLCWSKGPDKTSASVLNSHLPKSNQTELIPEEPRKPEKLMQNVAPRRNEQEQRRIRIVEHQSHLKELLHQRPVNSEMAIQRVPFVKPSDGSENPMKRRYDSAESLLEQVCDPKELAKEVIKLAKELRMERQKNEILMQSVLDLKESKFLEKRKKNPKCSSK

SEQ ID NO: 38791 - DNA, 12775 bp, DROSOPHILA
gtatatgtatatatatatatgtatatatttttatatcgcttgtttttagatcatgtaagtagggtgttttggatcttataagtgtaggaaaaacctttttcttgcggcacaaaaccgaaataaaaaagaatcttaactctggtttgctatttgtacaaacgttgcgtttgctttctacattttttcctttttcttgcgctttttacaattttttttcttattttcttttacttagctactcattcctacttagctcaatttgttggtgttttatgtgtatgttctcttttgatataaaccttgtcactgatacgctggaaaagttcactttgcttgtgtccctcgtgtcgcgagttgaaaaaaaaaacaaataaactagagttttgtatgtattaaaagttaacaacgaattgtgggccctgaataaccagatactttttcattataactctggttacgatttcaactggttgccattaaaagtaatttcgttttgcgattggtctgtaaaatatttgcacaatttaaaattacaagctacaatatgaagaagtcacttaacatctaggagttgtaagaaattgcagctaggatggcctttaaatcatattgtaatagttaatcaagtaataattaaatggccaacatttaattgcggggcacagtaaagtcacagaaaaaaaatcctaaaaacataaggtctaaggtttaaaattaataatcaaaaaaaaatggtagtcaaaaaaaaaacttctataacaaaaacgaaaacacacaagaatttgtaaaaggtagagcaataaaaaaaatctgaagaaactatgaacttgctaagattacaaaatttagtctaaatgctctgtgatttgaacaatttttgctttagaaagagacaacaacagatcgcatgggcgggagggcgtatgggcgggggcgtggttagggtggcgatctttgaacggctgtattacgtccatttgccgccagcctgtcgccatattcaccgcatccaggcggactttcgcttgaacttggtgcgtaatcctcgcaatggtttcaccttatttttattacttgcccccgttgcagcactcaaatgctgtggcaacatgcccgccgccacgcccacaccgccgccaccggacaggcagtgactgttcagcccgcccagatacatactggcattgtgtccagccgtcgaggagtacatgtcctggtgaatctgctgctgctgctgttgagcgagtgccacattggcggcagcactgctcaataaagccatcttgctgccactgccattggtgtagaccgcttggctgctgccaaattgctggtgatgatgttgctgctgctgttgctgttgctgcaactgctgttccctgtgctgctgcaggtgctcctcctccaaactgtgactcgaggctcgcttgtgcggggatccatggctgctgccgctgctgccgttgctgtgataatgtgtggtggccactgagccgcactccacaatcgaggagccggatagcgagagcagggcgtccacgccgtcgcgatgtcgctgccgatcggccatctcctcgggcgtgatgttgtgactattgattgaagggtacaaaaatcatcggttttaaaacaaaaaaacatacacaaaaacctctgcgaaaaactcacttctcctcactgctatcgtaggcagcatccgagctggcgcaattgctatcggatccagctcctccctggttattctgaccctgggccactgcttgcgccacgctggccagagcattgccattggtcagtggcgtggaggagccgctgtccgcattgctgttgccacccgccgagtaggtgtgatcctcgcttggcgagctcgttatcaccgggccactactgtggagagcaaatgtagattagatatctggatcaactaaaaaaaaggtacatgcccgacacttacccattctggaagggctcactatagatctttggtccgtgtttgaggtagagcatcgccgccgccgcatgcacatcatcaatgctgtccgctccgcaatcgcgggccagtcgcgcgaaattgatgccgtcggaagctccatttgcgttggacccaacaccaccgctgccagctccacctgacccattcgcacccatgtaattgtacttgctgccactattattgttattattattgtgataatcgccggacagctcgtcatcgagggcatcttgcagcattggctgcccgaccgtatcttcgcgtatattgcgaaaagctttggacagattggggaataggtagggatcgaaacgggcatgactgccactgccaccaccattgggactatgcggcctggccgcgtttgtggcctgactagcaccattggccagcgccagaccattgcttttggtgggcgtggacagtgccacggctgcggcagccggaactccagcaccaccagccactggctgagccgaagaaacggaaccactgccaccgccatcgaggctatcgtatgcggatccaccactgggactcttaagcgatggactaattttatccaccgccgagttgggaaagaatggcgaacggttcagcgcctggatgagattctggcgctgctgtggctccacacgccacaacgatcccttgcccatgtttggagccttctccaccttgacaaagctcttgttcagcgagagattgtggcgcacgctatttttccagccattgggagccgtcttgaagtacggaaagtgctggacaatccacgcatagatctctttaacgggcagtgccttctcattcgaaccctcaatggccatgaagatcaaggaactgcaattgattgataacatttaaatataacacgattatctcaattttcgtctatgtatatataatcacctaaagctatatggcggcttgttattggtatgcactaacggatcgtatggcacgttattgggatgcttttgcttttgcggcgtattggaaccagctccgctgccattcacattgctgttgccgttaccatagccgttggctccatttttggacactgaatattgcggcgtgcttgtgtgcaagcgtgagctgaccaccagatcgaattccttgagggaatcctcgttatcgtagctggcatagctattaggactccgcaggttggctcctcctcctcctcctcctcctccagatcctcctccccctcctcctcctcctcctagtgatccattgtgcacttgactcgtgggcgtcatatttggcggcggtggcgagacggataactgcagactacgcgcctgcaaagtggttgtggttgtgcccgctgatgtggtgcttgtggcataataagttcccggcaacaaagccgctccgggtggcgtctccggagatgcaacatgcgctggtgtagaactgaaagagaaggcgttagttattggtgtctaaagaatagaatagattctaaataaactcacagcacatgcggcgtgctggccacttgattgacgaagctatagcccggcggcagggtaccggcactgatcaatgtcgttgtggtcaccacagccggcgactcttggccatggagtatggcttgactgttgggtgtactgttgctgctgctgctgctattgctggccgccgatgtggcatagttgaccgcctcgaatacggtgctaaagctactggtcttgggcactgggctattgccaccattcacagccgctgtcgaggaacccgaaccggataccgagcctgtgttggagctgctaatcgaggaattgttcgaggatgctggcgaactgaccaccgttacggttgaggccacatgactgctgtgatccatctggacgtgcatcttttcgcgcagatatttcttgtgcggatggtgggtggtggtgttgctactgctgctgctgctggtggttggcgagctaagtgcctggctggctgccttgtagatggttcctccgccggctggcgaactgccattgctggtaacgtaaatctgttgcggtagctgctgtttggcgggcgataatatgggttggctggcactgctcaccactaccggcatatagccgtgacccaccatggtggttcttgtcggcgttggcaaataggtcgtctgttgttgttgttgttgttgttgttgttgttgttgttgttgttgttgttgttgttgttgttgttgctgctgctgctgctgctgctgctgttgcggcgaattttgttgctgctgattggctttgctggccttgtactccaccacggtggtggtgccactggctcctttgtgcaccgttgtggtgctgtacacagttgatgctgctggtgccgatccacttgctgctcctccggtcgactcctgttcactggtttcactcagattagtgggtagctcttctattaaatcgctgactatacacagattgccattgggagcaccggatcctactgtgcctgctgccccagtcgccgacttgatggccaccgttgcagcacgttttcctgcctgtccggccgttgtggtcacaatgcccttaattaaattggtatcgctgagccaggacagtgaacgcaactcgccatcatcttcagttgttcgcacattgaccaaagcctcgccggaactggcttccagcggtgcggctgccagtagtactatattgccactggttgcacctacagttccggtgctgcccgccgctgttgtggctgcagagccatcgtatgccgtaaaaccaccattgtgattgtgttgcagaaatacatattttgaggcacttgccggcatgttgctattgcttgtggatataactggtggtattacaggtggttgagctgatgctgatgctgatgctgctgttgcagatgttgttgtgctgctgttgttggcgggttgttggggtggtgcaatggtgcggtatccatgggcggcagccactgttgctgctgctgctgccaccacagaagtggtcgtggagggcaccgctactgttccggattgcagatgtccacgcagttggctcaaatcacgggtggtcagcaactgtgtgggattatctgtggacatgctgcaagggaaaatgaaaatgaagatgtttagtccatgtcagaaacctaagaaatattaattactctattaataataataaccatttctttctaaagaaaccatccgcttatgcaatatctaagttcatttgcatgatttatcaaaaccacagttattgttcattacatcatcggccaatgattttagacatgaggcttggtcatttgctctgagtcagagtttgcaattcgccctgtttaactatagcttgaccaatccaaagaccgttgttttaatctgatcttacatcacaaaattatatggcaagagcgttggtatggtataagaatcgattgtgatatattggtatcgtgacccgttggtctggcatcaattacatttaaagactttagaatgcgatcatcgaacattatgtgttgtcataatctcagtagattgcctcatcattaggtatgaaattcctttttggttatccggctatttaaagccaagtttgtatttttagcccaacccgttgatgatctaatgattgtttgatgaaattatcaatttactgcactttgtacggtcatcgaattgacttttcataaagtgcgattatgcttactagacgacgaaaaaccgcatacgtaattatttatcagttcaatttcattgttattgaatgtccttcgccgtttttattgcatactttactgggtattttcccggagcacccgctctataataataataatattgcctttcctaattttacgcaatcgaacaaattttttttgtgtgtttttatacttttttgttgttacttctaatttacgcgtgtttgctttttgtggcatttttatgacgccaacagggttggcacttcacctgctctctttctcaaataatgaacctgtctctctctctctctctctctctctctctctctctctctttctctgttcttgtagccccctctctttctacatgtgtgtggagattatcttatcagtatttctgtatgcgggcgtatattcccttatagttattttcttcaactaaagttccaagtaattcgactttaattcaaagagagtccaaagatcaatgatcgatgagcaatcaaatagaaagtattgaatcttcatttttattatatttccaaagattcgttgtaattgggtgtgcaaacctcaataaagtttaaaggtcaaaagacgttttgaacagttcaaagatctatgatcgatcgctagctaaagtaatcgagtaatgtatacatcatttattcatccatttagtcagttgctcatcacatgctattacatcaaaggcaaataacttaaatattcattttgcccgaggggcaacatatatttgctgtcggccatcgcaaacctaaagagcaaaagagagggcgaatagttggttaaacagaaagtgggggacagcgaacggtaagggggggcagccaacaaagtgtattattatttattgattttcatttggggcaggcacaacaagaataactacggaaactaacgaaaactcgacaatagaaatgtccaagaagcgaatttacttttactagctagtacagagggaccgcgataaaaggaacatataaacatataagagacaaattgtgtattcgacctcttttcaaatcgcgttttaattttgattattaaattttatatcttatttatatcaaaaattctcccttcgaatgcggactgtatttccttttcttcttcttgcgctaacctacctgattattacccattgttttgcatgtgcaaaacgtatggaaaaagaaggggcaaagagacagggcggagaggaaaagagaacaagaagaggcagaaaagtgcgcgccacaacaaaaccgtaaccgtaaatgctaaaaacacaacaaacgccacgagaacgaaacgcacgggcaacaaaaacattaaaaacaaaaacgaaaaaacaaagctccgctgacctccaacgccgacagcgcagtcgacgtcgccgtcattacactgaccgcccaaaatgaaaagtacagcttgaaacgtatttattattatacacggaaaataaaaatgtatggaaatggtgttaaaaaagatacatcatttacaggaaaatttgggaattaatattacgttagtgcatattgttttattgttttaaatcgcttatgaaactgattaaataggagtcagtttataatttcctttcaaatgtcatacattttttactgcgtaaagtctggaattcgtgtattgtagcaaaaacgacgcaattttttgttttctttttttcgaaagtctactcgttgtcttggcaactttttattttgctttttttatatttttgtatttctttttctgagcaacaacaaaataataacaagacgcttacgaatattttattttgcagcgtcgcaagagagcggcaaaaaatagagtgagagcaaaacagcgtgtttgagataagaagaagatgaacggaggaggtggaggtggtgcgttgttgctttgacataattaattagcaaatatggccgtatagcgacaacaacaatgaacaagaacaataagaataagagaagcaacagcaatttttggccaatgcagcactggaaaaactctccatcgcaaaatgccgatacatatgtttactctccctctctttctctctctctgtccggtgaaaggctctcttttccgctgctctcagtttgaatttgtttatctcagctttattgttgtgttcgaaagagaacaaaaaagagagaaagctacgcatttgatttgagccgcagctacggtttgttattacagtggaactttcctaacgcgaaatagctaaatccgtttattttcaattttcgtttgattactttggaattcagaatttaactgaacaaactaaatctactttaaaatcgctaaaaactttgtcttttaattttttagagcgtgcactgtaaacgttgagagattagtattgtgttctagaaacgtcaacgtcacagtcaacaaaatgcctctctcgttggctttttagcttttgggctgtgacctgaagacctttctccagcacggagccgttttaaatgtcatctggaaaccccccaaaaccatccacccacaaaaaaaaaaggaaacgggcagaaagagaacaggagagagtgcaagtcttgcattttgggtcttttcttctgcgagccaattaacagcaaaaaccaaaaacaaaaaaccagtggtaactgtacctgagcaaactgcttgctaaaaaacaaaagccaaaataataaaaaaaaaaatgaatagaaaatagtatagaagcagccaagctaatgaaacgacatgaaactactgaggagaacatgatgatgatgatggagaatgaatcatccagatacatgatatatatatgtatatgtatgtagcaaagtgtgcacaaatgcggcacacggatgcttatgagcgtgtcaaaaaaaataatcgtaagggagccacttagcagcaaataaaaccaccgactagcaagtggagttaagtcacgacgatagcgagtcaccgcccgttgataccctgcaaattatgcaattattaataagtcactgacactgccagaaatactaaccaaataggaagaaaggggctttgaatatacatttatttacgaattcttaatgcatattttagtgcaactgtttaatttcattagttgatatccaagtaatcatgtgttaatagtagcgctattcctcgtaatttttctgacccaattttgttgggtgtttacataaaactattgatacccagcttacggtagaaaaatggttaagccttgtaaggtaatcagcgtgcgactggttcaataatacaaacaaacaaataattgacagccagcatgtttcgtttttcttgctgttgttgggaaaattgtcgcccaattgaaatggcagtggggaaaatgggaaaaaatctatggaaaaaatgttaaatgagttgtttcctcttttaataaaagtaatacgaaaaaagaagagcgtgagataacaaaaaataatggtatattaaaatgcaaatacgtttgtcagatgccaaaaagagaatgagtagccggcatttttgacttaacttccatttacaattatcgtagaaaaaagtgtaatggcaattgccttgatttacaatgctttgtttgcggtttatgtgtatttaattattttgatttgtgttaaataaaatatacaataaacaataggcgaaattattgcaacagctttcaaaacattcaacgtaacaaagagcgagaaagagaaaaagctttgcatacttccggccatcaacaagatagcatagaaggcaaaaagctaaatgaccacaacaacaacaacagaaggtgtaataaaatcgagaaacagcgaaaaaagaaaagcagcagcagcattttttgagagaacttttttctttctttctttgtgttattcgccctgcttctctctcgctatctctcatttgatggaatataaacaaaaacttctgaaattcatttaaataacagagaacaaaggtgaattaaaaatgatttttaaacaattacgaaggggaaaatatttataatacatgtttgcgattcagatttattcggattttaggtgtccaaacagcgataagaaaaatgcttagcattaataacttcagtattcaagaaattgtataacttgtttgttagttattcgtatgatacacagagtttaatgatgcatgtgctttaagcattatgggcacttacattatatttttgttaaacggcttaaaatgaatatgttgtatttccccaccaattttcaggtcgacactttgttaatgtttcttaaaaacaagacggtttacttttatcgtcaatatcgtaaaatttttcaaaattttcccgatagccaatgccaataacaaaagaagaaaaattatcagaataaataaaatggaaagaaaataagaaatgcgatggcgacaaccacgcggcgtatacgtaatgcctgacgttgtggccgccatgtctgtgattctgccctggtgtcggtgagtgtgcgcatttgtgtctgtgtgtgtgtgtgactgctctcacgcgctctctctcacgctctcttacgctttgccttgcacattacgtatacgcctgggtcaaatcatcgaaaagaacaatcaaacaccgacaacagggcgtataagttatgaaaaaatatgaaatcgaaaaggaaactcattgaaaacccaataagaagggtgaatgaaaagtaagtttggaactctgcgcaagtatgtcgatttgtattatattttatgcaaatccagcttattctataaatatccacaaagaattaaacatgtatatttggcataaactatttaccaaaatcgaggcaaacaaaaatttgttaaaaaaaaaaatgagtggaaacgatattgtggagtgcttggaataaatataaataaaaacgcaacaaatctgtacaaatttggctaagtttttctatatatgtacacgcctgagttgaatttgtttttggtttttgtatacactgaaaaacgcaacaaggccgctagaaaagcgcttttggcgtttataattgctgttgatcgcttttgttgttgtctatttattgttagcttattcgcgtcgttttcataaaataaaaaaaaaaatgtcattgcacgtgtgtgtgcgagaaagcgttaaagagaaaaatagtgtggacgataagagaacacatttttttagtgtgtcagctagtctgcactgcactctttacaaaatatctagctccaaaacgaattactcatgagttttaatttcattatcaatcttggggaagaagttcagttgtatttagttaggggtaatacaatttctatactttggaaatagcgattttggttcattaatggagcttttactgtgaaatagcagtttaaactgctttaaagacagaagagaaccaaacgacagtgtcaaagagaaaggacagccggagaaagagagggatataaacgaaatttcaacgtggttttcgtttcttaggcattttttttagttgttgttatttttatacatttagtggctaagtttaaggcatgattatgaaatcggagaatgtatagaaaatcgggcattacgcaaaataaatgaaatagctcgaatgggaaatcgattacaaaatgccaagttgtacatttgattggaaaaaaaccaatttaaaattcaaattacaatctgcgatccttcgtctctcttccactcgctctttccctctctctttgtttgccattcgtatttcttattattatttaagttttactcacacacaaacacaaaccaacaacacacacacttttgttatttttattttatttttatggcccgctttaaaatattttgttttcttctatttcgtatttatattgtgtggattcagtatcacatacctccatacaaggcgttcttgcagtttcgttgtcgttttattggcacgcaaaaaaaatgtcttaaatgtttaggaaattgttgaagacttctccatttactgtggctagatattttgttcgccaaatttgtttaagataccatggagtattttttttttttgttaaaaggtttttacaagattttctcgttaatctcgaaccgtaaagcacgcgagcaggcaaacgaatgaagcgaagcggcggcaacagcaattgaaaaaccgacccccaccagccccactcaacagcacacacacaccgcaacacccacacgacacaaacacactctctctcccgctctatctctctctctctctctctggcaaaaatcacacaaagctttcattgtgtacgagagcggagaaacgagagacagagagagccggcaaagcgacaaataaataaaaataaataaaagccaaagcaaagtcaaagcgtcgtaaacaagctagtgagtaggtacagtaaaatataatttaaaagtagttaaagaaacgtttgtaatcacttaattgttaagcagttgtagctttcaatttatatctgggcattttaatgtcgctgtaagccaaattagttcaaattaaaccaaacagtctgtctatttacttaaaataacatatcgatttctattgccgatttccgagtgcctactgtacacctctcaatatatttgtatgtgtgttgtgcgttcgcgcatgacattgccatttattgaagtgagcagaaacaaatacaaacgcgacaaaaaatgcgaaataaatttatactttgacaacaaaaacaaatactcaaattcgaggctcgtggaggccagctgactgcccgtctctttctgtctgcagcccttgtagctttctccttctcccccttcttttctgctccttaacataaacaacttttggcaaggatctcgtggcaacaacaaaagccaaaggcaaaaacaaaaataaggcacaacaaacagctgtttgggctaggcttaaattacaactctttatagctcttacttcaattggctctcttccaaacttctctttgctgcgctcttgcgtgagcaaaagtgactcagaagtctgtattttattacaattctctaaatatttataaataaacaaaatggcaacagcaatgtgcgctcaacaaaatacgtcattatttctgactaaaaaactaaat

SEQ ID NO: 38792 - DNA, 3984 bp, DROSOPHILA
ctgctcgcgtgctttacggttcgagattaacgagaaaatcttgtaaaaaccttttaacaaaaaaaaaaaatactccatggtatcttaaacaaatttggcgaacaaaatatctagccacagtaaatggagaagtcttcaacaatttcctaaacatttaagacattttttttgcgtgccaataaaacgacaacgaaactgcaagaacgccttgtatggagcatgtccacagataatcccacacagttgctgaccacccgtgatttgagccaactgcgtggacatctgcaatccggaacagtagcggtgccctccacgaccacttctgtggtggcagcagcagcagcaacagtggctgccgcccatggataccgcaccattgcaccaccccaacaacccgccaacaacagcagcacaacaacatctgcaacagcagcatcagcatcagcatcagctcaaccacctgtaataccaccagttatatccacaagcaatagcaacatgccggcaagtgcctcaaaatatgtatttctgcaacacaatcacaatggtggttttacggcatacgatggctctgcagccacaacagcggcgggcagcaccggaactgtaggtgcaaccagtggcaatatagtactactggcagccgcaccgctggaagccagttccggcgaggctttggtcaatgtgcgaacaactgaagatgatggcgagttgcgttcactgtcctggctcagcgataccaatttaattaagggcattgtgaccacaacggccggacaggcaggaaaacgtgctgcaacggtggccatcaagtcggcgactggggcagcaggcacagtaggatccggtgctcccaatggcaatctgtgtatagtcagcgatttaatagaagagctacccactaatctgagtgaaaccagtgaacaggagtcgaccggaggagcagcaagtggatcggcaccagcagcatcaactgtgtacagcaccacaacggtgcacaaaggagccagtggcaccaccaccgtggtggagtacaaggccagcaaagccaatcagcagcaacaaaattcgccgcaacagcagcagcagcagcagcagcagcaacaacaacaacaacaacaacaacaacaacaacaacaacaacaacaacaacaacaacaacaacagacgacctatttgccaacgccgacaagaaccaccatggtgggtcacggctatatgccggtagtggtgagcagtgccagccaacccatattatcgcccgccaaacagcagctaccgcaacagatttacgttaccagcaatggcagttcgccagccggcggaggaaccatctacaaggcagccagccaggcacttagctcgccaaccaccagcagcagcagcagtagcaacaccaccacccaccatccgcacaagaaatatctgcgcgaaaagatgcacgtccagatggatcacagcagtcatgtggcctcaaccgtaacggtggtcagttcgccagcatcctcgaacaattcctcgattagcagctccaacacaggctcggtatccggttcgggttcctcgacagcggctgtgaatggtggcaatagcccagtgcccaagaccagtagctttagcaccgtattcgaggcggtcaactatgccacatcggcggccagcaatagcagcagcagcagcaacagtacacccaacagtcaagccatactccatggccaagagtcgccggctgtggtgaccacaacgacattgatcagtgccggtaccctgccgccgggctatagcttcgtcaatcaagtggccagcacgccgcatgtgctttctacaccagcgcatgttgcatctccggagacgccacccggagcggctttgttgccgggaacttattatgccacaagcaccacatcagcgggcacaaccacaaccactttgcaggcgcgtagtctgcagttatccgtctcgccaccgccgccaaatatgacgcccacgagtcaagtgcacaatggatcactaggaggaggaggaggagggggaggaggatctggaggaggaggaggaggaggaggagccaacctgcggagtcctaatagctatgccagctacgataacgaggattccctcaaggaattcgatctggtggtcagctcacgcttgcacacaagcacgccgcaatattcagtgtccaaaaatggagccaacggctatggtaacggcaacagcaatgtgaatggcagcggagctggttccaatacgccgcaaaagcaaaagcatcccaataacgtgccatacgatccttccttgatcttcatggccattgagggttcgaatgagaaggcactgcccgttaaagagatctatgcgtggattgtccagcactttccgtacttcaagacggctcccaatggctggaaaaatagcgtgcgccacaatctctcgctgaacaagagctttgtcaaggtggagaaggctccaaacatgggcaagggatcgttgtggcgtgtggagccacagcagcgccagaatctcatccaggcgctgaaccgttcgccattctttcccaactcggcggtggataaaattagtccatcgcttaagagtcccagtggtggatccgcatacgatagcctcgatggcggtggcagtggttccgtttcttcggctcagccagtggctggtggtgctggagttccggctgccgcagccgtggcactgtccacgcccaccaaaagcaatggtctggcgctggccaatggtgctagtcaggccacaaacgcggccaggccgcatagtcccaatggtggtggcagtggcagtcatgcccgtttcgatccctacctattccccaatctgtccaaagcttttcgcaatatacgcgaagatacggtcgggcagccaatgctgcaagatgccctcgatgacgagctgtccggcgattatcacaataataataacaataatagtggcagcaagtacaattacatgggtgcgaatgggtcaggtggagctggcagcggtggtgttgggtccaacgcaaatggagcttccgacggcatcaatttcgcgcgactggcccgcgattgcggagcggacagcattgatgatgtgcatgcggcggcggcgatgctctacctcaaacacggaccaaagatctatagtgagcccttccagaatggtagtggcccggtgataacgagctcgccaagcgaggatcacacctactcggcgggtggcaacagcaatgcggacagcggctcctccacgccactgaccaatggcaatgctctggccagcgtggcgcaagcagtggcccagggtcagaataaccagggaggagctggatccgatagcaattgcgccagctcggatgctgcctacgatagcagtgaggagaatcacaacatcacgcccgaggagatggccgatcggcagcgacatcgcgacggcgtggacgccctgctctcgctatccggctcctcgattgtggagtgcggctcagtggccaccacacattatcacagcaacggcagcagcggcagcagccatggatccccgcacaagcgagcctcgagtcacagtttggaggaggagcacctgcagcagcacagggaacagcagttgcagcaacagcaacagcagcagcaacatcatcaccagcaatttggcagcagccaagcggtctacaccaatggcagtggcagcaagatggctttattgagcagtgctgccgccaatgtggcactcgctcaacagcagcagcagcagattcaccaggacatgtactcctcgacggctggacacaatgccagtatgtatctgggcgggctgaacagtcactgcctgtccggtggcggcggtgtgggcgtggcggcgggcatgttgccacagcatttgagtgctgcaacgggggcaagtaataaaaataaggtgaaaccattgcgaggattacgcaccaagttcaagcgaaagtccgcctggatgcggtga

SEQ ID NO: 38793 - protein, 1161 aa, DROSOPHILA
MPASASKYVFLQHNHNGGFTAYDGSAATTAAGSTGTVGATSGNIVLLAAAPLEASSGEALVNVRTTEDDGELRSLSWLSDTNLIKGIVTTTAGQAGKRAATVAIKSATGAAGTVGSGAPNGNLCIVSDLIEELPTNLSETSEQESTGGAASGSAPAASTVYSTTTVHKGASGTTTVVEYKASKANQQQQNSPQQQQQQQQQQQQQQQQQQQQQQQQQQQQQQQTTYLPTPTRTTMVGHGYMPVVVSSASQPILSPAKQQLPQQIYVTSNGSSPAGGGTIYKAASQALSSPTTSSSSSSNTTTHHPHKKYLREKMHVQMDHSSHVASTVTVVSSPASSNNSSISSSNTGSVSGSGSSTAAVNGGNSPVPKTSSFSTVFEAVNYATSAASNSSSSSNSTPNSQAILHGQESPAVVTTTTLISAGTLPPGYSFVNQVASTPHVLSTPAHVASPETPPGAALLPGTYYATSTTSAGTTTTTLQARSLQLSVSPPPPNMTPTSQVHNGSLGGGGGGGGGSGGGGGGGGANLRSPNSYASYDNEDSLKEFDLVVSSRLHTSTPQYSVSKNGANGYGNGNSNVNGSGAGSNTPQKQKHPNNVPYDPSLIFMAIEGSNEKALPVKEIYAWIVQHFPYFKTAPNGWKNSVRHNLSLNKSFVKVEKAPNMGKGSLWRVEPQQRQNLIQALNRSPFFPNSAVDKISPSLKSPSGGSAYDSLDGGGSGSVSSAQPVAGGAGVPAAAAVALSTPTKSNGLALANGASQATNAARPHSPNGGGSGSHARFDPYLFPNLSKAFRNIREDTVGQPMLQDALDDELSGDYHNNNNNNSGSKYNYMGANGSGGAGSGGVGSNANGASDGINFARLARDCGADSIDDVHAAAAMLYLKHGPKIYSEPFQNGSGPVITSSPSEDHTYSAGGNSNADSGSSTPLTNGNALASVAQAVAQGQNNQGGAGSDSNCASSDAAYDSSEENHNITPEEMADRQRHRDGVDALLSLSGSSIVECGSVATTHYHSNGSSGSSHGSPHKRASSHSLEEEHLQQHREQQLQQQQQQQQHHHQQFGSSQAVYTNGSGSKMALLSSAAANVALAQQQQQQIHQDMYSSTAGHNASMYLGGLNSHCLSGGGGVGVAAGMLPQHLSAATGASNKNKVKPLRGLRTKFKRKSAWMR

SEQ ID NO: 38794 - DNA, 2756 bp, DROSOPHILA
tgaatttcaatttcgctgctatctcttcttgctacttactttgattacacaatcatgatgatgatgatgatgagacccccactttgcttcttctttttttggccccgcctctcttagcgatgttcatgcaaatttttatcgacacttttgattcagactgtactcgtgttggttttttattcacttttttgttttgttactgctgctttgattggctttcagtgcactttttctgcctcaatgtgcagaaatttgcaaactcatgaaaatccatacgtttgataacaatgttaaagggggggggggggaaaacaagaagcaacataaataaaaacggaaacggaaacgagcctggtgaacgcacaagtcgccacgcccccaccgttttgcattgcaatgtgttcattaagcaaccgggtagcaaacaaaatcaatgaatggtgtaaaaattaatatcctgtggggctcaaatgaaaaaagaataaaaaaaaaaaaaaaacgaggaatgcaagagaactgtggcgggaattgggtggcattgtcatcgtcagcagcagcagccggcagcagttttaatttacacaaagcgtagtcaggcgtgtaatgctcggtggcggtatgatgaaggctccttttttatgtggcgcccaacgttggtgggcctgaagctcgacaattcgtgcaacgacatttaaaaaatgccttaaggcagcaaatacgtggaagatgaaccaacaggcgacgacgacggcgtgaaatgatttatgaaattacttttaccgttgcatatttctaggggcagggaaacttcaacttgggccacagtttcagttacaagctgtcatgtttatttgcaaagaaacgttgatttgatagatctctatcattttgttgtataagcatttattgagcgcgtaactgtttcttcttattcttcaagttacttaccttctcaaaaccaccaatttctgtagaaaatgaaataaacaatgatcatattatggacacattaactttattcgtattatttaaataagtagcctcaatcgatttgcgtgatggaagcctcgtcattgctggaacatcgactgctctcgccatccgtgcgatacttgatggagtcaatgatctccacatcgatgtcacaattgccctgattgccgctcgttccctccaaaccggcacccgtatcactggaatttcgttccagtgaatcttcatcgcaaagatcgggtgccgaaagtgaggcactaaccgatgccgattccgacttggcatcgatatcctgactctgcacctgcgcctgatgggcggcaaactgactgtaaaggcgtggcagatgttgcaacatatagctggcgcccgatttcgataagtttgcagctgcagcagcggcagcagcggctgccgaaagattagcagccgtactggacggttgattttccttagtctcgcccagatcatagtatttggcatagtgctcgaatttgttgcccaatgtgctggtggtcactgcaccaccaccgccggcgtttgatcctgccgcattggcgcacagattgatggcatcgttttgggccgccttgggtatgggtacagtgaaggcggagccatgacgctgtttgctcagcaaattactggccaaaccggaagcggaagtggcgcccgagctggaacacgagccgggtgaaccttcttcggcaagtgcattattgctactcgaaagcggtgagacattctccttctttctatcgtatatatgtccggaaacgcgaagatcgatgaagaagtgcaacggatcgatgccgtagggtgcataaagtggtggataccaaaccggtggtggtggcggcaggaccaaatcctgtggtggcaacgatgccgccggcggtgtattgtcctgcaggttagtgtcgacggcaccacccagaccaccagtcttattgccagccgttggtggtgccgtcgttggcgttggcggtgttatacccatagcacctggtttggtttccattttggcatagccatagggtgtcattgccttattggtcagctctagaggtttctccggcaccagttgctgctgaagttgctgatgttgctgctgctgatgctgttgatgttgctgctgctgctgctgctgctgctggtgttgctgctgcttctcctctgcatcgcgtcgctcccgcaattgctcgtagtatggacgatgcgaccaggagcgttttcttggccgcctcaccaaggcggcctgatgttgctgctgctgttgttgctgtgcctgctgctgctgctgctgctgttgctgctgcagctgcaagacacgcgccgtctcattatttcgcgcttgcaccaaggaacgcagcatatcgctgaaaaagaaattatttggtcccacgggtgcggaatacaaatacggtggtgtggctgccattaaacgactgacgtagtcctgatttcttagctcatggatgttgctcttgctgcgttgctgcggattttgcggattcgttgcggttggatctgcagcagatgctgctgccgccgctgctgctgctgctgctgctgctgttgtgggcgtactaggcgcactgggcgtggcattgctggtggttacccctgctgacgctactgctcctcccgttgagcatggcatccctgctgtgttgctcgacgagatgctgttactgctgtccctcattgctgctgctgttggagaaaaaaagttaagaacacacaaaagacgttggctcagt

SEQ ID NO: 38795 - DNA, 1715 bp, DROSOPHILA
caacagcagcagcaatgagggacagcagtaacagcatctcgtcgagcaacacagcagggatgccatgctcaacgggaggagcagtagcgtcagcaggggtaaccaccagcaatgccacgcccagtgcgcctagtacgcccacaacagcagcagcagcagcagcagcagcggcggcagcagcatctgctgcagatccaaccgcaacgaatccgcaaaatccgcagcaacgcagcaagagcaacatccatgagctaagaaatcaggactacgtcagtcgtttaatggcagccacaccaccgtatttgtattccgcacccgtgggaccaaataatttctttttcagcgatatgctgcgttccttggtgcaagcgcgaaataatgagacggcgcgtgtcttgcagctgcagcagcaacagcagcagcagcagcagcaggcacagcaacaacagcagcagcaacatcaggccgccttggtgaggcggccaagaaaacgctcctggtcgcatcgtccatactacgagcaattgcgggagcgacgcgatgcagaggagaagcagcagcaacaccagcagcagcagcagcagcagcagcaacatcaacagcatcagcagcagcaacatcagcaacttcagcagcaactggtgccggagaaacctctagagctgaccaataaggcaatgacaccctatggctatgccaaaatggaaaccaaaccaggtgctatgggtataacaccgccaacgccaacgacggcaccaccaacggctggcaataagactggtggtctgggtggtgccgtcgacactaacctgcaggacaatacaccgccggcggcatcgttgccaccacaggatttggtcctgccgccaccaccaccggtttggtatccaccactttatgcaccctacggcatcgatccgttgcacttcttcatcgatcttcgcgtttccggacatatatacgatagaaagaaggagaatgtctcaccgctttcgagtagcaataatgcacttgccgaagaaggttcacccggctcgtgttccagctcgggcgccacttccgcttccggtttggccagtaatttgctgagcaaacagcgtcatggctccgccttcactgtacccatacccaaggcggcccaaaacgatgccatcaatctgtgcgccaatgcggcaggatcaaacgccggcggtggtggtgcagtgaccaccagcacattgggcaacaaattcgagcactatgccaaatactatgatctgggcgagactaaggaaaatcaaccgtccagtacggctgctaatctttcggcagccgctgctgccgctgctgcagctgcaaacttatcgaaatcgggcgccagctatatgttgcaacatctgccacgcctttacagtcagtttgccgcccatcaggcgcaggtgcagagtcaggatatcgatgccaagtcggaatcggcatcggttagtgcctcactttcggcacccgatctttgcgatgaagattcactggaacgaaattccagtgatacgggtgccggtttggagggaacgagcggcaatcagggcaattgtgacatcgatgtggagatcattgactccatcaagtatcgcacggatggcgagagcagtcgatgttccagcaatgacgaggcttccatcacgcaaatcgattgaggctacttatttaaataatacgaataaagttaatgtgtccat

SEQ ID NO: 38796 - protein, 463 aa, DROSOPHILA
MAATPPYLYSAPVGPNNFFFSDMLRSLVQARNNETARVLQLQQQQQQQQQQAQQQQQQQHQAALVRRPRKRSWSHRPYYEQLRERRDAEEKQQQHQQQQQQQQQHQQHQQQQHQQLQQQLVPEKPLELTNKAMTPYGYAKMETKPGAMGITPPTPTTAPPTAGNKTGGLGGAVDTNLQDNTPPAASLPPQDLVLPPPPPVWYPPLYAPYGIDPLHFFIDLRVSGHIYDRKKENVSPLSSSNNALAEEGSPGSCSSSGATSASGLASNLLSKQRHGSAFTVPIPKAAQNDAINLCANAAGSNAGGGGAVTTSTLGNKFEHYAKYYDLGETKENQPSSTAANLSAAAAAAAAAANLSKSGASYMLQHLPRLYSQFAAHQAQVQSQDIDAKSESASVSASLSAPDLCDEDSLERNSSDTGAGLEGTSGNQGNCDIDVEIIDSIKYRTDGESSRCSSNDEASITQID

SEQ ID NO: 38797 - DNA, 5541 bp, DROSOPHILA
gtgtttttctttttcaagccaggaaatggacccgaactagctaggaaactagctaaatcattggcagtgtggagcgaaagcgaccttgtgcacagcgtggatgctggatgcatccttttagatagcgttctaagttttatctgattttatgcagtgtttccactgtttgtggataacctaaatttcagctgaattcgccatagctcgacaatcttgcaactgggaatcagtagaagctaaagtacatttcgctgtactatagaagtttattcttcatttcgctgtactatagaagtttattcttcattgcatacaacattataagagatgtagaagcactagagatttctgcaatgggatgcgattgatatgaaactttgtattccgaataccaccgaactgtaagtcctcagatcgaaaataaatcccataaattccgtctgttataggctctcaagttgggaagatgtggcgagaaaatggattcgagcgatataacatttggtatatggtttggtatcaaacatatattcccaaattgcggctgttatgtgcaattaagagcgtaagatgtggctggaatctggatggattggcagcactggcaatcccaaatcccgttttgcattaaacaccagccagcaacaatgcaacaatgcaacaatgcaacaacaatgccagctgtgacaacacacagcaccacccaccgcccacctttgccgcccccaaaaaaaaaatcaaaggcaaagcggtatcgaaaaaaaaaacgaaaaaagcgaagttttgcaaaactgtggtgtcgtttgtgtggttttttgtttttgattcggtttggtttcagttatgttcggtttttcgaccacgtttctactgtattttgccttttttttgtttttttgttttttttttggctctttggctttgctggcgagtcaacgctgcgcagtcgcagctcggccgcttcttcttcttcttcttggagcgcggtacaaatcttttcagttgagtttggaacgcgtaaccgttaaaacgtacaatcttggagcggaagtttcaagtttctccattccactttttgcgcgcatttgaatatatatatattttttttacggtgcgtgtgtgtgccttgcttgtgctttttcactacttaataccacccatgcatttccgcctaattcataaataatttgtttatatcgcatatgtgtttttatatgtcaggcaccaaacatgcagcgattccaagtgtgcagcgtcctgatcctggcctggattgcctgtggtaagtgtgcaacaactatggctgctattgcaagtattaccagtaccaaaacataatgctctagagggccttgggatagcgattcgatgaaacgattgccactcccgctcgcaattagcacaacctttcaattactcgcgtgtttgcgcctcgaaaacggagcttttactttcaaaaattccactgcaatcgcgtggagtgtccaaatgcgatatatgtatataatttatgtacgaacgtctatatatcgcagtgccccttcgaatctaacggtctgctcttttgttctcgcctctagaatcaaaacgaatcgaatcgaatcgaatcgagctccagtctaaatgtattttaattactggtttctcgagccgaaggctgctgctccacttaatcgtagagcccgccgatctatagccacatctatactgctccgtaccctatagccatataaccatggctgatttggcatgcagatcatgcggccgatcacttttgcttttgtttccaccactgactcactgcagcgatcttggtactgggcatgcatatgtacatatgtatgtacacatgtatcatatcatataatagcatatagacatcagacgtaagacatcttaaatcggccagtcgatccggcaagctaatgaactaaataaaacaaatgccaaaccctgacaaaagtagaacttgggcccgtcaaaccagttgacaattaggtacgatatcgttcgcattatacgatctagttctgggttaaccaaggcaaccagtttccaaccggcccataagaaaggtagttgcatagatcacatcggatcgcatcggattatcgccatagatatatctaattaatcgccacccgtttttcgaaaagccatcaatgtcgtttgtgtcacaagaggactgtttcccaactaccaacaacttcaacacttcattcaccaccatgatccttaagcagtaccatcaatgctcctataaatctctattagttgaacatgaacatggtggtcattgtggtcaatggagtacttaaagtttccaaagatttctataagatagcaagctgaaatcatagagcaatatgatcggagcaagttgaacctctgagataaggaacaaaagaatcaggcagcgatgacatttaatccataacttattgacttaaataccggaaatcttcacagatttcaatttagctgcgtgtttgcctttggttttcggttggcgacttcgagaaaattgtgcgcagacaggcaggcagacagcagttagttcgctagtcagccactagtcactagccattagccattaaccattacccattaaccaacgacagcagtcaacagtcaaccatcaacctgttgcccgatctcgatggcatcggcgtttcgggcttacatcacaccagctccaaagctccatcgccacatctccatttccatttccatttccaaagcgattcgaatcgctgctagacgcggtgcgaagatgcgcgaaagtgtcgtggtcgcgattgtggcgtcacttgcacttgcatcaaaaccagttgggcaggtgaaaaggcggaggcggaggcggtggaggaggaggagggggaggccgattggcggacaggaaggaagtggacgccactgtggttcgggtttgacaatggtgggaacagtggtcaacagtgattcaaacaatcatcggttcaatcgctacgtttgcaagtgcctatagcacttctacactgaaaaaaaaaacaagcgaatgtaatggtctagctcttgtaagtgcagcgcaaataagtacaattttttgatgaattcaaggatagggaaataggtgatgcatttagtgagtttgttgtattgtacgtattaccttccttgtacggctgatatatgtacaatatatagattacaaacataaaaaaatagttctactatcacaactatcacaattgccatctgtccgatttacaggacatgccctggccgtgggatccccggagtgccccgagaagtacggcgtgcaggcgtacgcccacacggagaactgcgaccagttcttcctctgcaccaacggcaccctgaccctggagacctgcgagaacggactgctcttcgatggcaagggcgcggtgcacaaccactgcaactacaactgggcggtggactgcaagggccgccagtgggatcgtgagtagcagctggtcggtccatcgtgctggattccctaactaaagcggttattctttctcgcccgctagccactcccatttccacgccggcctgcgagtaccagttcggtctgtacgctgtctccaaggactgctccaccacctacatcaagtgcgcccacggtgagccgcacgagcaggactgcgacgccgggttggcctacgacgaaaggatccatggctgcaactggccggatcagctgctggagcactgcaatcccgagggtgagatctaaagcaaaagctgactactggacacttatggacacatcaagttagacttgcaagcgatttccattcggtgctccattccattccccttttcgttcctaacagttgcacagtgtgtattcacgtacaaatttgtaataactcgaactattccagcggtcgttggcttcaagtgccccaccaaggtggaccccaactcggtggccgctcgcttctggcccttcccccggttccccgtcgccggcgactgccaccgcctgatcacttgcgtggagggccatccgcgcctgatcagctgcggcgaggacaaggtcttcgacgagcacacgctgacctgcgaggacccggagtacgccagcggcagctgtgccaactacggcaagtagggatcgccgagcgatctgtacatgcacacgaacaaacaaactgcaacagtgcaatctcgataatgtgaacgttcaaattaaaggagatacatatgtacatatgtatgtacttgctggctgcaaatttggagttatgttgttttgcagacaacccccccctcctaggtttacactggttcgctgcttcgagtgcgcactgtaggctccgactaaccaactactttcgtcccttcatctccgcaccttcgctgcactgtaaaaaatgtcctagcccagttagcttgttaacctttttgctttctaaccaaccaaccgtctgtatcttgctcttctttctgtattattaacttgttttgttgtttggtctcttttgtatatgaatcgcaataaagttaattttatttattgtacattacatcaaggcgaaaaagtagccattcttggtgggagtttggtttggaaggttcttaaacgacgtacccatcatagcccagagctttacaattaggattgagacacgcgacggcattaggaaatatattaaatatgttttattaaattgaaatataccaatttagtcttgtgtaaatcttaaaatatttgcttgttgctctacaaaacctaagctcaaaaatattacttttggaagaaaaacatttaagtggtgttcgttgagagggacgtttggataatcattatcattaggcagctaaaatcaagcatgcaaaaaaaaagaaatgcataattggctacagcgtttcagaacaaattgaacttggcaataaacctgtacaaacataatgcaacaattgcagttgcattagccattgctgaccagaaatgcgatgttcatttctagtcatttgcttggcgatccaaaacagataaggaacacaaacaatccatacacacacacatggtaagtgatgtaaaaactatgcacaattagttcccattttggaactaggagaaggggaaatataatcgtacagatcaaataatttccatggccaatgacgccaaccaaagactatcacatcggaaatacaaggaaggagacctaaactaacgaactcatattgctccgcattcagtcgaccaggtgacggccatggtcctgcggtgtggagaagataattgcgtagataaggccgtcgcgaaccgattcggtggggttgcccacgttgaacatgaacttcacgcgattgcagttggcatcgggcacacaggagtacatgggataccagccggtcttgttgaacaccacgtagatcttgtagatctggtttcggtatatgtacaccggtcgatcgaacgtgatgtccagcagcgaatcgtaacgcacgcgtgccgtgcagtgcgtgtatgtgatgcgtgagccgtgcatgtcctggatgtgggcgtacagcacctcg

SEQ ID NO: 38798 - DNA, 1228 bp, DROSOPHILA
agttgagtttggaacgcgtaaccgttaaaacgtacaatcttggagcggaagtttcaagtttctccattccactttttgcgcgcatttgaatatatatatattttttttacggcaccaaacatgcagcgattccaagtgtgcagcgtcctgatcctggcctggattgcctgtggacatgccctggccgtgggatccccggagtgccccgagaagtacggcgtgcaggcgtacgcccacacggagaactgcgaccagttcttcctctgcaccaacggcaccctgaccctggagacctgcgagaacggactgctcttcgatggcaagggcgcggtgcacaaccactgcaactacaactgggcggtggactgcaagggccgccagtgggatcccactcccatttccacgccggcctgcgagtaccagttcggtctgtacgctgtctccaaggactgctccaccacctacatcaagtgcgcccacggtgagccgcacgagcaggactgcgacgccgggttggcctacgacgaaaggatccatggctgcaactggccggatcagctgctggagcactgcaatcccgaggcggtcgttggcttcaagtgccccaccaaggtggaccccaactcggtggccgctcgcttctggcccttcccccggttccccgtcgccggcgactgccaccgcctgatcacttgcgtggagggccatccgcgcctgatcagctgcggcgaggacaaggtcttcgacgagcacacgctgacctgcgaggacccggagtacgccagcggcagctgtgccaactacggcaagtagggatcgccgagcgatctgtacatgcacacgaacaaacaaactgcaacagtgcaatctcgataatgtgaacgttcaaattaaaggagatacatatgtacatatgtatgtacttgctggctgcaaatttggagttatgttgttttgcagacaacccccccctcctaggtttacactggttcgctgcttcgagtgcgcactgtaggctccgactaaccaactactttcgtcccttcatctccgcaccttcgctgcactgtaaaaaatgtcctagcccagttagcttgttaacctttttgctttctaaccaaccaaccgtctgtatcttgctcttctttctgtattattaacttgttttgttgtttggtctcttttgtatatgaatcgcaataaagttaattttatttattgtacatta

SEQ ID NO: 38799 - protein, 230 aa, DROSOPHILA
MQRFQVCSVLILAWIACGHALAVGSPECPEKYGVQAYAHTENCDQFFLCTNGTLTLETCENGLLFDGKGAVHNHCNYNWAVDCKGRQWDPTPISTPACEYQFGLYAVSKDCSTTYIKCAHGEPHEQDCDAGLAYDERIHGCNWPDQLLEHCNPEAVVGFKCPTKVDPNSVAARFWPFPRFPVAGDCHRLITCVEGHPRLISCGEDKVFDEHTLTCEDPEYASGSCANYGK

SEQ ID NO: 38800 - DNA, 3799 bp, DROSOPHILA
caaatccagctcggagtcgatgttcaggcgattctggtcaagaatggccatcagggtggagacctcgatgtccaggaagctgggatcggacagaacctcgcgcgtgttggccgcgatcagatccatgctgctttgcatgaggcgcggctcatcgaacagcttggcaaactcgtacgcccggcacgcgtttttcggactaagatcagcccaaaggaaatgggtgcagcgcgtgaccacgtggggcagcatgtacttcttggccacgtagcacagctcgcaggccttgtcgaaggacccaatggtgatgcggtccgtgtagatgtactccagcatcgcctcgaacgcctccggctgcacgtccggaatgacgatggggtccgtcttatcgggcaggttgccatagaacattcgctcgaacaccggcgaagccatggccagtagcagcttgtggccggcaatgagccgctgggtgggcgaagaacccaccagaaagcggcagtcggcccacttctccgagtggagcaggtactggccccgatccttcagctcggtgaggccgttttgccagtcgatgtccattgcctgcggtggattggctgggattgggatcactgtaatccaaacgttgttcgctctgatttgtgtgaataatccacctttttgcgaatcggtttgggattttgcgaaattgttattattttacgataccgataattgaatgcgtgcttacctatcgattggctgtcgtaccgatagcagaggtctgccaaatggcgtaataattaaaagtcatgttatgagctttctagcaaaaatacttaagcatttaaggtattatcaagagtaaactcaaatctttctttagattttaagctgtgatttcaaaactgtgactccatagcagtcgatagttgtattaaaccatcgaagttgccacactggtgagagcatggatggtatcgaacagatatcgattcatgttccagctctagttctaatagcaacaatttcaagcgaaaatattaattaattcggcgcatttaagacacgcggagaaaaaagagctagctcgagatacaggatcattgcttaggcggccataaccgagagaaagagcgaaaaagggcaggcgcttcaataataataatatctcttgtcacctgcgcccgtgcgtttgtgtgtgtgtgtgtttgcgtgcgtgtgagtgtcgcgtgtgtttgtgctttgttctgcgagcgttccgttgcgttttggaaatggcaaagaaaacctacgatttgctctttaaactgttgctgatcggtgattcaggagtgggcaagacgtgcatattgttccggttctcggatgatgcattcacgtccacgttcatatcgaccataggtgagtaacgggaccgtacgcacatacttgcatctgtccacccgcaccgcacacacacacacacgcgcacatgtcagctgcacagccaggatatatatacgtgtgtgtgggtgtgtgactgggcgtggcactgccttatcgactggcctatgcactgcttgtttcgatcgcctgcggagtggaaagcggaggagaagtgagcaaaatatgccatctatgtggctatgtaactccctgaacttgaacttttcgtactaaactactgcatgttcgcaacacgtaacacagacgtgtgatcatttggttggaatgaatgcttcatatacgtctaatgtaatgaatcatcgtgatatcaatgtcgaactgctttattttattcaattccaatgtaatcgataacaccgccgtgacgtcattcggctcaaattgcgttggtttttccgcactacatttgctttctcgttcaaccgtttttctcaggcatcgatttcaaaatcaaaacagtcgagctgcgcggcaagaagatcaagctgcaaatatgggacaccgccggccaggagcggttccacacgataaccacctcgtactatcgaggcgccatgggcataatgctggtctatgacataacgaacgagaagagtttcgagaacatagtcaaatggttacggaatatagacgaggtaggtgtttcccctgcgagtaatggccttttctaaagtctgaaatcttcttcttttttttttgttttagcacgccaacgaggatgtggagaagatgatcctcggcaacaagtgcgatatgacggacaagagggtggtcaacaaggagcgcggcgaagcggtgagcatccctcatccacagagtgcccccacaacagcaatcactgtcagagattaggaaatatagtcgtagttagatcgttaagctcttctgccataggagttgagttcggaaatcgatcatatattagtgtgtttagctttcaaagccaactgttttttacaagcgaattccatgccccttaatagtttcctattgttttgattttttaagataagtttgcaaattgaacacagcgaatatattcgttctctgacaatcaagacgaaactatttaggtgctatagtatgtccgtggtaatgaatgcaagggaaaatttccggaggcatacaatttatgttagaactattctggttatttattatgattgttactcaatgatcgcacacgccccacgtctgtttgatcaatttgtttacaaagccaataacttgctccccttccccatctctgcccacgttttttagattgcccgtgaacatggcattcggtttatggaaacatccgccaagtcgaacataaacatcgagcgggccttctgcgagctggccgaggccattctggacaagacatcaggacgcgagtcggcggagaatcaggagcgcgtgattatcgatcgccggaaccaggagaaggcgccgggctacagcaagtgctgcgcgtaaaaagcggcgttctaggcgaacggggcgtggtttggcccggtttgtgctcagctgtgcgtggggaaggcggcgaagtacggattggattggattaaactggactagattgaattggaatggaacgaaacgaatcgaatcgaaccgaaagcagtggggaccggtttctgaaaccgctccgcacggacgaagcaaaaaacaaagcaatagagccggggtcattcgcacgtaggaaacttacttattacgaggatacgcaaaatggaacaagcaacagaaacaacctacctaaagtttaacaacaagcaacagatattgtaatacgaacatttggaagcaactttacaaaactccgaacgatggatggtggtcgggcatgggccacgttagttaacgcccacacaacgtggacgcaaggatctgcatatccatgccgcactcgatcggttgactaacgtggatcggataacgaggatcagctccagccactgtccagccacaagaaacgataatgatagcgctgatgtcgctgacgcagacataagcaacttttgtaacgtacttttgatacacatatagtcttacgattcctgtactcagtcattcgatcgctcgctcgctcgctcgttcgccaccactcgcactccccagccgccccacttagtgtttcgtttttgttttgcgtttcagcctagatataaataacacctatacatattatacatcggatagtagtatatagcctatacctacttagcttgctttcgctttctatgtcgacgccaagccaagccagcgaggagttcgatggggcgggtggtgatgtacgccctgctctgcgtcctggccactcaagctttcaagccagatcctcggccagagttgcagttccatagggagtttcgagatcgag

SEQ ID NO: 38801 - DNA, 1540 bp, DROSOPHILA
gcaacaatttcaagcgaaaatattaattaattcggcgcatttaagacacgcggagaaaaaagagctagctcgagatacaggatcattgcttaggcggccataaccgagagaaagagcgaaaaagggcaggcgcttcaataataataatatctcttgtcacctgcgcccgtgcgtttgtgtgtgtgtgtgtttgcgtgcgtgtgagtgtcgcgtgtgtttgtgctttgttctgcgagcgttccgttgcgttttggaaatggcaaagaaaacctacgatttgctctttaaactgttgctgatcggtgattcaggagtgggcaagacgtgcatattgttccggttctcggatgatgcattcacgtccacgttcatatcgaccataggcatcgatttcaaaatcaaaacagtcgagctgcgcggcaagaagatcaagctgcaaatatgggacaccgccggccaggagcggttccacacgataaccacctcgtactatcgaggcgccatgggcataatgctggtctatgacataacgaacgagaagagtttcgagaacatagtcaaatggttacggaatatagacgagcacgccaacgaggatgtggagaagatgatcctcggcaacaagtgcgatatgacggacaagagggtggtcaacaaggagcgcggcgaagcgattgcccgtgaacatggcattcggtttatggaaacatccgccaagtcgaacataaacatcgagcgggccttctgcgagctggccgaggccattctggacaagacatcaggacgcgagtcggcggagaatcaggagcgcgtgattatcgatcgccggaaccaggagaaggcgccgggctacagcaagtgctgcgcgtaaaaagcggcgttctaggcgaacggggcgtggtttggcccggtttgtgctcagctgtgcgtggggaaggcggcgaagtacggattggattggattaaactggactagattgaattggaatggaacgaaacgaatcgaatcgaaccgaaagcagtggggaccggtttctgaaaccgctccgcacggacgaagcaaaaaacaaagcaatagagccggggtcattcgcacgtaggaaacttacttattacgaggatacgcaaaatggaacaagcaacagaaacaacctacctaaagtttaacaacaagcaacagatattgtaatacgaacatttggaagcaactttacaaaactccgaacgatggatggtggtcgggcatgggccacgttagttaacgcccacacaacgtggacgcaaggatctgcatatccatgccgcactcgatcggttgactaacgtggatcggataacgaggatcagctccagccactgtccagccacaagaaacgataatgatagcgctgatgtcgctgacgcagacataagcaacttttgtaacgtacttttgatacacatatagtcttacgattcctgtactcagtcattcgatcgctcgctcgctcgctcgttcgccaccactcgcactccccagccgccccacttagtgtttcgt

SEQ ID NO: 38802 - protein, 204 aa, DROSOPHILA
MAKKTYDLLFKLLLIGDSGVGKTCILFRFSDDAFTSTFISTIGIDFKIKTVELRGKKIKLQIWDTAGQERFHTITTSYYRGAMGIMLVYDITNEKSFENIVKWLRNIDEHANEDVEKMILGNKCDMTDKRVVNKERGEAIAREHGIRFMETSAKSNINIERAFCELAEAILDKTSGRESAENQERVIIDRRNQEKAPGYSKCCA

SEQ ID NO: 38803 - DNA, 4206 bp, DROSOPHILA
atatgtacatatgtatgtacttgctggctgcaaatttggagttatgttgttttgcagacaacccccccctcctaggtttacactggttcgctgcttcgagtgcgcactgtaggctccgactaaccaactactttcgtcccttcatctccgcaccttcgctgcactgtaaaaaatgtcctagcccagttagcttgttaacctttttgctttctaaccaaccaaccgtctgtatcttgctcttctttctgtattattaacttgttttgttgtttggtctcttttgtatatgaatcgcaataaagttaattttatttattgtacattacatcaaggcgaaaaagtagccattcttggtgggagtttggtttggaaggttcttaaacgacgtacccatcatagcccagagctttacaattaggattgagacacgcgacggcattaggaaatatattaaatatgttttattaaattgaaatataccaatttagtcttgtgtaaatcttaaaatatttgcttgttgctctacaaaacctaagctcaaaaatattacttttggaagaaaaacatttaagtggtgttcgttgagagggacgtttggataatcattatcattaggcagctaaaatcaagcatgcaaaaaaaaagaaatgcataattggctacagcgtttcagaacaaattgaacttggcaataaacctgtacaaacataatgcaacaattgcagttgcattagccattgctgaccagaaatgcgatgttcatttctagtcatttgcttggcgatccaaaacagataaggaacacaaacaatccatacacacacacatggtaagtgatgtaaaaactatgcacaattagttcccattttggaactaggagaaggggaaatataatcgtacagatcaaataatttccatggccaatgacgccaaccaaagactatcacatcggaaatacaaggaaggagacctaaactaacgaactcatattgctccgcattcagtcgaccaggtgacggccatggtcctgcggtgtggagaagataattgcgtagataaggccgtcgcgaaccgattcggtggggttgcccacgttgaacatgaacttcacgcgattgcagttggcatcgggcacacaggagtacatgggataccagccggtcttgttgaacaccacgtagatcttgtagatctggtttcggtatatgtacaccggtcgatcgaacgtgatgtccagcagcgaatcgtaacgcacgcgtgccgtgcagtgcgtgtatgtgatgcgtgagccgtgcatgtcctggatgtgggcgtacagcacctcggtgtatcgttccgtaaaaccggcagaagtcatcagctcgccgcacagcacgcgcgtgggcacttggacgcccaggatccaaatgttggtgtccacctggaacgttacgcccgcatccgtgacgctggtgttgcggaagtcaaattgccgggtaagggagcgcatacagtacgcgcgcaccatgtcgttgtgcgaatttccagctgcggatccagctcctccagctgcagcgccgccagcgggcgccggtgcgcctcgatcgccgccatcatcatcattggcgggcgctgggactggcgctccgctctcgtagccctcgccgaagcagcgcagtggtgctggcgcaggtgcggcatccggtgggacgcccaccggttccggcgggcggatgaccaattcctcgcctgcgaagccgaatcccgtgcccacggatccgaaacggggcgcaatgcccatcatcataccgccgccggagggtcctccgctgcgaactgccggtcccggtcccgggaaacagacgcccgagggagcggctccagtgcgatacgaggaggacaattctctctgggcgtgtcggtggcccgactcgtagaagttgcgcgtgctccgcgacacgcagaagccttcgggcatgtgacaatcgttgagcgagggactggagatcttaatcaggatggagagggcctcgtgctgctgcagcagcttggaacgggccggtccctccgcgaactgctgcggcgtcatggtgagaaagcgaatctttttgaccgcctgcctgagcatggcgccatcgagaatggtgcgctgggcgtccatgatgttaatcatgttggcggcggcatcggccgaagcgtcgctatcgatgattaccaggtcgtcggagccggaagccacgtccagcggcggggaggcagccgtgggcgcagctgcagccgcggcagccgcagaggaagtggaagccatcccagcgtccgtttcgaagctgtcagcctcgtcgtcctggtgcatgtgctgcaccatggccgccacatcgggctccatcttgatctcttcgaccagcacatggccggcagcattgtcgggcgattccttggtcagcacctgacctccgctagcagtctcttcctggccggactcgttcaggatgccccgctcactggcaaacttcagcaggcagttgaacaaatccagctcggagtcgatgttcaggcgattctggtcaagaatggccatcagggtggagacctcgatgtccaggaagctgggatcggacagaacctcgcgcgtgttggccgcgatcagatccatgctgctttgcatgaggcgcggctcatcgaacagcttggcaaactcgtacgcccggcacgcgtttttcggactaagatcagcccaaaggaaatgggtgcagcgcgtgaccacgtggggcagcatgtacttcttggccacgtagcacagctcgcaggccttgtcgaaggacccaatggtgatgcggtccgtgtagatgtactccagcatcgcctcgaacgcctccggctgcacgtccggaatgacgatggggtccgtcttatcgggcaggttgccatagaacattcgctcgaacaccggcgaagccatggccagtagcagcttgtggccggcaatgagccgctgggtgggcgaagaacccaccagaaagcggcagtcggcccacttctccgagtggagcaggtactggccccgatccttcagctcggtgaggccgttttgccagtcgatgtccattgcctgcggtggattggctgggattgggatcactgtaatccaaacgttgttcgctctgatttgtgtgaataatccacctttttgcgaatcggtttgggattttgcgaaattgttattattttacgataccgataattgaatgcgtgcttacctatcgattggctgtcgtaccgatagcagaggtctgccaaatggcgtaataattaaaagtcatgttatgagctttctagcaaaaatacttaagcatttaaggtattatcaagagtaaactcaaatctttctttagattttaagctgtgatttcaaaactgtgactccatagcagtcgatagttgtattaaaccatcgaagttgccacactggtgagagcatggatggtatcgaacagatatcgattcatgttccagctctagttctaatagcaacaatttcaagcgaaaatattaattaattcggcgcatttaagacacgcggagaaaaaagagctagctcgagatacaggatcattgcttaggcggccataaccgagagaaagagcgaaaaagggcaggcgcttcaataataataatatctcttgtcacctgcgcccgtgcgtttgtgtgtgtgtgtgtttgcgtgcgtgtgagtgtcgcgtgtgtttgtgctttgttctgcgagcgttccgttgcgttttggaaatggcaaagaaaacctacgatttgctctttaaactgttgctgatcggtgattcaggagtgggcaagacgtgcatattgttccggttctcggatgatgcattcacgtccacgttcatatcgaccataggtgagtaacgggaccgtacgcacatacttgcatctgtccacccgcaccgcacacacacacacacgcgcacatgtcagctgcacagccaggatatatatacgtgtgtgtgggtgtgtgactgggcgtggcactgccttatcgactggcctatgcactgcttgtttcgatcgcctgcggagtggaaagcggaggagaagtgagcaaaatatgccatctatgtggctatgtaactccctgaacttgaacttttcgtactaaactactgcatgttcgcaacacgtaacacagacgtgtgatcatttggttggaatgaatgc

SEQ ID NO: 38804 - DNA, 2206 bp, DROSOPHILA
aaataataacaatttcgcaaaatcccaaaccgattcgcaaaaaggtggattattcacacaaatcagagcgaacaacgtttggattacagtgatcccaatcccagccaatccaccgcaggcaatggacatcgactggcaaaacggcctcaccgagctgaaggatcggggccagtacctgctccactcggagaagtgggccgactgccgctttctggtgggttcttcgcccacccagcggctcattgccggccacaagctgctactggccatggcttcgccggtgttcgagcgaatgttctatggcaacctgcccgataagacggaccccatcgtcattccggacgtgcagccggaggcgttcgaggcgatgctggagtacatctacacggaccgcatcaccattgggtccttcgacaaggcctgcgagctgtgctacgtggccaagaagtacatgctgccccacgtggtcacgcgctgcacccatttcctttgggctgatcttagtccgaaaaacgcgtgccgggcgtacgagtttgccaagctgttcgatgagccgcgcctcatgcaaagcagcatggatctgatcgcggccaacacgcgcgaggttctgtccgatcccagcttcctggacatcgaggtctccaccctgatggccattcttgaccagaatcgcctgaacatcgactccgagctggatttgttcaactgcctgctgaagtttgccagtgagcggggcatcctgaacgagtccggccaggaagagactgctagcggaggtcaggtgctgaccaaggaatcgcccgacaatgctgccggccatgtgctggtcgaagagatcaagatggagcccgatgtggcggccatggtgcagcacatgcaccaggacgacgaggctgacagcttcgaaacggacgctgggatggcttccacttcctctgcggctgccgcggctgcagctgcgcccacggctgcctccccgccgctggacgtggcttccggctccgacgacctggtaatcatcgatagcgacgcttcggccgatgccgccgccaacatgattaacatcatggacgcccagcgcaccattctcgatggcgccatgctcaggcaggcggtcaaaaagattcgctttctcaccatgacgccgcagcagttcgcggagggaccggcccgttccaagctgctgcagcagcacgaggccctctccatcctgattaagatctccagtccctcgctcaacgattgtcacatgcccgaaggcttctgcgtgtcgcggagcacgcgcaacttctacgagtcgggccaccgacacgcccagagagaattgtcctcctcgtatcgcactggagccgctccctcgggcgtctgtttcccgggaccgggaccggcagttcgcagcggaggaccctccggcggcggtatgatgatgggcattgcgccccgtttcggatccgtgggcacgggattcggcttcgcaggcgaggaattggtcatccgcccgccggaaccggtgggcgtcccaccggatgccgcacctgcgccagcaccactgcgctgcttcggcgagggctacgagagcggagcgccagtcccagcgcccgccaatgatgatgatggcggcgatcgaggcgcaccggcgcccgctggcggcgctgcagctggaggagctggatccgcagctggaaattcgcacaacgacatggtgcgcgcgtactgtatgcgctcccttacccggcaatttgacttccgcaacaccagcgtcacggatgcgggcgtaacgttccaggtggacaccaacatttggatcctgggcgtccaagtgcccacgcgcgtgctgtgcggcgagctgatgacttctgccggttttacggaacgatacaccgaggtgctgtacgcccacatccaggacatgcacggctcacgcatcacatacacgcactgcacggcacgcgtgcgttacgattcgctgctggacatcacgttcgatcgaccggtgtacatataccgaaaccagatctacaagatctacgtggtgttcaacaagaccggctggtatcccatgtactcctgtgtgcccgatgccaactgcaatcgcgtgaagttcatgttcaacgtgggcaaccccaccgaatcggttcgcgacggccttatctacgcaattatcttctccacaccgcaggaccatggccgtcacctggtcgactga

SEQ ID NO: 38805 - protein, 694 aa, DROSOPHILA
MDIDWQNGLTELKDRGQYLLHSEKWADCRFLVGSSPTQRLIAGHKLLLAMASPVFERMFYGNLPDKTDPIVIPDVQPEAFEAMLEYIYTDRITIGSFDKACELCYVAKKYMLPHVVTRCTHFLWADLSPKNACRAYEFAKLFDEPRLMQSSMDLIAANTREVLSDPSFLDIEVSTLMAILDQNRLNIDSELDLFNCLLKFASERGILNESGQEETASGGQVLTKESPDNAAGHVLVEEIKMEPDVAAMVQHMHQDDEADSFETDAGMASTSSAAAAAAAAPTAASPPLDVASGSDDLVIIDSDASADAAANMINIMDAQRTILDGAMLRQAVKKIRFLTMTPQQFAEGPARSKLLQQHEALSILIKISSPSLNDCHMPEGFCVSRSTRNFYESGHRHAQRELSSSYRTGAAPSGVCFPGPGPAVRSGGPSGGGMMMGIAPRFGSVGTGFGFAGEELVIRPPEPVGVPPDAAPAPAPLRCFGEGYESGAPVPAPANDDDGGDRGAPAPAGGAAAGGAGSAAGNSHNDMVRAYCMRSLTRQFDFRNTSVTDAGVTFQVDTNIWILGVQVPTRVLCGELMTSAGFTERYTEVLYAHIQDMHGSRITYTHCTARVRYDSLLDITFDRPVYIYRNQIYKIYVVFNKTGWYPMYSCVPDANCNRVKFMFNVGNPTESVRDGLIYAIIFSTPQDHGRHLVD

SEQ ID NO: 38806 - DNA, 3855 bp, DROSOPHILA
aacagccattaagtaactaaaaaaaaacggaaaaattgataaaaaggaaagtactttttagaattttcaagtatgtttatatctaatatttaatactctaataaaattattatcttgattatggtgttatcttcttgattcgttttcttatgtattgatatgtatattattattattatattatactagtaaacagcttccactttaaattaaaaacgaacttgattaagtgtgtatactatcgaacaacttaaaattcaaagaaaatttgattagtgagctttccttcaataaagtgtacatgaatagcgaaaacgcgtatttttcccagtgtacctagtcacctgaagccctctgttgtcgctgtttgggcgccgtgtcgtcattatcatctgcatttgcattttcggcctgctcaccgacggcttgttgggtaaatattgccattttatgcagcgtccacgagatgccatcgaaggagccggcactttggctataaaaacaaattggacggggtcgggggtggcgcaaggccgcgacaactgtttaaacagaaggatagcaaaaggttgtcaccggaaattgagttaattcggtggatattaatttgaatctaatcgataacgattgacacgaatcgaatgccctcgaccaaaagctgattgatgcggcacgttggccagctaatcagtgctgccgcttaattagctatagaatagctattctactactacttatgccatatatgtggctgtattattattaatcaacaatcattctatatttgatgcataagagtgggattgcacgctaattgacagttcgtttttaggtcagtcatgtttaactactacttgcgctacattatgatgtagcgaagcaaatagccaaaagtagtaacacagggctataaaatagcttatttgacagcacaacatctgattgttgttgagttcgtttttgtttttgtttttcgttttcgtttcagtttagtttacgctcccctgtttatttgcgagccatcgctcattccgcccgcaacgccagccccgccccctgcgctccgcagcccccaccaatggacgttcggattaagtgcaacagcgaggagccagagtctccggagcagaagatcctggcgagcagccagcgcctgctgcagttcaccaactgccgccttgtacgcgaccaccggatcatccacgacgatctgtgggttcgcgacggtcggatcgtgaacccagagcctgtgttcttcgacgagcggaccaaggcccactgtcgcatcgactgcgggggcgccatcatcgcgcccggctacatcgacctccagatcaatggtgagccctgagaagcgcgcgcgaccccatctccccgctgcactgtgaaaaacgtatgacatcatgtctctgagctctcaattgaaagaaaccatatggaatccacattgtgtgcagtagattaagagattagttttaggatctacacatttcgttttggggctctgcagattgcagaaatctacatatgtatgcaagtgcatcgcattccataactattatatctattatcggtatatagatatatatgttaaatttatagttccacgatcaaaaatttaaacttgcaaaaaagaaacggcagctagcggtggtcgttaaacccgatcccacttccactttcatcatgtttcctattagaacaccatgttgatgggttcaattccgcaccactcggcctggaatcccactaattggcactttcgccgcgctccaatcagccgccaaggtcatccgttctgtttacccgttgacaaagcggcaagccgcaatatggagcactcgtaatcggagcgatttaatcttatcgtgacttcgcaggccccaagctgctgagctcgaccgcaagtgggctacagtgggcacttgcagcgatgacccactgtggtcaaactaagtcgcgataagcgacctctttgtcttcggaagacaatggctaatcgtgccatggagataatccgtggtgtcagaaacataatccaatccaaagatggctgattaacccgagttcacattctccacaggtggctatggcgtggacttctcgtacgacacggagaccatcgaggagggcgtggccacggtggcacgcggcctggtcaagagcggagtcacctccttctgtcccacgctggtgacctcgcccagcgacagctaccacaccatcctgccgcgcattcccgcagaggttcccaagggcgccggcatactgggcatccatgcggagggtccgtttatcaatccgcagaaaaagggcgcgcatccggagcactgcatccagaccattgataaggtgggagaccagttttcattgctgataccctgatatccaacatctgcagagagatcattcaaatgtaacctttcgtttgcctcgcttgaagggactcagcacgctgaaggagacgtacggctcgctggaacgcattaaaatcatcaccctggcgccggagaaggtcaccgacccggaggtgattggccagctggtggagcgtggcatcaccgtggccctgggccactcgatggcctcgctaagcgacggagagagggccgtgcagcagggcgccacgctgatcacgcatctgttcaacgccatgctgccgttccatcaccgcgatcccggcctggtgggactgctggcctcggacgcagtgccgcacggtaggaccgtgtacttcggcatcatctcggacggagtgcacactcatccggcggcactgaggatcgcctaccgcacgcatccgcagggcctgatcctggtgacggacgccatatcggcgctgggcctcgaggagggtgtccaccacatcggacagctgccgctgcaggttaagcagggcaaggcgttcatcgcaggcacagagacgctgtgcggcagcatcgccccgatggacgagtgcgtgcggatcttccagaaggcgaccggtgagtgcgagatccccgctagaattcgcattaattactccgttttgcagactgctccgtggtctatgccatcgaggcggccaccttgcatccagcacagtgcctgaagatcgaaaagcagaagggcaccctggactttggctcggacgcggacttcgttctcctggacgaccagctccgggtgctatccacctggatcgctggcgtatgtgttcataggactgtcaagtagcgcatcgaatgtgcaactgttgcaattgtttttatttacctgatgcaggatgcaggattctacaccgaagattctccaaataaattgttaaacttatacattccaattgaaggagcttgagattcttgtgagtgcagccaaggatgttcaaatgaattgtttaacgatgattgtttgccatttgaaataaggaatcactcactggtttatatgacatggtttaggttgttctttatattttaatcggtaaatcatttggtgtggacaactaaactaaatccatatacagttacaaataataggtttacacgacaaaaaaaaaagagtagaataaaattacaaggagacgggaggcgagcgctaggtggtgcgttcggtttggggcgctcctcccttgcggatgcgaatgcaaatgcgaatgctacattgatggcgtgcaccgtccttacatacaagcatggagatatatacgcgcgcacacccaagcccccttaagtgtacacagatacatacatatatattatatataaattgggtgtgcgggcgcgaatgcacataaaaacgatgcgatatacggtgtgtaatttcatatatgtatatatatatataaatatatatttatatctaaatatctatata

SEQ ID NO: 38807 - DNA, 1332 bp, DROSOPHILA
tcccctgtttatttgcgagccatcgctcattccgcccgcaacgccagccccgccccctgcgctccgcagcccccaccaatggacgttcggattaagtgcaacagcgaggagccagagtctccggagcagaagatcctggcgagcagccagcgcctgctgcagttcaccaactgccgccttgtacgcgaccaccggatcatccacgacgatctgtgggttcgcgacggtcggatcgtgaacccagagcctgtgttcttcgacgagcggaccaaggcccactgtcgcatcgactgcgggggcgccatcatcgcgcccggctacatcgacctccagatcaatggtggctatggcgtggacttctcgtacgacacggagaccatcgaggagggcgtggccacggtggcacgcggcctggtcaagagcggagtcacctccttctgtcccacgctggtgacctcgcccagcgacagctaccacaccatcctgccgcgcattcccgcagaggttcccaagggcgccggcatactgggcatccatgcggagggtccgtttatcaatccgcagaaaaagggcgcgcatccggagcactgcatccagaccattgataagggactcagcacgctgaaggagacgtacggctcgctggaacgcattaaaatcatcaccctggcgccggagaaggtcaccgacccggaggtgattggccagctggtggagcgtggcatcaccgtggccctgggccactcgatggcctcgctaagcgacggagagagggccgtgcagcagggcgccacgctgatcacgcatctgttcaacgccatgctgccgttccatcaccgcgatcccggcctggtgggactgctggcctcggacgcagtgccgcacggtaggaccgtgtacttcggcatcatctcggacggagtgcacactcatccggcggcactgaggatcgcctaccgcacgcatccgcagggcctgatcctggtgacggacgccatatcggcgctgggcctcgaggagggtgtccaccacatcggacagctgccgctgcaggttaagcagggcaaggcgttcatcgcaggcacagagacgctgtgcggcagcatcgccccgatggacgagtgcgtgcggatcttccagaaggcgaccgactgctccgtggtctatgccatcgaggcggccaccttgcatccagcacagtgcctgaagatcgaaaagcagaagggcaccctggactttggctcggacgcggacttcgttctcctggacgaccagctccgggtgctatccacctggatcgctggcgtatgtgttcataggactgtcaagtag

SEQ ID NO: 38808 - protein, 417 aa, DROSOPHILA
MDVRIKCNSEEPESPEQKILASSQRLLQFTNCRLVRDHRIIHDDLWVRDGRIVNPEPVFFDERTKAHCRIDCGGAIIAPGYIDLQINGGYGVDFSYDTETIEEGVATVARGLVKSGVTSFCPTLVTSPSDSYHTILPRIPAEVPKGAGILGIHAEGPFINPQKKGAHPEHCIQTIDKGLSTLKETYGSLERIKIITLAPEKVTDPEVIGQLVERGITVALGHSMASLSDGERAVQQGATLITHLFNAMLPFHHRDPGLVGLLASDAVPHGRTVYFGIISDGVHTHPAALRIAYRTHPQGLILVTDAISALGLEEGVHHIGQLPLQVKQGKAFIAGTETLCGSIAPMDECVRIFQKATDCSVVYAIEAATLHPAQCLKIEKQKGTLDFGSDADFVLLDDQLRVLSTWIAGVCVHRTVK

SEQ ID NO: 38809 - DNA, 3520 bp, DROSOPHILA
gatgtgggtaatgacgctgatgacgacacaccgctgggaattatttgtatatgcagtcatgtagcatcgattaatcattttattattattgccattcgccggcgctcccacagctcgtgatcctcatacatacgagctctgaaaagtcgactcctagatggaattccaaatgctgttcataatcgcaccggggaaaggccgctccatcgatgggtgcacaaatccggtagggatgtccattaatacggtcattccattcaatagttggtggttgtgaatgggaaacgaactgcctattatcttgggactagggtctatgccataataatcccgaatgtacatttaatattagcaatgcatttggaaagataataatataatactcgtacaccatacaatgcgatccaattcaattaactgcgataggatgcgagcaacttcgaatttaattataataattacatcagattttaatgctccaaagtttgtgtgccttacgaaacatatgtattttttttctttaaattgcaggaacgatcccaaattgcgaatcgttcttagctttatttggagatacaattttatgtgaaaattttaaaacatattttctgttgctttttgcagcaagtaactatttaaaacgattagaagaacaacaaaagttaaaaaatactagagaataaaactaaaacttaaagtatataaaatatttcattgaaagtgactttaatccagtataactagccaaatcccaggcgaaattagggttttctgcttaattacaagatgtgtgacattttgaaaataacggtaatcataatcaatccaacactaggcaaccctgatgcgttggcaattcaaaatacactcagtagaaagccctagtgtcacacaaaagtcaggagagccgaaaaaaattgaacccaagcaagccgtaactctggagaccaatagccaagccgaaacgttatcccaaacgagccactgcagtcccggaacgatgtatgccgccgtaaagccgctgtccaactatctgcgcctgaagaccgtacgcatatacgacccgatcttcacgctgcactccaagtgcaccatcgtcatcctgctgacctgcaccttcctgctttccgcgaaacagtacttcggcgagccgatcctgtgcctcagctccgagcggcaagcggattacgtgcagtcctactgctggacaatgggcacctacatcctgccggcggaggtcgatcgggatggcggcagcagctgggaatacgccctctacgcacccacctccacggccgccgagacctttaacgtgagcagtctgcgcgccctggtggcccaaaatgagcagtacgcccggttcatctcgatcgccgagggcgtcgggccggagacgcgtggcgtgaccaagcggatgtatctgcgctactatcagtgggtctttatgatcctgctctttcagtcgctgctcttctacttcccctcgttcctgtggaaggtctgggagggccagcgcatggagcagctgtgctgcgaggtcggcgacgcgctcatcgtggaggccacctatcgcacccgcctgcagatgctcaccaggtatttccgcgcccagttcgcccccatccactggtgctattcgatcaagtacgcattctgcgagctgctcaatgtgttcatcagcgtgagttaaactccattgaagtgccaaaaccagttgtgaccaggtgtgtaactgctccttcgcctccgctgcagatcctcaacttctggctaatggacgtggtgttcaatgggttctggtacaagtacatccacgccctggccgccatacccgtgtacgactggaacctctggaacctgatgacgtcgcgcgtctttcccaaggtggccaagtgcgagatgttcgtctacgggcccagtggcacgccgaatatcatggacatcctgtgcgtgctgccgctgaacatcctcaacgagaagatcttcgccgtgctgtacgtatggttcctgttcatcgcgctgctggccattatgaacatcctttaccgcctgctggtcatctgctgcccggagctgcgcctccagctgctgcgcacccacctgaacggcatgcccaagtcgcatgtgcgggaagtcctggccagcgctggatacggcgactggtttgtacttatgtgcgtgagcatcaacgtcaatcccactttgttccgggagctcctcgagcagctctacgccaagctaaatcaggcgcgctgcacggagcccgtattcgcggagcagccttgtcagcaagtgccgcagctggcgcaagtgccgcaacttttctcgcacgccaagctggacaggtgtcccagtcgcaactgcagcctgttgattgatcccacggccgatcgtcattcaatttgcacggagagcagccatcgagtgacggcgatgcccacggccccgaccctcaacctaatggcgcccaacgacgagattatcagcatggatcgtttcttccacgagagccacgcatagggtccataattgttgccgccagtccactttctgcgatttattagcacttcaattaaatgtagtgattttcaattaagcagatataatcggtacacatcagtacttttttttttgtattacatgtatgtatgcacatataagaataaagaaatatatagataccctaccaatctattggtatattggctttgacttgccgatttgattgcctttcttgaaggataaacatacatgcatatgtacatacatatgtacataaatatgtactgtatgtacatatgtgcataatttcaaaacacattactcctaaaatcgcgcccgtatcatttcgcatgctttcgcccccatttgcagcactttccctcgtggagctttatcagttttgcaaataagtgaattgcatcaaaatgcaaataaaaagcactaatcaaaatgacagcgggaggccggcggggtaaataccaaataccaaataccagcaggcataacaaaaactttaacaaacttacaaaagttaaacaagccgactgcaagatgtgatagtggcgggggtggtggggcagggcgagaacggcgttcgctctcgctgagagatgatgacgatgattgcgaaactcttctcttccgctggttaagcttttgtctgtctgccaacaggtaaaactaacaacaacaatttgtgagcgacggcagggagcgagagtcagtgctgcccagtgtcgttttcgaaaagtagccaatagttcttgcactttctaggcaatttaacaatttgatttaacaattccgtttctttttttctaattaagtaatgactttattcagttaataggctacaaaattgctgaatatgctatcagtcacatgaagcatttctagcaatgtcggcaaaagtcaagtctggctgtaaaacagctcaactggctgcactcgcaggagcaggaacagcaagaggaagagtaagaagaggcgacgacaacgcaaatggcggcaattacat

SEQ ID NO: 38810 - DNA, 1446 bp, DROSOPHILA
atgtatgccgccgtaaagccgctgtccaactatctgcgcctgaagaccgtacgcatatacgacccgatcttcacgctgcactccaagtgcaccatcgtcatcctgctgacctgcaccttcctgctttccgcgaaacagtacttcggcgagccgatcctgtgcctcagctccgagcggcaagcggattacgtgcagtcctactgctggacaatgggcacctacatcctgccggcggaggtcgatcgggatggcggcagcagctgggaatacgccctctacgcacccacctccacggccgccgagacctttaacgtgagcagtctgcgcgccctggtggcccaaaatgagcagtacgcccggttcatctcgatcgccgagggcgtcgggccggagacgcgtggcgtgaccaagcggatgtatctgcgctactatcagtgggtctttatgatcctgctctttcagtcgctgctcttctacttcccctcgttcctgtggaaggtctgggagggccagcgcatggagcagctgtgctgcgaggtcggcgacgcgctcatcgtggaggccacctatcgcacccgcctgcagatgctcaccaggtatttccgcgcccagttcgcccccatccactggtgctattcgatcaagtacgcattctgcgagctgctcaatgtgttcatcagcatcctcaacttctggctaatggacgtggtgttcaatgggttctggtacaagtacatccacgccctggccgccatacccgtgtacgactggaacctctggaacctgatgacgtcgcgcgtctttcccaaggtggccaagtgcgagatgttcgtctacgggcccagtggcacgccgaatatcatggacatcctgtgcgtgctgccgctgaacatcctcaacgagaagatcttcgccgtgctgtacgtatggttcctgttcatcgcgctgctggccattatgaacatcctttaccgcctgctggtcatctgctgcccggagctgcgcctccagctgctgcgcacccacctgaacggcatgcccaagtcgcatgtgcgggaagtcctggccagcgctggatacggcgactggtttgtacttatgtgcgtgagcatcaacgtcaatcccactttgttccgggagctcctcgagcagctctacgccaagctaaatcaggcgcgctgcacggagcccgtattcgcggagcagccttgtcagcaagtgccgcagctggcgcaagtgccgcaacttttctcgcacgccaagctggacaggtgtcccagtcgcaactgcagcctgttgattgatcccacggccgatcgtcattcaatttgcacggagagcagccatcgagtgacggcgatgcccacggccccgaccctcaacctaatggcgcccaacgacgagattatcagcatggatcgtttcttccacgagagccacgcatag

SEQ ID NO: 38811 - protein, 481 aa, DROSOPHILA
MYAAVKPLSNYLRLKTVRIYDPIFTLHSKCTIVILLTCTFLLSAKQYFGEPILCLSSERQADYVQSYCWTMGTYILPAEVDRDGGSSWEYALYAPTSTAAETFNVSSLRALVAQNEQYARFISIAEGVGPETRGVTKRMYLRYYQWVFMILLFQSLLFYFPSFLWKVWEGQRMEQLCCEVGDALIVEATYRTRLQMLTRYFRAQFAPIHWCYSIKYAFCELLNVFISILNFWLMDVVFNGFWYKYIHALAAIPVYDWNLWNLMTSRVFPKVAKCEMFVYGPSGTPNIMDILCVLPLNILNEKIFAVLYVWFLFIALLAIMNILYRLLVICCPELRLQLLRTHLNGMPKSHVREVLASAGYGDWFVLMCVSINVNPTLFRELLEQLYAKLNQARCTEPVFAEQPCQQVPQLAQVPQLFSHAKLDRCPSRNCSLLIDPTADRHSICTESSHRVTAMPTAPTLNLMAPNDEIISMDRFFHESHA

SEQ ID NO: 38812 - DNA, 4887 bp, DROSOPHILA
aacaaaaccccaagataagctgtgcatatcacttatttagtcaaattttatgcgctgccgagccattcgaactatatttgtgggccagaagcagaccaaaacatgcgtaataaattagaaatatggcaaattcatgctaaatagcaacaacaatgcccatgcgataaaatcagaatggaaccggcgacccaaacaaaggcctagaccaattttaagaagccgccaatgaacatgacaaatatatgacaattgagagtagaaagttgccgcagtggggggcaagttcagcatctgtgaaatggcacagcaattgtcattccgtgtggaaagagcttaagtctattgtcaatattctggccagcgaaatatgtcaaaatattgagtaatcactctcgactggcggagaagcgtggacccaaaactcgaaacgtgaacgaatgttaagcaaatattggcttggtcttttctccactcatatctgttttttttttttgttatttgggtgctttgtcaacagcgcgacagattggccaaaaaaatgagttgtaaagtaccatagttttggttagacaatttcgtatgtagctcaaatcttctcaggggtcaacaaactctgatctcgagtgccccttgaaatgatcagcagttccccaagtgccacagatagtttccaaatatagaatcattacttcatttacaccagatatataatttggtgttctagtttttgatttttttaaaatttatttatttatttataaatgcagttttaaaagtcttgtaaaattaaaacaaattttatattatttttacaaagtattcacaacataaattattatatttaaaaatttaagattgttataaattttattaaattaccatgcgcttttaatagaaattttctttagttaccgaaaacatacgatggttttagtatatataaaacattttaagagctcaggggtttctccgtttttgagatttggatctaaaccaaaaaatgcattttctaacccacttctatcctgcagatctgcaaccaaatcttaatcgccagcgacgccagttctttttcgatccgagcattttgctatggcaaggagccctcggagcctctggcgtttctggtggctggggacctggcgaaggatccaagtgcttgacatcccgtggccaacccggtgtgtgtgtgcgcatcgatgggtgtcgccagtattacaggctagcccgccagatatccatcttcaccctgcgtcaatggccacaggcgaatggacttggactgaatggcaatatgtgcaacttcttcgatatgctgggcagagttaacaatggcatttgctgcacggatattgatgccaacagttttggggtattcccactccctggaacaacgacaacgacgaccacgactacggagatgccttcagtggtggctgatgaggaggatagggaacatgtgattcccgagggagaagtggagggtgtatatcctccggatgttcctcgaccggaagagcccattgacaatgcgaacagtgtggaggatacgccggatttccaggacatcaacacgattgagggtaatcctccaggagcagataaaaaaccggaagcagaaccggtgggggaaccggtggagcagcctatttccacccaaccagcgtctaccattcatccctaccagtggcctttcggttcctttgctggcggccagtggccaccagcgctaccgactcacccacccacaacgggtggttggccaccaccgctgcccacccatccgccgaaccaccattatcccacgcaccccaccacaggaggagttccaagcaccaagcgcaccacaccaaggcccacaagcccagccagaccgacaaccactaggcgacccacttatcctagttatccctcgccagttacaaccacgacaactacgagacgtcctgtgagcggaactagttcggaaggacttccgctgcagtgcggcaataagaatccagtgacgcccgaccaggagcggatcgttggcggcatcaatgccagtccacacgaatttccctggatcgctgtgctcttcaagtcgggaaagcagttctgcggcggcagtcttattaccaatagtcacattctgaccgcagctcactgtgtggcacggtgaggaataagactgtgtccttttagaatatcctaaaaacttgtggttattgcagcatgacctcgtgggatgtggcggccttaacagcccatctgggtgactacaacatcggcacggacttcgaggtgcagcatgtttcccgcaggatcaaacgacttgtgcggcacaagggtttcgaattcagcactttggtaagagaatccaatctatgtttctgaaagacctagtgatttccatcattatattcaaatgataatcctctttcccagcacaacgacgtggccatactgacgttgagtgaaccagtgcccttcaccagggagatccaaccaatttgcctgcccacctcgccctcgcagcaatcccgatcatacagtggccaagtggccaccgtggccggatggggaagtcttcgggagaatgggccacagccatccatcctgcagaaggtggatattcccatttggacaaatgccgagtgtgccaggaaatatggacgtgcagcgcctggtgggatcattgagtcgatgatttgcgctggtcaggcagccaaagattcctgcagtgtaagtgatgatatatataagtgatcatcaagattctcagactgatttaatttatagggcgactctggcggacccatggtcatcaatgatggtggacggtacacccaggtgggaatcgtgtcctggggcattggttgcggcaagggtcaatatcctggcgtctacactcgtgtcacttcgctgctgccctggatctacaagaacattaaataacataggatttcgattagtctaagacgtgatatgctgcaatatattaagagcgaacgatttaataaaatgtcaacattattgtagatctagactttcgaaaagcctaaaagtatgccgggattttgcgtcaagttttcttttctttaattgcgatacgaagaaatagttgaatatttgaaatctctttcgttagttcatcggtgatttcgagatctttaaaacatattttggtttagcgtacaaagtagtaactgaggaaaaaaaatatgtcacattaacaaagtaaacataatattgaacaagataaaaaaattcctattatatcccagcgagtcatgacttctccgagattgtttgttctcgaagatctgttcaagtttaacaatattgtgatggatcccttggcggaagtgtactccttgccattcttgcttcccaagattctggagcatcccgaactggttcttgccgccgatgctcctgacaatagtctcatgggcttcattctggggacacgcgtcgaggatgcgactgaatcttttggagatgcaaagactatgacctggaatcatggacacatctctgctctggccgtagctcaggattatcgtaaactgggcttgggcactcggctcttaacaaccgttagggatatgatggatcgtcagaaagacttttatatagatctatttgtgcgagagaagaatacaattgccattgggctttacgagtccttgggatatgtgaaatatcgctggatacctaagttttatgccgacgaccatggatacgaaatgagactacctttgtccagcgatgtggataggaaatccttagagggaataataatcaagaaaatctacagctttggcaataagttgtactatctgctgatgttttacatattcggaattatagctatagttattggtggaatattggttgaataagcaattgtagtaaaaccaaactattaaactttatttggcatcaaaacgtataatttataccacttaggaaacgtccagaaaaagttcattgcactcggacgccatcgttcaactaaaagtttgaacaaatcgctcaaagtaaaaaatgaagaccagaatatgtatgtcagaaagcatatggaaacaagatttgtttatatgacaacattgaaccagaattttcaaatgctgtgcgtttcaagttgcgcaaaatggcaaattgtgaaaatcattgcgcgtgtttcagacacatgccccaaccagactacactttatatttatatatgtataaattttctaatttgtttgcttttgagaaatgtagctaataaaaaagacaacaacgaaagccttgaccatctcgaaacggaaatttgcaattgaatttggtttggcaaacgacacgaacatcaatgcgtttcggttaaagaacatatatatgtatatgcattgccaacattagagtggaccttaacgttgaggattcaaagcaagactttttataaattctaaagtaaacgattttaaaaacaagcactaatctcttcatttgtttgttatttagcttttatatcatttgatgagattccactggcaacattgcgtatgaatgatgacctaaagggccactctttatacgactgaggtccaccctagttagcatttatctgtatttctacctatagttggcctttgtgcgtcaacggaaattgatcttcctctaaaaattcacctcaatggattttctttaattagctatgtaatccaaaaaaaaacttttaatttaatctgaaggcaacgcggttgcactgctcattgaacctccatggggcggggaacgtactttctcaattcgtaggcactttctggcttcggttcatccggatagtagtccaggaatgtttggcgatgagcataacccaaagaagtgtacaattgataggcagcccgattactgatt

SEQ ID NO: 38813 - DNA, 2325 bp, DROSOPHILA
atgcattttctaacccacttctatcctgcagatctgcaaccaaatcttaatcgccagcgacgccagttctttttcgatccgagcattttgctatggcaaggagccctcggagcctctggcgtttctggtggctggggacctggcgaaggatccaagtgcttgacatcccgtggccaacccggtgtgtgtgtgcgcatcgatgggtgtcgccagtattacaggctagcccgccagatatccatcttcaccctgcgtcaatggccacaggcgaatggacttggactgaatggcaatatgtgcaacttcttcgatatgctgggcagagttaacaatggcatttgctgcacggatattgatgccaacagttttggggtattcccactccctggaacaacgacaacgacgaccacgactacggagatgccttcagtggtggctgatgaggaggatagggaacatgtgattcccgagggagaagtggagggtgtatatcctccggatgttcctcgaccggaagagcccattgacaatgcgaacagtgtggaggatacgccggatttccaggacatcaacacgattgagggtaatcctccaggagcagataaaaaaccggaagcagaaccggtgggggaaccggtggagcagcctatttccacccaaccagcgtctaccattcatccctaccagtggcctttcggttcctttgctggcggccagtggccaccagcgctaccgactcacccacccacaacgggtggttggccaccaccgctgcccacccatccgccgaaccaccattatcccacgcaccccaccacaggaggagttccaagcaccaagcgcaccacaccaaggcccacaagcccagccagaccgacaaccactaggcgacccacttatcctagttatccctcgccagttacaaccacgacaactacgagacgtcctgtgagcggaactagttcggaaggacttccgctgcagtgcggcaataagaatccagtgacgcccgaccaggagcggatcgttggcggcatcaatgccagtccacacgaatttccctggatcgctgtgctcttcaagtcgggaaagcagttctgcggcggcagtcttattaccaatagtcacattctgaccgcagctcactgtgtggcacgcatgacctcgtgggatgtggcggccttaacagcccatctgggtgactacaacatcggcacggacttcgaggtgcagcatgtttcccgcaggatcaaacgacttgtgcggcacaagggtttcgaattcagcactttgcacaacgacgtggccatactgacgttgagtgaaccagtgcccttcaccagggagatccaaccaatttgcctgcccacctcgccctcgcagcaatcccgatcatacagtggccaagtggccaccgtggccggatggggaagtcttcgggagaatgggccacagccatccatcctgcagaaggtggatattcccatttggacaaatgccgagtgtgccaggaaatatggacgtgcagcgcctggtgggatcattgagtcgatgatttgcgctggtcaggcagccaaagattcctgcagtggcgactctggcggacccatggtcatcaatgatggtggacggtacacccaggtgggaatcgtgtcctggggcattggttgcggcaagggtcaatatcctggcgtctacactcgtcgagtcatgacttctccgagattgtttgttctcgaagatctgttcaagtttaacaatattgtgatggatcccttggcggaagtgtactccttgccattcttgcttcccaagattctggagcatcccgaactggttcttgccgccgatgctcctgacaatagtctcatgggcttcattctggggacacgcgtcgaggatgcgactgaatcttttggagatgcaaagactatgacctggaatcatggacacatctctgctctggccgtagctcaggattatcgtaaactgggcttgggcactcggctcttaacaaccgttagggatatgatggatcgtcagaaagacttttatatagatctatttgtgcgagagaagaatacaattgccattgggctttacgagtccttgggatatgtgaaatatcgctggatacctaagttttatgccgacgaccatggatacgaaatgagactacctttgtccagcgatgtggataggaaatccttagagggaataataatcaagaaaatctacagctttggcaataagttgtactatctgctgatgttttacatattcggaattatagctatagttattggtggaatattggttgaataa

SEQ ID NO: 38814 - protein, 774 aa, DROSOPHILA
MHFLTHFYPADLQPNLNRQRRQFFFDPSILLWQGALGASGVSGGWGPGEGSKCLTSRGQPGVCVRIDGCRQYYRLARQISIFTLRQWPQANGLGLNGNMCNFFDMLGRVNNGICCTDIDANSFGVFPLPGTTTTTTTTTEMPSVVADEEDREHVIPEGEVEGVYPPDVPRPEEPIDNANSVEDTPDFQDINTIEGNPPGADKKPEAEPVGEPVEQPISTQPASTIHPYQWPFGSFAGGQWPPALPTHPPTTGGWPPPLPTHPPNHHYPTHPTTGGVPSTKRTTPRPTSPARPTTTRRPTYPSYPSPVTTTTTTRRPVSGTSSEGLPLQCGNKNPVTPDQERIVGGINASPHEFPWIAVLFKSGKQFCGGSLITNSHILTAAHCVARMTSWDVAALTAHLGDYNIGTDFEVQHVSRRIKRLVRHKGFEFSTLHNDVAILTLSEPVPFTREIQPICLPTSPSQQSRSYSGQVATVAGWGSLRENGPQPSILQKVDIPIWTNAECARKYGRAAPGGIIESMICAGQAAKDSCSGDSGGPMVINDGGRYTQVGIVSWGIGCGKGQYPGVYTRRVMTSPRLFVLEDLFKFNNIVMDPLAEVYSLPFLLPKILEHPELVLAADAPDNSLMGFILGTRVEDATESFGDAKTMTWNHGHISALAVAQDYRKLGLGTRLLTTVRDMMDRQKDFYIDLFVREKNTIAIGLYESLGYVKYRWIPKFYADDHGYEMRLPLSSDVDRKSLEGIIIKKIYSFGNKLYYLLMFYIFGIIAIVIGGILVE

SEQ ID NO: 38815 - DNA, 2621 bp, DROSOPHILA
tgatctaatctgtgattagaaaccctgacagagtatactaaatttattgtttcgttaataatgttattaaagtttatagttattatgttgtatggctgcttcgtttttgtcaaagaaaaaaacaagaaacggttagcaaggaaattgaattctgaattagttttaatagcatgtatagcatatatattcatcttatggaacctaatcggattaaaataatggaaacactatagcacttgccattcctattaatacgttgaaattttccacagggattaggggttatgcaaatgaaagcctttagcgtgaccaattcgattacaatgtatttgaaaatatcgtagctactaatagctaaagtgtttagtttaactttaagtgcgacaatgacagctgagcgatggacgggaataggagtagttattatttaagcccacattcccgtagctgcggtttcaatcggtttacggctctattgccagtggtttgaccagggtgcagggttaatacccagtgaactttatccgactggcttgatattctccatggggggaggcaatagtcgatggggtcaccaataacgatttgctccaggggctgatgattgcctgtgacaccacgcgaactacccctggggattaattgggatttatttcgatggctccacgctttattatattttattaaatttatttatatatatttttaatatattcattgcttcattagcgcttgattactttttctgccaatgtcataaattaatatttataccatttttagaaggaagattaaaagtcaagcacacgataaaaaatcaattagccgtaaaaattaaatcctcatattttatttattaagaagttcctgcttaaccttttaaggcatttatactaaatatatactaaatttcttagcactaaaagttcttgaagaaacttaacaacttagcattaatataataactatataatacaatcctaaaaggagatggacgtatctaagcatgctcctgtttaataccacctatcaggtagtcgatgctaaagttactcttggtattctcctccggaactctccttgaggatactagcgggtggtcttcctgcttgaccagctgcttcagatgattcaaatagaccctggcacgcagactctgttcggcgatcttgaggtgctcatcggagcactccttgtactgctgttcgatctgcaggtcatcgaacttcttcttccgtcgactcatcctgcaggcaattgtgttcttgttgcggcgctcctgatccttcggtgaacgctccttcttcgggaattttcgcaccatattgacgtggtacttgaagatgtcttggatggcctcggttatgatggggctggcggattggtaggaaacgcttgaggatgaggatcccaaacgacgacgctttggcagtggaggaaagtcagcatcctgatcactgaaacccaagctgacggactgatttgccgcatcgaaaggactccgactggtgcagggtgtgccgctccgggagattagctcttccttcagctgcaaatcgcatttctcaatctttcgacccatgtcgaactttttgtggcgatagatctgatggtgctccattgtatggtatgatatgctatggttatgctatgtgtgttctactcgaagactctcgattgaatgctgtcctgtggattggtacactagcttatatggcgaaagccttatctgccgctcttcgtaatccccccacaacttttataactttgtttacacaaatcgacgacgaattttctttttgcaaaacgaaaacaagatcataaacccgctcgatttgcctgcgcacgcgtacatgccacccaatcccatacccaaacccaaacccaaaacccaacccatcccacttacctacttgtaagcccacccgttgggcatccctatctactggtcatgtttattcttgcgtgcgttcagctgggatcttttgaatttcagatacaatacaatccgagtttttccggatcagtaggtggcgaaatgcgcgcccatcgattgtctgggttcattcaattcgtgtttgttcctctttcaaatctattatctgctgtgtttttcaatgtcgccgccttttgtaaaagtcatatatatatatacatatatggattttgggctactcttgttcaattggcctctattcgaaaagtgttttgcggcctcatttgtccaactccctttgtatcctgctgttgataaggtgtgtgtggcactgatcttttgttttccgtttgtttccctttttttagatatcacttcttggaactcggagtgccatttctgggtttgcagtttaatgccgaagatgacgataagatgacgtctatttggggttgcaaaagggcacattcctgtagacagtctgcgtctgctgataacgtgcgtttatctcttttgtgccaggtcacttgataaatcgttgtaaactcagcgcatcttaaaacgatcctaaaaaaaaaagtattcgaaaattggcctgcgtaaaataacctacttatttgtttgttaagaactgaggttttccgaattagtataaagatttgttgtacgcgtatgactcatttcc

SEQ ID NO: 38816 - DNA, 621 bp, DROSOPHILA
atggagcaccatcagatctatcgccacaaaaagttcgacatgggtcgaaagattgagaaatgcgatttgcagctgaaggaagagctaatctcccggagcggcacaccctgcaccagtcggagtcctttcgatgcggcaaatcagtccgtcagcttgggtttcagtgatcaggatgctgactttcctccactgccaaagcgtcgtcgtttgggatcctcatcctcaagcgtttcctaccaatccgccagccccatcataaccgaggccatccaagacatcttcaagtaccacgtcaatatggtgcgaaaattcccgaagaaggagcgttcaccgaaggatcaggagcgccgcaacaagaacacaattgcctgcaggatgagtcgacggaagaagaagttcgatgacctgcagatcgaacagcagtacaaggagtgctccgatgagcacctcaagatcgccgaacagagtctgcgtgccagggtctatttgaatcatctgaagcagctggtcaagcaggaagaccacccgctagtatcctcaaggagagttccggaggagaataccaagagtaactttagcatcgactacctgataggtggtattaaacaggagcatgcttag

SEQ ID NO: 38817 - protein, 206 aa, DROSOPHILA
MEHHQIYRHKKFDMGRKIEKCDLQLKEELISRSGTPCTSRSPFDAANQSVSLGFSDQDADFPPLPKRRRLGSSSSSVSYQSASPIITEAIQDIFKYHVNMVRKFPKKERSPKDQERRNKNTIACRMSRRKKKFDDLQIEQQYKECSDEHLKIAEQSLRARVYLNHLKQLVKQEDHPLVSSRRVPEENTKSNFSIDYLIGGIKQEHA

SEQ ID NO: 38818 - DNA, 2501 bp, DROSOPHILA
caaagtgcctcttaaaaaaggcgacgacgacgatgatagcatggacgatttcgaaagtgacgaagaggattacatgtccagcggagaagattttgatatgggagccggcgaaaagattgttaagttcgcctcgacagcggaggttcgggaaatcgttcccgaatcggcatacaaaaataggcagggcaaaagttttgcgaataatattaaatcaaggctcggaatgggtatgtttgcttcagagcagaagtggcacagtcaattaatttataacattttttttagtatccaaacttcatgccacgaagaagacatacaacctaaaggcatcgcctgcaaggaaaccacaggctcgactcagtcctgttaagggcaagaccatacgcatgcgcagcgacgagctgtttagccgacaggacacggtgcccgtccacaggaggcttggaaaaaccgcgacctccgctccccttagagctccaccagctccgccacatcgacagccgcgaccggagccacagaagaaatatgttccgccaaggcgccataacagcatgaatgctggtcacagcaggcagcgagatcaatctggctctgtttttgaccgccttggcttcaataactctatgtaaagtttaagtaaatgtgagcctcattaaatttgccagtacatgtttgaattaaaatagaagttgatttgaaatgtatgaaatgaatgagaaatggcaggatttttgatcctgatctcattatttcagtttaaactcctgattgttttgaatacccgattagtatccatcgcaagctgtcagaacataaaaccaattgattaactttatgatgaaaaactatttattttgtttaaaattatatgtatctacaattacgctagaatttcgcattcgttcatattgtacaatctgtccgcggtcacttaaaggtctatatcactggttgctaagcaaatcactccgtttcgaatgtgtttatgtgcgcatcaagctcattgctgcagcagagcctggagggcctggcgccattccagtggccaggtgttggcatccggattgatgttgagcagttgacgcatctggagcacggcacgttgcttttgtagcatgtaagcgtatgcctggtgattgaagaccggcgaatgggtgaccggaatttgggttaccggaacttgggtggcaggaagcggatgttgctggtgctgcggtggcgtggttggtggtgtgggaggcaatgagtggtgatggtacaatggttgctcctgcatctgctgaacctctcgctccgtctcctggcgacgctttcgtggtgtattttcgctgagggcatatggccggaataggggcgtggcattggctgggttgggggcgatatccttggagctcttcttgccaaactttttgtgcgtatagccggcggttttgaacttcttgtgggtgtagctctcgccaacttccgactcgttgtggtaatccatgttcgaaggtgccatgattggggttttaagttgtgttgtttgttgagttgttttcacgacggctgttaaggctcgactatgctcctgctgctgcgcaaccaggtttttataccaacgagatcagaggtcctacctgaaaacactatcattaagagcgaacatgcgccctgtttatgggaaactcttcgttgacaaaaggttggcattgtcgtagggagaataaaaggatttcggcatacatccatacactacgagtacctgtgaccattgctggccgactactactacctgctcatctgaaagtcctttgtaattaatttttcatttgctgcagcgcgctgctcgcaccttctattgtgtctgcctagtccgtccgggttttcttggaaatttccctgccgactttctcgagaagcgttttctacctcgaaatctggccagcgcctgcgcttgccactctttgatgctgggccacgttgtctggacgcttcggaatctggattcttatctcgcttaccgctaatctgcctcattaagttctcgtccagggtatccgggtatacctttatgtaccttcggcaaaatgccagccgctgcttagtcacaatggtcattgaatggaaatttattgggattttcccgaatcgatgggtgcgcgtctggcctagtctgttcacgggatttcttggattcttttcttttttgtataatagtagagtcataatttatggaaaagcaagaaattttgtttataatatgtcactcactatatgattattatacattaattaaacattattttttgttggtttgcgatcatgaaagattggtaatgtagaaattaaaatattgctatatgaaatcagactataaggttttcattttatactttttcaaaactaaaccttcaaagtgaaaatcttgtgatataaacaatagaatattgctatactgcattatactataagggttataaccgactttaaatatcattagtaaagataatgttttatga

SEQ ID NO: 38819 - DNA, 501 bp, DROSOPHILA
atggcaccttcgaacatggattaccacaacgagtcggaagttggcgagagctacacccacaagaagttcaaaaccgccggctatacgcacaaaaagtttggcaagaagagctccaaggatatcgcccccaacccagccaatgccacgcccctattccggccatatgccctcagcgaaaatacaccacgaaagcgtcgccaggagacggagcgagaggttcagcagatgcaggagcaaccattgtaccatcaccactcattgcctcccacaccaccaaccacgccaccgcagcaccagcaacatccgcttcctgccacccaagttccggtaacccaaattccggtcacccattcgccggtcttcaatcaccaggcatacgcttacatgctacaaaagcaacgtgccgtgctccagatgcgtcaactgctcaacatcaatccggatgccaacacctggccactggaatggcgccaggccctccaggctctgctgcagcaatga

SEQ ID NO: 38820 - protein, 166 aa, DROSOPHILA
MAPSNMDYHNESEVGESYTHKKFKTAGYTHKKFGKKSSKDIAPNPANATPLFRPYALSENTPRKRRQETEREVQQMQEQPLYHHHSLPPTPPTTPPQHQQHPLPATQVPVTQIPVTHSPVFNHQAYAYMLQKQRAVLQMRQLLNINPDANTWPLEWRQALQALLQQ

SEQ ID NO: 38821 - DNA, 2741 bp, DROSOPHILA
tcttcggcctgaatgccggcgccggtggccaggaggcaatgctattcgcccaagaattgtacgaaatgtacaccggctatttcgagcacatgggctgggagtgggaggagtttgccagcgagggcaccgacatcgggggtctgcggcacgctagtctgatggtgagcggcgaggatgccttccgctggctgcgctatgaggctggagttcaccgcgtacagcgggtgccggccactgaaaagtctggacgcatgcacaccagcaccgcctcaattacagtgattccccgacccgccgacatccaagtgcacatcgctgagaaggatctgaagatcgagacgaagcgagcgagtggagctggtggacagcatgttaacaccaccgactcggctgtaagaattgttcatctgcccacgggtctggcggtggaggcgcaatcggaacgctcccagctcaaaaaccgggagctagcgatgaagcgtctacggtcgcgacttgtgcaacagcagttggagagcgttgaggctagcaaaatggccaccaagaaggcgcaacagggtagtctcaatcgcaatgagaagatccgtacctacaatttcgtccaggaccgcataacggatcatcgaattcaaggcggtacgctgcacaacctcaatggtttcctcaagggcggcgaccaactgagtggactaatagagaagttgcaactggaacatcgaagggaacgactaaaggagctcttggataggtgggagccaccaaaagaagctattgagaaaaactagagctactttcgtttgttactacatttatacgcctgtgttttagaggataattgtgcttttgcaacagaaattatattaaaagagagcaagggcagccatctgaatacaatgttaaagacactatttaatttgtaaatgttggttcctttttattataattgttgcccttcaattgtaaaaaacgacaagattggaatagaaaagattactttatttcaaccaactttcgcaaagtcagaggcactgcccatgtgcagaaggtgctccttgactgctgcctccagaatgtcccttatttcgcggcaacccgccatagcagtctcgatgacggtttccaagtgatcgatgtggaaccgctcactcatctcaagaaaggcgattttctcggcggtaggcaaggcagccacggttagtttcggtccgccggatacctcctcgaactgagagatgtctgtgagcgggatgttcgatttgctcagtgaggcggtgcaggcgacaatgaactcattgaggcagattcccgcatcaattagcgccagtgtggcggcattaagagccaccgcatagttggcgccgtcgtcttggagcacctccacgtatatgtctatctgggagcggggatatagttctgatttaatggcagcacttagcgcctgctgcaggtacaacttgaactccagagatttgcgatcgccgcgcggcctatttttgcgctccgccgtggagaaggttgcctgactgtactgacagttgatgacggactctgtctgattgcccttggcctggtggggtccatagacggcagccagaaccttggtgtttccctgctccatgtaggcacttccatcgggctgctcgaagactcccagtttgcacttgatgcggcgcaattcatgaggacgtcgtccgtccagacggaggccctgctcactgagcagatcgtatttaccagacatattttgaaactttagaaatacaattattttgattttaactaaatatcacacgtgcggcgggatttgtttacaattttaacaacagtgtggaagtactaaaaataccgacagtccatgaaaaaatcctttttatactaacttcttttaatatgtacaccgtacgtatgtaagagtaaataaataattaagcatatattgccaaagtgtactacattaaatcacgatatatagaaatttaataaggattttaataagattctttaaatttaaatttgaacagtgtttgctttgattacccctactacaacattttggaatttaacaacactaacacatggtctaatcgatatccgataaccgaataccgataatcgttcaggatttgtggtaactctaaaatatataaatagtttcgagtgcaaaaaacggaatttatgggaataaaataaataaatagtagctgaatcgtgtaagaatctgtgcttgccagcaccagaaatacgcaaaatgtccaagtcaagcgcaggtgggtttataacatcgtgaaaacgaaacaaactgaacagacgcttccgggtgcgaaacaaaaataaagacctaaaaaatatcacacactttaaaaataatgaactcaccaccgaaaattacagcacgctgggtaaaattcttcaatgcggccggcatcccatctcctgcggctgccggctatgcccacgtcttcgtggagaaccgcatccaggacgacatgctgttggatcttaacaaggagtatctccgggaaatgggcataaccttgatgggcgatataatcgccatcctgcggcactcaaagaccgtctgcgaacagaatgcccgggaacaggtcctcacaacggaggtggttcaatcagttgtccgaccggtatcgccaaaacccaaagcgccggttgcaactccaaaagcaaaggtttatccgcctgcgaaacctgcaagacgggtgcttccggagcacgagggcaag

SEQ ID NO: 38822 - DNA, 741 bp, DROSOPHILA
atgtctggtaaatacgatctgctcagtgagcagggcctccgtctggacggacgacgtcctcatgaattgcgccgcatcaagtgcaaactgggagtcttcgagcagcccgatggaagtgcctacatggagcagggaaacaccaaggttctggctgccgtctatggaccccaccaggccaagggcaatcagacagagtccgtcatcaactgtcagtacagtcaggcaaccttctccacggcggagcgcaaaaataggccgcgcggcgatcgcaaatctctggagttcaagttgtacctgcagcaggcgctaagtgctgccattaaatcagaactatatccccgctcccagatagacatatacgtggaggtgctccaagacgacggcgccaactatgcggtggctcttaatgccgccacactggcgctaattgatgcgggaatctgcctcaatgagttcattgtcgcctgcaccgcctcactgagcaaatcgaacatcccgctcacagacatctctcagttcgaggaggtatccggcggaccgaaactaaccgtggctgccttgcctaccgccgagaaaatcgcctttcttgagatgagtgagcggttccacatcgatcacttggaaaccgtcatcgagactgctatggcgggttgccgcgaaataagggacattctggaggcagcagtcaaggagcaccttctgcacatgggcagtgcctctgactttgcgaaagttggttga

SEQ ID NO: 38823 - protein, 246 aa, DROSOPHILA
MSGKYDLLSEQGLRLDGRRPHELRRIKCKLGVFEQPDGSAYMEQGNTKVLAAVYGPHQAKGNQTESVINCQYSQATFSTAERKNRPRGDRKSLEFKLYLQQALSAAIKSELYPRSQIDIYVEVLQDDGANYAVALNAATLALIDAGICLNEFIVACTASLSKSNIPLTDISQFEEVSGGPKLTVAALPTAEKIAFLEMSERFHIDHLETVIETAMAGCREIRDILEAAVKEHLLHMGSASDFAKVG

SEQ ID NO: 38824 - DNA, 2930 bp, DROSOPHILA
ttgcaatagattcttttttttaaatattatctcattttaaaacttcttttttcccccagtttgtcaatgaggtagtaatcggagctccctactgtgtcactgaagagctgcttgagcacttcaaaatcgatgttgtctgtcatggacgcacacccattgcgcttgagaatggcaagatcgatccatatgccgttcccaagacgcgagccatctttgagctgatcgattccggcaacgagatgaccacggagcgcatcgtggagcgcatcatctcgcaccgactggaatatgagcgtcgcaatcaggccaaagaaaagaaggaaatcgaagcctttgaggcacttcaacgccaaaaacagacccaaaaggccggctagccggaaccagattccgacctctcacactagacggatgttttttattttctagttgcgttcttttagtttgttttatttagtttgtcttgtttagtatgtcgtcccctgatgatggcgctttaattttttgttgcgtaaaaagcgaagcgacgctgcctgaggattcagcgcaccgctctctcgatttctagtacaattttagaatatctgcacatgcgccttaatgatataaggttatacacataattatatatttctaacacattaacgtagaatatttaaaatctaaattttatgtatgtaagctcaaaatttgtaaattccctttaaagtacgatgtaagtgtgaggaacaacaaaattgtacgaatagcatgttatccaaactgttgccgaattgaaaagccttgtacgacttgtatgtatatatattcagcaacggaagtaggatgcctggatcaggaagtagctgcttttatcaaatgtaatctctgatactttgtcctaatttattaatgcatatagtaagtgcgagttcaagttttatgtttccttgtttaatcttagacttaaatacatggccaaaaatattgcgaattccaaaaaaaaaaaaaaccggaagttttatatacttgcctcgctaatcactttcagttcgacggttagcgattgctgccaaacatctaaatccattagtggccggaggtcattcaagctgatgaggatcacgttgctgtcggtcttgatgaactcactgcaggattggttcgacgacagtggcagcattggacgagcttttatctgtctggtgtagtaacgtggcaggttggcaggttggaccagcaggcgcagagtgatggccacgccgtgcaaaggagtagccacccagatggccaggacttcgtgtttgacacgcttcctttcccacagcaccgagtgcatggtgcggcaggcgaagatcataagggcgctatgctgcgagaagcggcggtactccactggcagatgggtgtttcggtgacatttcagaggattaaggccagtgcgccgatagccatagacccccagcagggtgttgacatctctttccaggctactaatatgacatgttagtgacactcgcttgcccatttccagttcataaaacggaactcccattcccggcagatggtcactcaaatagtgacccaacagagcgctggggtcaaccgagcataggcatccgtgacatgggcatgccaccaggcgcagtcggctccacggcgaatcgctagatgtggtcgcagtgctcttcctgctgctggacggctgctcggtcagcgattcgaagttctgcagtttgaggagcagctgatcctcgggagctggcgcggccaccgatgccggcagtctgtagttggaaaagtgtttcgtgtacagcaaatcttgcatttcctgcaggcgctgctttcgcctctcctgacgctttcgattccggctcaatccatggatgggagattgatctttgccggaatcggcggcctggttggtacgcgaggtaaatggcgcagtcattgtggtaggtaatcaggcttgccaaaacgacataattttgataagaaactagacagatagacagatactagcaacttttgaaagtctactgtgttgacaagtagatccttttgattttataatagttaaatatttattattcagttgggccgaaatcccggcggtactgcaataccgggccaacccgcgacagaggtggagcaagcccctagcactccgtctgattccaaaaatcagtttaacatttgttgtcctccaatggaggaactatcagatgttaagctgataagaacagatactacactttgatcttagccataaggccgagaagcgataacttgaaacggaaaacgaaaagggtctccatgagcaaacggccagaagcagttgggaattgtagcacacacaagaatgaattcggggtaggtcagggatgatagaacgtagagtacggtaaaagtgggtcaggtaaataaaatcaaacgatttactaaaaatgctttttagaattcgatgataatataagattaattcaagtaagctacacatttttcatttaaaggcatcacttaaaactttattattacattcctttcacttaaagtgcgtgggttaaaacacttagaactgtgtaaataaatatttttatatattagtaacgttttaaaatacataatttactaccagaaataaggcgaggtatatttcttcttgactggatctcctttgtccatctatctcctggaggtcttagagaggtagggctggatatgaattgaaatcctggcaaagactaaaatttcaatggcatggggtttacggtggattcgcagctgtgtatggtgggaaatgccatattataaaacattaatatattatattgagatatcaacaccagtaatgggttctttagtactgatattctttattctaacactgccgtacttctcctttaggtacttttgcacattggtattgtacttgcttcggggattaactt

SEQ ID NO: 38825 - DNA, 930 bp, DROSOPHILA
atgactgcgccatttacctcgcgtaccaaccaggccgccgattccggcaaagatcaatctcccatccatggattgagccggaatcgaaagcgtcaggagaggcgaaagcagcgcctgcaggaaatgcaagatttgctgtacacgaaacacttttccaactacagactgccggcatcggtggccgcgccagctcccgaggatcagctgctcctcaaactgcagaacttcgaatcgctgaccgagcagccgtccagcagcaggaagagcactgcgaccacatctagcgattcgccgtggagccgactgcgcctggtggcatgcccatgtcacggatgcctatgctcggttgaccccagcgctctgttgggtcactatttgagtgaccatctgccgggaatgggagttccgttttatgaactggaaatgggcaagcgagtgtcactaacatgtcatattagtagcctggaaagagatgtcaacaccctgctgggggtctatggctatcggcgcactggccttaatcctctgaaatgtcaccgaaacacccatctgccagtggagtaccgccgcttctcgcagcatagcgcccttatgatcttcgcctgccgcaccatgcactcggtgctgtgggaaaggaagcgtgtcaaacacgaagtcctggccatctgggtggctactcctttgcacggcgtggccatcactctgcgcctgctggtccaacctgccaacctgccacgttactacaccagacagataaaagctcgtccaatgctgccactgtcgtcgaaccaatcctgcagtgagttcatcaagaccgacagcaacgtgatcctcatcagcttgaatgacctccggccactaatggatttagatgtttggcagcaatcgctaaccgtcgaactgaaagtgattagcgaggcaagtatataa

SEQ ID NO: 38826 - protein, 309 aa, DROSOPHILA
MTAPFTSRTNQAADSGKDQSPIHGLSRNRKRQERRKQRLQEMQDLLYTKHFSNYRLPASVAAPAPEDQLLLKLQNFESLTEQPSSSRKSTATTSSDSPWSRLRLVACPCHGCLCSVDPSALLGHYLSDHLPGMGVPFYELEMGKRVSLTCHISSLERDVNTLLGVYGYRRTGLNPLKCHRNTHLPVEYRRFSQHSALMIFACRTMHSVLWERKRVKHEVLAIWVATPLHGVAITLRLLVQPANLPRYYTRQIKARPMLPLSSNQSCSEFIKTDSNVILISLNDLRPLMDLDVWQQSLTVELKVISEASI

SEQ ID NO: 38827 - DNA, 2579 bp, DROSOPHILA
gaaacacggaataaaattgtaatttatttcagttggatttaattatttaatttataaacaaatcagcatagcgaacgaacaaagtgcttgcaaaataattaaaacacggtgacaataagatccgcctttatatttaaataatcatcaatgaaatcatcatattgttgtccgcgattaaaaattgcgcagataaataaatcttaatatactaaattatttacacgaatagtgttttactaattcatttatatatatgatatatgccgtatacatgtttgtacgaagtttatttaactctttaaatatttttaaaggcgtgttttactacctaaactaataaatggattaaatatatttaattcacctctcaagacttccatgaatgcaattccttctccgtaaactgaaatcgcatctgtcagcagtctttaaaaatccttgacacttttttctaaccaccgaccaggacatataatgccatgtcattctagaggaaaagtgttcggcaaaggaccctcgagaatttccagggaattaaaacaaagtgtgctgaggaaccaggagccaaagggaccacacacggtgccacaacaaattgtgtcatgcaggtcaataaaaaaatgcatcgcctgcataacagttgttcggtccagaactttcctgttccggtggccacatttgtccgataatccaggtaatccacacaccaaaaaaaggataatgaggcaatcctgcgacgacaattagcgctgtgatagagcaggtcataaaatatgctgcttaatccaggacggagattacctaatgcggaatggatgcgctaatccctttgttgacagacccaaaacaaagggatttccctatgtggctacctgtaccgcctacctactgtgcttataaccaggatatcaatctcgaagccaatcattcagcaagcgatcgtccaacgagtcacatcatcaccacaactcattcggagtcatattatcgaaatacaaaaatggagaactcatcgagctacacccacaagaagtttgccgtcagcaagcggaaacgggaagtggaccatgacaaggagaaccaaactcagcagtcggaacagccgatcttcaagcgccgtcagacacagggattcttccgaccttggttggataatgagcagaaccaacaggcggagaaggagacgtcaacggcggcgaaacccagtggcccaggatcctcggtcagccagtaccgtgccaacatggtgcgccgcagtaacaccaatcgtcagcgaagccccaaggagcagatgcgccgcgatagaaacacgctggcttgcctactcagccggcgggccaagcaggcacaggaggagcaagtgggtcagcagtacgagcagtatcggagtcatcatgccgccatgctggaacagcaggtgcgcctcagtctatactaccgccacatcctccaacaggcggtgttccagcgtgccataaatccggcaccgggtcacatcctgccgcagcagcaacaacagttcctccagcagatggccctctcccagcagatgctcatctttggtggccagcactgctgaccgtccaaaatcatatcataatcagcgactatggatagcccaatcatgtgatttagtttattaagccttaattattaatatttattgttgactttgaaataaatcaaaagttatgcatttaatttaaattgccggttttgttaactgggggttatcacttggaaaattcgaaatttaatctaaaatgattgttaaatttgttaggaggtcagtggatcgcaaccattacatttttttacatatgtataataatgctatatatattaggattttaaacatctttaagttaacccaccggcttgaaaaatagtaaaattatataaaatgattaagagatcaattatcatttctaatttaattacaacctaatcgtgatcataatatataaaatttatggtataatttttagctcaataaaactaaaagtactgctatcaaaagtagattatctattatttgatatgacttttggtaaaaaagggctcaatcaagggctcaaaaaccacttactccagtgacttgtctgaccactggagtaagtgagtcatcgaagcattgacagatttttccgagaaaccatttacccagagtgccattacccagcaaagttcaactaattgttgtctagctaattttcatggcgttctcatttcgtggcggctttcgtcaaggttcaaacccgccacaaagaaccacattttggactgggccaagctttttggcatcgccttcaacgcggtggattgttggctaatgatattgacagagatcggatgtggcgatatggagatatagacaaagtccaagcaaagcttcaagttcaattggccagtgagacggagttttgcaagcacacacagctcgaagcgcagaaatgcaattttcaatgttaggccagttggaaaaaaagaagaaaaaagccaaaaacaaaaaaaccaaatgcagccacaaaaaaaaaaactcaacaattaactgaaattgatgtttggctgcatggtac

SEQ ID NO: 38828 - DNA, 579 bp, DROSOPHILA
atggagaactcatcgagctacacccacaagaagtttgccgtcagcaagcggaaacgggaagtggaccatgacaaggagaaccaaactcagcagtcggaacagccgatcttcaagcgccgtcagacacagggattcttccgaccttggttggataatgagcagaaccaacaggcggagaaggagacgtcaacggcggcgaaacccagtggcccaggatcctcggtcagccagtaccgtgccaacatggtgcgccgcagtaacaccaatcgtcagcgaagccccaaggagcagatgcgccgcgatagaaacacgctggcttgcctactcagccggcgggccaagcaggcacaggaggagcaagtgggtcagcagtacgagcagtatcggagtcatcatgccgccatgctggaacagcaggtgcgcctcagtctatactaccgccacatcctccaacaggcggtgttccagcgtgccataaatccggcaccgggtcacatcctgccgcagcagcaacaacagttcctccagcagatggccctctcccagcagatgctcatctttggtggccagcactgctga

SEQ ID NO: 38829 - protein, 192 aa, DROSOPHILA
MENSSSYTHKKFAVSKRKREVDHDKENQTQQSEQPIFKRRQTQGFFRPWLDNEQNQQAEKETSTAAKPSGPGSSVSQYRANMVRRSNTNRQRSPKEQMRRDRNTLACLLSRRAKQAQEEQVGQQYEQYRSHHAAMLEQQVRLSLYYRHILQQAVFQRAINPAPGHILPQQQQQFLQQMALSQQMLIFGGQHC

SEQ ID NO: 38830 - DNA, 2555 bp, DROSOPHILA
aatgcaatcgattctctgcgttccagaacagatgaaaattgatcaatataataaaaggaaaacaatcaaacaatacgacaatctttcactgtaatacttcaactgaacaaataaccaactcccactccgctcctgcttattgactttgggattcctcgaggagggctcgtctcaagcccacctgaaataaatccgcttaggcggaggaacactgaaatgtgagaaccatctaccacatatacattcgttccctgacggcataaatcaatggacaatggaccattgaatgaaacggaaaaatccgacataatgccaaagacacgaaaccagggagcagagggaggagcattcagtaattgccggttttctaggtttgctagtatgtacatgtaccgggagattcagaaactccgagacggtttttcttcagctgtccaagctgaaagtcataaacgcttgttgttcgaatcgagatcgggcattgaaaactgcagcatgtctgctattcaggtgccacaaagaaagccgaaacaatagcgggtcggccggcagacagcctggacgaattgagcgccaggattagagattacacagggatcctctacacagagatccctttttcgggcccgacaacaggtaatttcgtcgaaaatcgtcggccacgtaaacagacgaggcaaggacaacaactggtttatgacaccctttgagaagattgccagcctgcggattaggaactccctattcccaattcaggtaacagcagccgattagttttggtcccatttttagggaatgaatgaaatgcgttggggaaatacctgatccgttttaccgtgatccccaggtacgtgatgggaaaatctttgccatttggccattccgttttcgtgggaggctctgcaagttacctaatgttgcataaaacggatggccaggaggaggggcagcacagtcgtctcgaagacagcaaagcgaacaccactactcttaatcaagaatggataactataaccacaagaaattcactggagctctgaagcgaaagcgcagcatggatgcggactctgatgacgatgtggtcttcattatggaacagccgggccaacgcactccagagcagccgcagcctaagcgtcgcttcttccgaccctggatggatgagtctccggaagaggagcaaccacagccgccacgtaagattgtggctacatcgacaccgccgccacaacaagtggatggcacctaccacgctaacatggtgcgcaatcaccacaagcgccgccagcgcagtccacaggagcaactgcgtcgggatcgcaacaccttggccagcctgcgccatcgacgctcccagcagcaacagcagcagctcatcgaacaacaatacctgaccagtcgcattcagcacgaggccaatctgcagcagcagatccgcctgagtctctactatgtgcgcttcctgcagcaggcgatggcctccacggagccactgcctcccacacagccaaggcacatgatgccgcgccaacagaccaccacccagcatccttgaagggtggacatggtgcaacgactgggcgctgctcaatgcgccctaacttattgtagaaaagctgaatagtgattgtgattacttttaaagtttaatttatttatctggttgactaaacaataaacacactaattgttatcgaaataacttgtaatttttatagaattttgtaataattggtttttagttggtttctgattgattgaaatctaactcggggtcttatttattgaatcttatttggaagtctgatatttcttttccgccgtttaacatcatgaggatttgttctagaccaaaactgaccggaagcatcagctcataagagttacctcacttggtttttctgccattatataacattaaatacatcttatgtaattaatttcttggaagcgcaatttgcaatgctaattaaggtgtgaagtaattctagtgattcacatagccagactacagtgagaattgaatcgattcggcacgagtgacatattgtgggaaacacggaataaaattgtaatttatttcagttggatttaattatttaatttataaacaaatcagcatagcgaacgaacaaagtgcttgcaaaataattaaaacacggtgacaataagatccgcctttatatttaaataatcatcaatgaaatcatcatattgttgtccgcgattaaaaattgcgcagataaataaatcttaatatactaaattatttacacgaatagtgttttactaattcatttatatatatgatatatgccgtatacatgtttgtacgaagtttatttaactctttaaatatttttaaaggcgtgttttactacctaaactaataaatggattaaatatatttaattcacctctcaagacttccatgaatgcaattccttctccgtaaactgaaatcgcatctgtcagcagtctttaaaaatccttgacacttttttctaaccaccgaccaggacatataatgccatgtcattctagaggaaaagtgt

SEQ ID NO: 38831 - DNA, 555 bp, DROSOPHILA
atggataactataaccacaagaaattcactggagctctgaagcgaaagcgcagcatggatgcggactctgatgacgatgtggtcttcattatggaacagccgggccaacgcactccagagcagccgcagcctaagcgtcgcttcttccgaccctggatggatgagtctccggaagaggagcaaccacagccgccacgtaagattgtggctacatcgacaccgccgccacaacaagtggatggcacctaccacgctaacatggtgcgcaatcaccacaagcgccgccagcgcagtccacaggagcaactgcgtcgggatcgcaacaccttggccagcctgcgccatcgacgctcccagcagcaacagcagcagctcatcgaacaacaatacctgaccagtcgcattcagcacgaggccaatctgcagcagcagatccgcctgagtctctactatgtgcgcttcctgcagcaggcgatggcctccacggagccactgcctcccacacagccaaggcacatgatgccgcgccaacagaccaccacccagcatccttga

SEQ ID NO: 38832 - protein, 184 aa, DROSOPHILA
MDNYNHKKFTGALKRKRSMDADSDDDVVFIMEQPGQRTPEQPQPKRRFFRPWMDESPEEEQPQPPRKIVATSTPPPQQVDGTYHANMVRNHHKRRQRSPQEQLRRDRNTLASLRHRRSQQQQQQLIEQQYLTSRIQHEANLQQQIRLSLYYVRFLQQAMASTEPLPPTQPRHMMPRQQTTTQHP

SEQ ID NO: 38833 - DNA, 7714 bp, DROSOPHILA
ccatcgcaccagacgcgcacatccttccgctgcttgtccgaatacccattgcaggcgctggtatcgccatttgcctccatcgttgacttattgaattttcacaatttaatttaattttaatttagaatccggctaacgggcgaacattagattccggagagtatgtttctgttttcagtgctcgttttgaaggcggaaactcgacgacagcgacgttcacgcttcgagagctgtaagttatttgttctgagctacgacgacgcccgctatatatcaattcccatttcacgaccgagctactcagttcagttttcgttatcggtttcggactcggattcacgttcagactcggagcggaattggtctcagattctcagacttgcgttatcagcgcgcgggcgcatgggaacttctttggggcgtaagtgcggtgtgtttagcttgggtttttttttagattctttcatttcttttctcacaatttcgagtaccgtgagagcagagtggccgcatcggtgtttgtccaaatataccatatgcctggtgcgatgaataccagctaacgcggattttgtaaacatcaacagctgatcgagatatattgggaataactttaaattggcaaattttatgttactaagctagaacttttatattaagcaagtacaaatctgtattattatacgttaaaagggtattaactctattaaatccttatgagtcgatcaccccaatgaaatgtataatattttaggatataacaaagtgttttgtttataaataaatgtaaatattgtcacaacaattattaaaaaaaaagtgtcatagaattaaacaacgaacactactaataacattcacaattaaaattttttttttcattttaaaggtatattttattgattgatcccactgtaaaaataataccgatggtattttaagaggcatattggccatggcgatgtgagataatactacggtgtttcccacggtcacacaggataaagcaacttaaaatattaagcctatcaaataagaaatatacaacgcacagcacgcagatatacgaaaaataacaatcgaaggaaaccgaccaagccatgataatgtaatcatgatcgtccacagtcagttcgggcattgttttgtagacagcatcaagtatattttttaaatttcacgtgctaaatttacaagaaatcctaccacaattactaaacgagtcgacgagggctagataatcccaatcccattccccgtaccaacgcgatgtccagaagagaagccagcctgatggcctacgtagcggcggaggaacacctactgaaccggtactcgccgctggaaggcgacgagatagatacggccagcgaagctccaggcgacgcatcggacgtggctgaggatcgggagtatcccacggatcttgttgcatctgtcaccagatcctcgaggacgggagcagatctggaccccgccgtggacagcaacctgcacgtgatctccgacgactcggacacccacagctttatctcgagtggcagcggcttcaagggctggccggaggagcagccgtcttccagtttcgtccctcagaatgaacccttaatattcggacttcgccggcaaatgatgatgaccgaagagacacaccaagccccagtatgggccacctgcacaccggcaaaacgttcgtacagcagccacgaggtcatcgagatcaacggtttgttaatctgttccattaactatacaaggaaatctcttccatttaattgattatgaacatttatcccaattgaaaatatgaaatatctaatatggtaaactcactcaatcgcatacttttcttgttttttagactcacccgaatctgtccaggatccgggcattgcactaagccccggcatgctgctgacaaatggcaatgttgaccagttcgaaatgctgtcccacgagaatgatgaggctgaacatgaacttcaggtggccgaagaaggggagcagtgtgtgatctatgaggctgtggatggagagaacatggtcgttttaggagaagaacactgctgtgagatcatagtagctacccagggagtggcatgcgagcaggagttcgccagggccatcatgatggccggaaacggtaccggtgcattgctgggcttgctgtccgaggagagtgatgcgaatgagtgtctcaatgggactgcctacatcgaggaggtcgtggaggatatgggtgtggccgaggcacgattggcggctggaaacaatgtgtaccttagtgatgcagcgctagaacagcctttagtgcaccaggatctggtcgacgacgaggctccggaggaaaacgaaaacgccacattcttagacgatacaccgatggaggaggaacgcccagatatttgtcaggtgtatgatcacgaactggaggaccacgacgatgaagaatgcgaggacgcagtcatccaggaagaaccagcccagcctatcgacattgtagcattcgagggacaggagccgctgccaaataatccgcaaagaaagttgcttcgcgaacacagcagtcccacggaatttcccgtcagctcatcctccatgcccaacgccagtgaccactacgactatgaggatgagttaacgggcggccgctctccatccaaagtggctccactgaagcgaaagtatccgccgctgatgaagaatacgctccatggagaggctatggatcgaagactggcaagcatttgtcaggctcagccgcagatgagtcccgccgagaaagtctccaactgggaaacggcacccagggaagagtgggccgatgtcgaggatgtggaaggctttgaagctgccttcaagcaatatgaggctgttaccgcatcactcaaacagcttaactttgccgaattccgtgaagcactggtccggaatatggagaagatcagccgtgaaatcatgcaaacctcagacgaatccactcaagagcttgccagctctcagtcggcggaacggccggtgtatcgtcgctatttgcacattctgcccaccgaggagacaattgtgctagatgatgatgacgacgattgctacgaggtggtcggcatggaaaaagcctctgtcaccacattgatacccgaagaggagctacaggataatcaacagccggaggaagaagagatagtgctgccagttgttgatgacataaagaacacggattcaccgaatttcgagcagcggaaccttaccaaggaaacatctacagcagacttggagagaagcgcgcttactcaaacggcgggttcatccgctgcgaatttagacgcatccttatcccatgctcaaccttgtccaactgctccggcaggacttactgattttatgcaggcgaacttaagcgaccgtgggccatcagaagaccaacaactaaccaaagctgtattagatgttatgcgtcagcaggtgcaaacaatgcaacagcaacagcagtttatggagcaaaagatgaaccaacaaccacagatgtatcactacgaggaactgccacaggctccccaacgtaagactttttatttgtattttattgcaaatttaattggttaatttaaattacagagatgcaaatggaagggaatcaggggccttacgttaagtatccgaatgagcaacaggaattctgcaactatctgggtctcaccgaactgtcaacagcaaatgccgtggctaccgcaatgagggaactagccaacagcactatccctcgccgatcgctgcgggtgagaccacaacagcaactggacaggatgcgtagtgatgtgcgtggcaagcggcgcgaaagggagcgagataggcagcaggataaggacaagaagataccgttgaccacaagtagtgagcttagcaccgataaagaagaaccctccccgcctcagacatcagaatccgtttcaaggatggcgggggatgcggatgtccatttcaactctcaaatgcctgcagagcataagcgaaaactgaatcacttgtacaactcttattttgcggaagaggaagaatgctctacgaagaggtcacccaaaaccaccgactttatagccagttccaagtccttaaaggatgtagagaggcgtccatcgctcaaaggacaggagccgcaacgtcatagatccatcattgatggcgacggctatcagaaacatcagatagacaatgagtctgagaagggtcgggttcagtccgttgaggcggcttttactaagatcttcgaggctgccgcacctgcccaatccaagctgctggagagcatgcagcaacgcttgcgccaggcgcgtgagacgaagccatcaatttatattattaaggctacaagcaatgcctcgcccccgaatccatcacacagcaggcaggagtctcacatctcaccggcgcccttgaacttaatcggcggctttggtgacgtaagcgcgccgcatccttctgtcatttcccagccagcgaagaaaagtcctacaataaccagtccagataaggaaactccagcccccttaccagttgatacacccaaaaaatcaaaacataggaaaacccatggagccaccaaacctgttgccgctacaccacgacgccgcactacaatgggtgcatccagtctcgggaacgaagcacgtgcacgcgatttggttacccgctccaccacgcatcttaattcgaagctacttcgtagccgcaaggttagtctgctcaagagctacgccctgtcggacgaaatggctcagggacgatcgaaacggatggctggcggtgcagcacaaaccaccaaaaaggctccaatgcccaaggcagcacggacgtcgttaaagaagccggcagataaaagtcttcctgagcaacatcgcttggagcaacagcaattggctccgccaaactctccccgaaagatgaaaggtgtcaaggagactgaaactgacacgacaagtgcaatgaaatctagtcgccttactaaacggaccaagcgagcacgagccaagtcactgccttcgaatattgaaagggtgactgagcctgtggcagccgttcctaatgccaatgtattgaggctcgctgacctggcaccagaagtgcccaacacattcgcgcctacacacagccatctggtcaactccacagccaaagaagccgctgacaagaccttcgttcattccccctccgtcgctcaatcgccttatgcacagcccgtgcttatttacccgccatccccaacaacaccgccaccgaatacggagccacatcgccctcgccagcaagccggaaaagtcaatccagctgacttagtcctggccacccctcctgggggcctgctgcgactcagtcagggatccgcgacgctagcaaatccactttctgccaagcacggccaggttctctatatgtactacgagctggaacagctcattgtgctgcaggagaattgcattaccttctggaagtactccaaagtgttcaacgtgctgcatcaaccgcgacataatccctcctttgatggcgccagaaaatctccatctccaaagctgcctcaaacaccttcgcgcgagcccaaagacgtcgagcaggagttgaaaatgggcccgcgatgggtttacctgggcagagtgcggcgcctgactagcggtgggttatgatcatttatacactttacgaatctttctagcctctttgatgcattacagagaaagagatctttacgccgtttggcagccgcatttgcgtgcacaattcgacgccggtgtacctggaaatgcgaagcaggccgctggaccatcacaagagggaggtgaagctaacctcgctacatgtgaatgtgtattacttctgcgaggaggaactacgaccccgtatgcactctgtgcacttggatgctgtcaattggtgaggactatcacgcagtatgcataaattcaatgacgtaacctacaactttcgttatttagcgaatggccgcatgtcatatacacaactatagcggattcgcgttacttcgttatggcatggcagcaggaactggtgatgggcaagtcgcgctcgggcatttgcaaatattcactgacgcccacgctggatacgctggcctccatacgggagtttaagcagttgcgccacgagctgcgtcacattgagtgcctttcagaggatcgccttatcggctacggccagatgcgcatcaccgtctgggatcatcgcagcggcgatactctgatgaactacgacttgggccggccgctgggccgttgcctggctgctacgcactatcctagcctcgacttggaccaaagcagcatgctggtgctttatcagctgcttaaagaaccaaacaaaccgtctgaggtgcatgtgatcgcctgtgagctttcccatgccacgccctcgcaccgcctgctgcaggtccaccgcttaccatcgccgcaattcgacgatgccacggagggcgttaacaccggtgatcatctgatcatcaagtcagcatcgaacgacgaagcctggataagtgccgccgatccgagacagctaacctatttggcgccgcaaatcaatggagctcagcgtttttatgcccgccacaagtcccaagtgatcgagatgtccccgcaatccctaactgtagatagtatcgccaatcacatgttgaaattggctgtccagcagacccaatcggcgtagacctgtgtcgcggaactagaaatgtggagagtctcggccttgaacaaagtttttgtttttttttttcacacaaacccatgtttgaatatcacccagaatacccgatctataaatgtgcttttggctgtctgcccaagtatagttcaaatataggaaactataataagttgcgtgttaagccctgtagtcctaacaatcattttagtcgtaagtaagtcggagagtagtagcctttattatgcgctattttgaaataagtgtttttgtttctttcgttctttttattttttctaaaagaaaaacaaaactagcttaagctatcgtagttttaggcatatgaattcaactgtttgatttgctactatcgactgaagtagtaaatttgtcatatttttaagattaatggaaacaccaaaatggaaagaaattaatgtcattaaaacggaaatctattaaaaatacaacgtttttgtttgcatcaattgcatctagtcgattcacagatatgttgtcatccacaataatttggtttataatactcgatcacggatttcgagactgcctttggactcgcatcctaacgaagttggttttttacttcagttgaatcttgattatatggatgagccggtcaccgagatcttcgtgtattggagtacaagggaaggttaatcctataagatctcaggggtaaaatcatagctggctcttgagtattaatgataaaacgaaaatgcctttggtttttaattatagttcgtatattttaaactaattttgtataatatctaatcaatttcaactactctgttgtcgatcaattccgactgtctaccctataaactaacttcttaaaactaatcattatttacgattttgttagtctctaagttctaagtttttatatacagaagttttacttacatcaaaaaagtaaaatccatcgaaaaaattgtgaggtggaccaaatatacaattagaatgaacgcgaatgcgatgc

SEQ ID NO: 38834 - DNA, 5226 bp, DROSOPHILA
gataaagcaacttaaaatattaagcctatcaaataagaaatatacaacgcacagcacgcagatatacgaaaaataacaatcgaaggaaaccgaccaagccatgataatgtaatcatgatcgtccacagtcagttcgggcattgttttgtagacagcatcaagtatattttttaaatttcacgtgctaaatttacaagaaatcctaccacaattactaaacgagtcgacgagggctagataatcccaatcccattccccgtaccaacgcgatgtccagaagagaagccagcctgatggcctacgtagcggcggaggaacacctactgaaccggtactcgccgctggaaggcgacgagatagatacggccagcgaagctccaggcgacgcatcggacgtggctgaggatcgggagtatcccacggatcttgttgcatctgtcaccagatcctcgaggacgggagcagatctggaccccgccgtggacagcaacctgcacgtgatctccgacgactcggacacccacagctttatctcgagtggcagcggcttcaagggctggccggaggagcagccgtcttccagtttcgtccctcagaatgaacccttaatattcggacttcgccggcaaatgatgatgaccgaagagacacaccaagccccagtatgggccacctgcacaccggcaaaacgttcgtacagcagccacgaggtcatcgagatcaacgactcacccgaatctgtccaggatccgggcattgcactaagccccggcatgctgctgacaaatggcaatgttgaccagttcgaaatgctgtcccacgagaatgatgaggctgaacatgaacttcaggtggccgaagaaggggagcagtgtgtgatctatgaggctgtggatggagagaacatggtcgttttaggagaagaacactgctgtgagatcatagtagctacccagggagtggcatgcgagcaggagttcgccagggccatcatgatggccggaaacggtaccggtgcattgctgggcttgctgtccgaggagagtgatgcgaatgagtgtctcaatgggactgcctacatcgaggaggtcgtggaggatatgggtgtggccgaggcacgattggcggctggaaacaatgtgtaccttagtgatgcagcgctagaacagcctttagtgcaccaggatctggtcgacgacgaggctccggaggaaaacgaaaacgccacattcttagacgatacaccgatggaggaggaacgcccagatatttgtcaggtgtatgatcacgaactggaggaccacgacgatgaagaatgcgaggacgcagtcatccaggaagaaccagcccagcctatcgacattgtagcattcgagggacaggagccgctgccaaataatccgcaaagaaagttgcttcgcgaacacagcagtcccacggaatttcccgtcagctcatcctccatgcccaacgccagtgaccactacgactatgaggatgagttaacgggcggccgctctccatccaaagtggctccactgaagcgaaagtatccgccgctgatgaagaatacgctccatggagaggctatggatcgaagactggcaagcatttgtcaggctcagccgcagatgagtcccgccgagaaagtctccaactgggaaacggcacccagggaagagtgggccgatgtcgaggatgtggaaggctttgaagctgccttcaagcaatatgaggctgttaccgcatcactcaaacagcttaactttgccgaattccgtgaagcactggtccggaatatggagaagatcagccatgatgatgacgacgattgctacgaggtggtcggcatggaaaaagcctctgtcaccacattgatacccgaagaggagctacaggataatcaacagccggaggaagaagagatagtgctgccagttgttgatgacataaagaacacggattcaccgaatttcgagcagcggaaccttaccaaggaaacatctacagcagacttggagagaagcgcgcttactcaaacggcgggttcatccgctgcgaatttagacgcatccttatcccatgctcaaccttgtccaactgctccggcaggacttactgattttatgcaggcgaacttaagcgaccgtgggccatcagaagaccaacaactaaccaaagctgtattagatgttatgcgtcagcaggtgcaaacaatgcaacagcaacagcagtttatggagcaaaagatgaaccaacaaccacagatgtatcactacgaggaactgccacaggctccccaacagatgcaaatggaagggaatcaggggccttacgttaagtatccgaatgagcaacaggaattctgcaactatctgggtctcaccgaactgtcaacagcaaatgccgtggctaccgcaatgagggaactagccaacagcactatccctcgccgatcgctgcgggtgagaccacaacagcaactggacaggatgcgtagtgatgtgcgtggcaagcggcgcgaaagggagcgagataggcagcaggataaggacaagaagataccgttgaccacaagtagtgagcttagcaccgataaagaagaaccctccccgcctcagacatcagaatccgtttcaaggatggcgggggatgcggatgtccatttcaactctcaaatgcctgcagagcataagcgaaaactgaatcacttgtacaactcttattttgcggaagaggaagaatgctctacgaagaggtcacccaaaaccaccgactttatagccagttccaagtccttaaaggatgtagagaggcgtccatcgctcaaaggacaggagccgcaacgtcatagatccatcattgatggcgacggctatcagaaacatcagatagacaatgagtctgagaagggtcgggttcagtccgttgaggcggcttttactaagatcttcgaggctgccgcacctgcccaatccaagctgctggagagcatgcagcaacgcttgcgccaggcgcgtgagacgaagccatcaatttatattattaaggctacaagcaatgcctcgcccccgaatccatcacacagcaggcaggagtctcacatctcaccggcgcccttgaacttaatcggcggctttggtgacgtaagcgcgccgcatccttctgtcatttcccagccagcgaagaaaagtcctacaataaccagtccagataaggaaactccagcccccttaccagttgatacacccaaaaaatcaaaacataggaaaacccatggagccaccaaacctgttgccgctacaccacgacgccgcactacaatgggtgcatccagtctcgggaacgaagcacgtgcacgcgatttggttacccgctccaccacgcatcttaattcgaagctacttcgtagccgcaaggttagtctgctcaagagctacgccctgtcggacgaaatggctcagggacgatcgaaacggatggctggcggtgcagcacaaaccaccaaaaaggctccaatgcccaaggcagcacggacgtcgttaaagaagccggcagataaaagtcttcctgagcaacatcgcttggagcaacagcaattggctccgccaaactctccccgaaagatgaaaggtgtcaaggagactgaaactgacacgacaagtgcaatgaaatctagtcgccttactaaacggaccaagcgagcacgagccaagtcactgccttcgaatattgaaagggtgactgagcctgtggcagccgttcctaatgccaatgtattgaggctcgctgacctggcaccagaagtgcccaacacattcgcgcctacacacagccatctggtcaactccacagccaaagaagccgctgacaagaccttcgttcattccccctccgtcgctcaatcgccttatgcacagcccgtgcttatttacccgccatccccaacaacaccgccaccgaatacggagccacatcgccctcgccagcaagccggaaaatcagggatccgcgacgctagcaaatccactttctgccaagcacggccaggttctctatatgtactacgagctggaacagctcattgtgctgcaggagaattgcattaccttctggaagtactccaaagtgttcaacgtgctgcatcaaccgcgacataatccctcctttgatggcgccagaaaatctccatctccaaagctgcctcaaacaccttcgcgcgagcccaaagacgtcgagcaggagttgaaaatgggcccgcgatgggtttacctgggcagagtgcggcgcctgactagcgagaaagagatctttacgccgtttggcagccgcatttgcgtgcacaattcgacgccggtgtacctggaaatgcgaagcaggccgctggaccatcacaagagggaggtgaagctaacctcgctacatgtgaatgtgtattacttctgcgaggaggaactacgaccccgtatgcactctgtgcacttggatgctgtcaattgcgaatggccgcatgtcatatacacaactatagcggattcgcgttacttcgttatggcatggcagcaggaactggtgatgggcaagtcgcgctcgggcatttgcaaatattcactgacgcccacgctggatacgctggcctccatacgggagtttaagcagttgcgccacgagctgcgtcacattgagtgcctttcagaggatcgccttatcggctacggccagatgcgcatcaccgtctgggatcatcgcagcggcgatactctgatgaactacgacttgggccggccgctgggccgttgcctggctgctacgcactatcctagcctcgacttggaccaaagcagcatgctggtgctttatcagctgcttaaagaaccaaacaaaccgtctgaggtgcatgtgatcgcctgtgagctttcccatgccacgccctcgcaccgcctgctgcaggtccaccgcttaccatcgccgcaattcgacgatgccacggagggcgttaacaccggtgatcatctgatcatcaagtcagcatcgaacgacgaagcctggataagtgccgccgatccgagacagctaacctatttggcgccgcaaatcaatggagctcagcgtttttatgcccgccacaagtcccaagtgatcgagatgtccccgcaatccctaactgtagatagtatcgccaatcacatgttgaaattggctgtccagcagacccaatcggcgtag

SEQ ID NO: 38835 - protein, 1296 aa, DROSOPHILA
MSRREASLMAYVAAEEHLLNRYSPLEGDEIDTASEAPGDASDVAEDREYPTDLVASVTRSSRTGADLDPAVDSNLHVISDDSDTHSFISSGSGFKGWPEEQPSSSFVPQNEPLIFGLRRQMMMTEETHQAPVWATCTPAKRSYSSHEVIEINDSPESVQDPGIALSPGMLLTNGNVDQFEMLSHENDEAEHELQVAEEGEQCVIYEAVDGENMVVLGEEHCCEIIVATQGVACEQEFARAIMMAGNGTGALLGLLSEESDANECLNGTAYIEEVVEDMGVAEARLAAGNNVYLSDAALEQPLVHQDLVDDEAPEENENATFLDDTPMEEERPDICQVYDHELEDHDDEECEDAVIQEEPAQPIDIVAFEGQEPLPNNPQRKLLREHSSPTEFPVSSSSMPNASDHYDYEDELTGGRSPSKVAPLKRKYPPLMKNTLHGEAMDRRLASICQAQPQMSPAEKVSNWETAPREEWADVEDVEGFEAAFKQYEAVTASLKQLNFAEFREALVRNMEKISHDDDDDCYEVVGMEKASVTTLIPEEELQDNQQPEEEEIVLPVVDDIKNTDSPNFEQRNLTKETSTADLERSALTQTAGSSAANLDASLSHAQPCPTAPAGLTDFMQANLSDRGPSEDQQLTKAVLDVMRQQVQTMQQQQQFMEQKMNQQPQMYHYEELPQAPQQMQMEGNQGPYVKYPNEQQEFCNYLGLTELSTANAVATAMRELANSTIPRRSLRVRPQQQLDRMRSDVRGKRRERERDRQQDKDKKIPLTTSSELSTDKEEPSPPQTSESVSRMAGDADVHFNSQMPAEHKRKLNHLYNSYFAEEEECSTKRSPKTTDFIASSKSLKDVERRPSLKGQEPQRHRSIIDGDGYQKHQIDNESEKGRVQSVEAAFTKIFEAAAPAQSKLLESMQQRLRQARETKPSIYIIKATSNASPPNPSHSRQESHISPAPLNLIGGFGDVSAPHPSVISQPAKKSPTITSPDKETPAPLPVDTPKKSKHRKTHGATKPVAATPRRRTTMGASSLGNEARARDLVTRSTTHLNSKLLRSRKVSLLKSYALSDEMAQGRSKRMAGGAAQTTKKAPMPKAARTSLKKPADKSLPEQHRLEQQQLAPPNSPRKMKGVKETETDTTSAMKSSRLTKRTKRARAKSLPSNIERVTEPVAAVPNANVLRLADLAPEVPNTFAPTHSHLVNSTAKEAADKTFVHSPSVAQSPYAQPVLIYPPSPTTPPPNTEPHRPRQQAGKSGIRDASKSTFCQARPGSLYVLRAGTAHCAAGELHYLLEVLQSVQRAASTAT

SEQ ID NO: 38836 - DNA, 6226 bp, DROSOPHILA
agacatgggctgtattatacaatgaattattttatagttctcgcgtctttttatccgaaagccattgagtaataatcttggcaactgaagtataccatatattgtacgtaattgctttgttggtgcaggttgtggttgctgggcggcatttcattcgatatttctgtttataaacaaatgcaatcggcggcattaaggaaaatttaaatatatgctaacttataatggccacttgctgattcacagcgttgcggactacgtttgttttcctcaccatttatctcaataaaacttgacgagtactttaagatctcaaaaaccttagatttaaagcaatataaaataattgagcaatttatagctagatttaatctttatttgtatcaaaaacaattacatgttcacctaaagtattcgcttaatctacagacttttttgttaagtgtttctattaaaacttctacattataataactttttagttccttgcatgccttaaagttcttaatcttcattgcgtgcgaatggaaatctgtcgttggagaagtgggaacttgtccacatccagacagacactattataatgcattattaaaagaagaatactacaaaagttccacctctttacggttccaaacatttctgtgcgtcgccatttggacgcgcaactggacgtcgcgtcctccgcctcctttagaccaccgttttatttatgttatttacctaacttattgattttgtccgttgcccaatcccacttttcccttctcccgctgaaatgagagttgcgacacatattttttgggctcccgaagggtaaaggcgaaaatcaataatgaccaaaaacctgaattggtttaatttagtgtccagacatccaaaaacttcgagatggcttgtaccgttgtacgaaaaatataaagtgaacatagttgattataacacaatataaaattaatatatttagcaataaataatattctgaaaaccctcttatcttacaggtgtactatgcgaccgtacaaatatttgagattacatactgaaaaatggaagcaatatcgaagatttccttgatattgtgtgccttgtttgtcgggctcaaggccgcagcggccatcagtggtgacagcacccactgtctggccacatacagcagtgccgaggcgtacctggcccaaatcccgcagcaacatcgtccacagatcaggcccaggataaggacctggcaggagcacgagttctcactgctgggctacaagttccacctaccgtttgtgggccatgccgtcgactcggatctagatgatagtgacagtgatgagggtctgtggctggatgcggcggacgccggatcagagagcgtagaggtggaggagcatgaacttccttcggtcggtcacgtcgatcccacgggcaatgtttttaagcttaactgcgagcatgtggacctgaggcgagttaaccaggaactgctctcccagcgaagctcgcacattaattacaaccagctgatgctggcccatgtacctgcggatcgcagtaatcccctgaagctgccacagcttgaaagtctgagggaattcagctggcagagtagtgaacttaaagatgaaacgctcatggagctcttcacccgccagccgcgctcctttgagtatatggaacggctcaatctcgccgagaatcgcctggagtgccttcattgggcaattccgctggccgtgcggcgcgtgaaagtacttgaaatgagcggtaatcgactgagcaattgcagcctgctaaacctgcagtacatgaagcaattgcaggagctgcacttggacagaagcgaactgacctacttaccgcagcgcttcctgggcgagctgagcgaattgcgcatgctgaatctcagccaaaatttgttgactgagcttccacgagacatatttgttggagccctgaagcttgagcgcctctatctatccggaaaccggctgagcgttctgccatttatgctcttccaaacggcagccgatcttcaagtgctggacctcagcgacaaccgcctgctatcgtttccggacaacttctttgcccgcaacggccagctgcgtcagctgcacctgcagcgaaatcagcttaagtccatcggcaagcatagtctgtacagtctgcgcgagctgcgtcagttggaccttagccaaaattctctgtccgtcatcgatcgaaaggcgttcgagtctctggatcacctgctcgccctgaacgtgtccggcaacaacctgaccctgctgtcatccatcatcttccagtcgctgcatgccctcaggcagttggatctcagccgtaatcagttcaagcagctgcccagtggcctgtttcagagacagcgctccctggtgctgctgcgcattgatgagacgccaatagagcagttctccaactggatatcgcgctatgacgagtcccttgtggatccgcaagtgcttcatcgtttgcgttacctttccgtgcagcagaatcgaaaactaacgtatttacccgccaccttgttcgccaatactccgaatataagggagctgctgctggccgagaacggattgctgcagctgcccacgcagatctcagggctgtcacgattgcagcgactcagtgtgcgaggaaatagcttgggatcgctgcccgaaaatatcaaagagctcagacagctgcactaccttaatatattgggcaacgagtatcagtgcgactgcagcatgtattggctgactgcctggctggcgaataccagcacaagcctacgccaccagatgccccaggcacagaaccatagcaatggcagtaccaatcagactccactggactcgtacgagagtatcgatcatcaaatcgatgcgctcaagtgtcagtatggttatcgcggcgatatgctccgcgtgctaagcaaactcaactgctcggtgcccacggtggtgcagttctccgagccaaagatgcacaagcttctctccaccgccaagctggagtgccagatttcggggagcccagtgccggatatcatctgggtgagtataacatccttgtattgtactcatattttgagtttatcgtgttcgtttaggagtaacttaatgttaaaagaatatgttcatatagcattgcatattattatatatttaaatatcccatgatatcggaacttattatgcccttttaatagttaatcctttagctttcctagaggtgactaaatgtatttttcttccatgaacttattatgaggcacagagttaatcgtttacccctcatcaggtgacaccgcgcaataagattttacgccaccatgctgatcctgacaagcgcccgatcatcatcgacagcaaggaggatgctcaccagccaccgagtgcccaggagctagctgctctgatggacgagagctacattcagtcgttgaactggacacgtcagaatagtctagtgggtcgtcgagtggtgctggtggagaacggatcgctgctggtgcacaatatttcgagaatcgacagtggcctctacacttgttatgccttcaatgtgatgggcaaagcctctgcaggattacggtgagaataatggcgactattatgtttaaatacttcttcaaagggttttttttttccttttctcgcagactgtacatcgatcccattgtgttctaccgagttaaaatcggtagcattctgtttggcacggctctggctaccgcattcctgctgctaaccctgattgttcagggattgaggagctgcctgtcacgttggggcatctgtaaccgtttctattgttgcgtcaatcgtaagaagaagtcaccgcgcaaacaccaaatatacgctatgctggacagcatcgagacctacaagagtcagcaattggagaggctgagagagaactatacgcagcaggtgcaccgcatccgggagaactgcgcccagcaggtggagtggatccagagcagctacaccagccaggccaagcatattcgcgagttccgtgacataggctcgaatcatctgaccacgctgaaggaccaatactacgatcaggtgaagaaggtgcgcgactactccacaggccagttgagctgggtgcgggaaaactacgtcttccagaggaacaaaatccggaagtttagtgcgcatcaggtattgcgcctccgcgagggatacaaataccaacagcagacgctgaacaaggtgctggagaaccttcctagcttctactttgagaattgtcgcggacgatgtgaggaagacattgccgagggtaaaatattataacaaactacctttaagtcgtatatatattaaatttactcctttttttttcatcagacatagactgctacttcaaaggccaaatggactttggtgactccaaggagctgcacatacaaaaaattaaggcgcgcctatctgctaattactcagccagcaaggcgtcgctttactataccccaccagacgatgacttgctgcatagctcgcaacttaacctgcagaactcccccatccacatcaactacattgatgagaatctggatcagcaaaagcagttggagcacgattttaaaatggaacctcagctattgctttacaatgcctccatgctctatatgaatcccgaaggcgccagcagcagtggccaggcggcggctttggcggcagcaggggctctatcgcagttcataagcgtggaggacaataatcaagagcaggagatgcagccgctaaggaagatcagcggtaaaccactggggatgcccgaactgaaggacttgaacgatgtgaagacctcaaagtcatgtccggccatttataaggtttccaaacagcgagatggtagcacactgcatgagttgcagaaggagggcgaagcaccataccaaatgcttcgcataaatcccgtggagaccacttcgctgacctcaaccgttgctcctgtgatgcaggcgaggacggagaagctgaacattatcctggacgaatgcggcacggcgtcgttgtgcaaagcggaacaggagggcgacgcagggaatagcgagactccaccatccgagtccagttgtgagtccaacagcttggccgccagttgcggcgatgtctgccaggtcagcagtaagctggcaaatgacgcctcattaccatctactccccccaagcctgaccatgccagcacctagagatttttttaaattaaacattagtaacgaagatataaactgtatagaagtacgtaaatcaaacacgcatctgcaaatgaagttaatgttaatggttacgctacaatggtagggcggacaacaataattaaacttagagttaattagcaaaacgcagaaattcaagtgctgaacattagaaaatatatatgtatatcggaacaagtcatacgattacaccgaccgatgagctgatcaaaaaccaagcttaatgaatttaaaattgagatctattcacagctggattctatcgctgaggtatcatcacgtcaataaaacttgaaaagagagccccccatttgtgatttcattacttaacgagtttaaagcatcaaaactgtaaagtgcaaggcgtattttaaaatgaaactgacaaattttaattgaactgtatgaaaataaaagcgtatataacaaataaaccataacttatatcaattgccgaattccttattccaagataaaatcattctacggccaccgacttaatatatgtttttttgtttttcagatatactgatatattctttcatttgcaggcaacataaaataacaataacaaatgcatgtggaatagcgcagctacattcctaaggatctggacactctggttgcttgaggatctcaatgcagcatggattggcgtcgattttgcacacctcgctctccgtctccacctcgctgacatcggtgagatcgcactcgcatgggaagcactccatctcgccgccctcctcgccctcggcctcttcaccctctccataccaactgatcttctcctcgctgcgcatgctcggctcagtggagagcgagcagacggacagctcggaatcggaaatggccagaggcactggctcctgcggcagcagcgaaaagtcatacacggccatctcctgggcgaaccatagtgttggttccattggctccgcttcacccatctcgtcctccaagcgctcctcggcgtcctccatctcgtcttcg

SEQ ID NO: 38837 - DNA, 3843 bp, DROSOPHILA
acaggtgtactatgcgaccgtacaaatatttgagattacatactgaaaaatggaagcaatatcgaagatttccttgatattgtgtgccttgtttgtcgggctcaaggccgcagcggccatcagtggtgacagcacccactgtctggccacatacagcagtgccgaggcgtacctggcccaaatcccgcagcaacatcgtccacagatcaggcccaggataaggacctggcaggagcacgagttctcactgctgggctacaagttccacctaccgtttgtgggccatgccgtcgactcggatctagatgatagtgacagtgatgagggtctgtggctggatgcggcggacgccggatcagagagcgtagaggtggaggagcatgaacttccttcggtcggtcacgtcgatcccacgggcaatgtttttaagcttaactgcgagcatgtggacctgaggcgagttaaccaggaactgctctcccagcgaagctcgcacattaattacaaccagctgatgctggcccatgtacctgcggatcgcagtaatcccctgaagctgccacagcttgaaagtctgagggaattcagctggcagagtagtgaacttaaagatgaaacgctcatggagctcttcacccgccagccgcgctcctttgagtatatggaacggctcaatctcgccgagaatcgcctggagtgccttcattgggcaattccgctggccgtgcggcgcgtgaaagtacttgaaatgagcggtaatcgactgagcaattgcagcctgctaaacctgcagtacatgaagcaattgcaggagctgcacttggacagaagcgaactgacctacttaccgcagcgcttcctgggcgagctgagcgaattgcgcatgctgaatctcagccaaaatttgttgactgagcttccacgagacatatttgttggagccctgaagcttgagcgcctctatctatccggaaaccggctgagcgttctgccatttatgctcttccaaacggcagccgatcttcaagtgctggacctcagcgacaaccgcctgctatcgtttccggacaacttctttgcccgcaacggccagctgcgtcagctgcacctgcagcgaaatcagcttaagtccatcggcaagcatagtctgtacagtctgcgcgagctgcgtcagttggaccttagccaaaattctctgtccgtcatcgatcgaaaggcgttcgagtctctggatcacctgctcgccctgaacgtgtccggcaacaacctgaccctgctgtcatccatcatcttccagtcgctgcatgccctcaggcagttggatctcagccgtaatcagttcaagcagctgcccagtggcctgtttcagagacagcgctccctggtgctgctgcgcattgatgagacgccaatagagcagttctccaactggatatcgcgctatgacgagtcccttgtggatccgcaagtgcttcatcgtttgcgttacctttccgtgcagcagaatcgaaaactaacgtatttacccgccaccttgttcgccaatactccgaatataagggagctgctgctggccgagaacggattgctgcagctgcccacgcagatctcagggctgtcacgattgcagcgactcagtgtgcgaggaaatagcttgggatcgctgcccgaaaatatcaaagagctcagacagctgcactaccttaatatattgggcaacgagtatcagtgcgactgcagcatgtattggctgactgcctggctggcgaataccagcacaagcctacgccaccagatgccccaggcacagaaccatagcaatggcagtaccaatcagactccactggactcgtacgagagtatcgatcatcaaatcgatgcgctcaagtgtcagtatggttatcgcggcgatatgctccgcgtgctaagcaaactcaactgctcggtgcccacggtggtgcagttctccgagccaaagatgcacaagcttctctccaccgccaagctggagtgccagatttcggggagcccagtgccggatatcatctgggtgacaccgcgcaataagattttacgccaccatgctgatcctgacaagcgcccgatcatcatcgacagcaaggaggatgctcaccagccaccgagtgcccaggagctagctgctctgatggacgagagctacattcagtcgttgaactggacacgtcagaatagtctagtgggtcgtcgagtggtgctggtggagaacggatcgctgctggtgcacaatatttcgagaatcgacagtggcctctacacttgttatgccttcaatgtgatgggcaaagcctctgcaggattacgactgtacatcgatcccattgtgttctaccgagttaaaatcggtagcattctgtttggcacggctctggctaccgcattcctgctgctaaccctgattgttcagggattgaggagctgcctgtcacgttggggcatctgtaaccgtttctattgttgcgtcaatcgtaagaagaagtcaccgcgcaaacaccaaatatacgctatgctggacagcatcgagacctacaagagtcagcaattggagaggctgagagagaactatacgcagcaggtgcaccgcatccgggagaactgcgcccagcaggtggagtggatccagagcagctacaccagccaggccaagcatattcgcgagttccgtgacataggctcgaatcatctgaccacgctgaaggaccaatactacgatcaggtgaagaaggtgcgcgactactccacaggccagttgagctgggtgcgggaaaactacgtcttccagaggaacaaaatccggaagtttagtgcgcatcaggtattgcgcctccgcgagggatacaaataccaacagcagacgctgaacaaggtgctggagaaccttcctagcttctactttgagaattgtcgcggacgatgtgaggaagacattgccgaggacatagactgctacttcaaaggccaaatggactttggtgactccaaggagctgcacatacaaaaaattaaggcgcgcctatctgctaattactcagccagcaaggcgtcgctttactataccccaccagacgatgacttgctgcatagctcgcaacttaacctgcagaactcccccatccacatcaactacattgatgagaatctggatcagcaaaagcagttggagcacgattttaaaatggaacctcagctattgctttacaatgcctccatgctctatatgaatcccgaaggcgccagcagcagtggccaggcggcggctttggcggcagcaggggctctatcgcagttcataagcgtggaggacaataatcaagagcaggagatgcagccgctaaggaagatcagcggtaaaccactggggatgcccgaactgaaggacttgaacgatgtgaagacctcaaagtcatgtccggccatttataaggtttccaaacagcgagatggtagcacactgcatgagttgcagaaggagggcgaagcaccataccaaatgcttcgcataaatcccgtggagaccacttcgctgacctcaaccgttgctcctgtgatgcaggcgaggacggagaagctgaacattatcctggacgaatgcggcacggcgtcgttgtgcaaagcggaacaggagggcgacgcagggaatagcgagactccaccatccgagtccagttgtgagtccaacagcttggccgccagttgcggcgatgtctgccaggtcagcagtaagctggcaaatgacgcctcattaccatctactccccccaagcctgaccatgccagcacctagagatttttttaaattaaaca

SEQ ID NO: 38838 - protein, 1257 aa, DROSOPHILA
MEAISKISLILCALFVGLKAAAAISGDSTHCLATYSSAEAYLAQIPQQHRPQIRPRIRTWQEHEFSLLGYKFHLPFVGHAVDSDLDDSDSDEGLWLDAADAGSESVEVEEHELPSVGHVDPTGNVFKLNCEHVDLRRVNQELLSQRSSHINYNQLMLAHVPADRSNPLKLPQLESLREFSWQSSELKDETLMELFTRQPRSFEYMERLNLAENRLECLHWAIPLAVRRVKVLEMSGNRLSNCSLLNLQYMKQLQELHLDRSELTYLPQRFLGELSELRMLNLSQNLLTELPRDIFVGALKLERLYLSGNRLSVLPFMLFQTAADLQVLDLSDNRLLSFPDNFFARNGQLRQLHLQRNQLKSIGKHSLYSLRELRQLDLSQNSLSVIDRKAFESLDHLLALNVSGNNLTLLSSIIFQSLHALRQLDLSRNQFKQLPSGLFQRQRSLVLLRIDETPIEQFSNWISRYDESLVDPQVLHRLRYLSVQQNRKLTYLPATLFANTPNIRELLLAENGLLQLPTQISGLSRLQRLSVRGNSLGSLPENIKELRQLHYLNILGNEYQCDCSMYWLTAWLANTSTSLRHQMPQAQNHSNGSTNQTPLDSYESIDHQIDALKCQYGYRGDMLRVLSKLNCSVPTVVQFSEPKMHKLLSTAKLECQISGSPVPDIIWVTPRNKILRHHADPDKRPIIIDSKEDAHQPPSAQELAALMDESYIQSLNWTRQNSLVGRRVVLVENGSLLVHNISRIDSGLYTCYAFNVMGKASAGLRLYIDPIVFYRVKIGSILFGTALATAFLLLTLIVQGLRSCLSRWGICNRFYCCVNRKKKSPRKHQIYAMLDSIETYKSQQLERLRENYTQQVHRIRENCAQQVEWIQSSYTSQAKHIREFRDIGSNHLTTLKDQYYDQVKKVRDYSTGQLSWVRENYVFQRNKIRKFSAHQVLRLREGYKYQQQTLNKVLENLPSFYFENCRGRCEEDIAEDIDCYFKGQMDFGDSKELHIQKIKARLSANYSASKASLYYTPPDDDLLHSSQLNLQNSPIHINYIDENLDQQKQLEHDFKMEPQLLLYNASMLYMNPEGASSSGQAAALAAAGALSQFISVEDNNQEQEMQPLRKISGKPLGMPELKDLNDVKTSKSCPAIYKVSKQRDGSTLHELQKEGEAPYQMLRINPVETTSLTSTVAPVMQARTEKLNIILDECGTASLCKAEQEGDAGNSETPPSESSCESNSLAASCGDVCQVSSKLANDASLPSTPPKPDHAST

SEQ ID NO: 38839 - DNA, 8615 bp, DROSOPHILA
catggctatgcagtcgcttctcgttcagtgtggcgcgtatgaaggcacgtcctctgcccacattcgtccagatctgcttaaggtccatatacctctgacgttcgtggggcgtcaaatgcgtctggcagaattcccagaaagtggcgtcattgttgttgctgcctccgcccgcatttccggacaccatctcctgcatgttctggatgaagctggcggcgctgaaggaggaagtgcctgccgattgcctaagtccgtaggacattagttcctcgagggattcgcacagttcctgaacagattcatcccgctcagtggcaagttctttgccactgaacttctgtgagattttatgcgcactttcctgtagacgtcgaaagatgtcctcgcgccgttggccaaaggtgctgcccgccagttggctgcgcatgctccggaagcctgcctctgtgggcatcgagctggatgcattttctggcattatttgtggctattattcaactaattatattttctactcatttttctcactccgttgtgtgccaacactggttgcttgacaacaaaacaagccaaacagtgttgataagcgttggaatgggcgcattcagatcaccgattaatgattttaagtgactgtgactcagcattaggtgatttattaaaataaaaaaattgtttgtaaataatttatggtacctaaaaaacttataaaactataggttgcgttatcaaaacaaaccaattataactgaaagcgcttaatttctccaattcatattggtaaggtacaacgatttcgattaaaattgtgtttttactgagataagcagtattgtacacttatcgataacaatcactctgcattatttctcgctgaacgcgaccacttgtgcatccctggtgatttagcgggcaaaataatgccaaaacgctgttgtgcgactgtgtagccctggcgtataattgccatccctgctcgcgcaaatgcgaaagaagttagcacacaaaaatctgttaaaaactattgttaaacgattgaagatccaataatatgtcataccgcaagtgctagcaactggggaaacccaatccgaacgcgtccaacgtgcaaaagtgtaagtttgcatccaggggcagcaacgtcgtaaattttcttttctgttcgcgttggctgtctgcgcaaacgcttcattgacttttcgagattgaacccatgaaatgtaaccaaaaattctgataaatcggatatatgctcgaaccttattcagttgtgtgaaactccacgcggcggctgaaattccgaccgttacgacaggcttcaatcgcatttccgtacgcttccctcaccgcgcagcatctgcgtgcagaaaaggcaaaagtagaatgaaaaaaaaaggaaaacgggaacagaaggaggcaaacaaaacgaacaacgaggaacactgggattcggtcaggatttacagcccatatggccggaacattcgccggttccaggagctattcgtaaccaaacaaactgggagcattctatgttgcattgtccataaaattgcagcaagattagcaatcagcgtcaaatagatacggagatttctaaatatgaacataatattcttttaaaaattcgaattagcaggcagcttaaaaagtactaagtaaataactacgtagtttttagataggaataaatagggatttactttttaaattcgccccatcttgaccaatttttattatttcaaaacactaaactatttcaatgtttgttttcagtcaatgcgagttcgaaaaacaaaggaacgcgacacgcagcagtagaaagcaatactttttgaagagaacccagaaagctgtcccataaatgcttttgccatactgaccaatccggaatcgatagcaccattggcttaaaatgaacccatccgagctgcgcatgatgtggatgagtagtcagtacaactcggagcgcattacactggaggatgcggccactctgctgggtcatcccactgttggactctctgtcatggaggacctctccgcccatcagccaactttggtgagtgcagacggtttgattcagaagccaatctctcaattcgaagactaataaatataaaatgctttcaaatgagcatcgcgaaaacgagatacgtgtctatcactaaggcaccccattatatttgatagtcctcggagtcgaaaacaaacccaaattctttaggtttcaacgtgtactccttggggattggccaaatttccaaactatcttttttgtctgtctcagttataaacaattggaatttgtttacttatttcttctactttcttttctttgatttatatattggttacaatttaaatctcgacacaaaaacacacataaccaatggtcgatcctcaacccgaaccacctccaatctccaaaacccacaatgctcaaaaaaaggacatgaatccgatgatgagcctaatggggggagatttcactggtcaagcggcggcgactgctgcggcactgggtgtacagccgggcaccctgattgccaccaactcgaacaacctgtacggatttgcccacatgggcggcctgcagcagcaactgctccagcagtcggcggcggcggcagtcttccagaactatgcggaggcaatggataacgatgtggagaacggcatggttggcatggccatggaggcggtcgtggacgatgacgaccaagtgtacggtcagagggacaataactttgatgataatggatccgagttggagcccaagcaagagattatcaacatcgacgactttgtgatgatgaacgaggacaataattcgtacgatggcaccgactttatgacctcctccgataaggacatttcgcagtcctcctcctcctgcatggcacagatgcccggaagcttgggcgtccctggagtcgagcacgatcttttggttccactgcccgatggcctgctgcaccacaagctgctgggcacaactctggtccctgcgatgggtacgctaaatggcaatgcctttggcaacataatggtcagcactgaaaacacatccagcaagcaaatgcagcgcacctatagtacggccaagggagccaattccaccgcaaccaccgccacctgcagtgcctccacgtcctccgcattgcgatcacagcgcaagacgcgcaagatcgagcccgttaacaggccaggactggtgctgaagacacccatcgcctacaggggcaacattgacccttcggtgatccccatacagaaagatggcatgggtaaggttgctgtgcactagagtgggtcgattcttaattagaacattgcgggcagaaaagtaaacgataagtaacgataagtggtagagatcttagttgagatcatatattattaaacatcatcagtttgatgtacattgaacttatctaaaattccaaaagcctttgccttgtatttacaatctttcaaggcttgctctgtctactagcttatgtatttgataaagtaaatagttatttctttctaagtaattagtaatgattcgtttatttaaacaatgaaaaccacctgtaaatctgcaatcgatccactctacacgatattaattttcaagctttttattttaaatcctactcttagtttcacttatctttatggttttgggtttgttttgcaagaatttgggtttgtataccatgatagcatttaaattaaatacgaaattaacgtttacattaatatgcacttaaacgattcgttttttcttcttctacagctgtctgtaaacgttgtggcgccattggagtgaagcacacattctacacaaaatcgcgacgtttttgcagcatggcctgtgcccgaggcgaactatattcgttggtacttaacactaagatggagggagaccaggcaaccactagttccccggatcctggagcgggttcggagtcagccgatttgcctggcgatcagcaacagtcgcagtcggatattgagctcgatctgcatgcggcgcacattaagaatgcgaattatcgttttcgcattacggatcaatcaaagattacccagttgaatagcttcggcgaacccatgtcaatgggcggcgacgcagctgccaataatgtacaaatggcagcagatgaaacaattgctgcgttaaacggcggagcagtgggcgatgccactgctccgggcagcaccgaggagggtgcatccacacccaattcttatctgagcgcagcacccacgcccaaggccttgcgactttttaaggacatctacccacaggatgacctgccgcaaatacccaaatacgagcgccttcccgtaccgtgtccgcaaatggagaagataatcagcattcggcggcgcatgtatgatcccacacactcctacgactggttgccccgccttagcaaggagaacttcaatgcggcacccgtcacttgttttcctcatgcacccggttgcgaggtatgggacaatttgggcgtgggcatgaaggttgaagtggaaaatacggattgcgatagcatcgaagtgatccaaccgggtcagactcctacctcgttttgggtggccaccatcctggaaatcaaaggctataaggccttaatgagctacgagggtttcgatacggactcgcacgacttctgggtgaacctctgcaatgccgaggtgcattcggtgggttggtgcgccactcggggcaagccattaattccgccccgcaccatcgagcacaagtacaaggactggaaggactttctggtgggacgtttatccggagcccgcacccttccctccaacttttacaacaaaatcaacgacagcctccagtcgcgcttccgccttggcctgaatctcgagtgcgtggacaaggatcgcatttcgcaggtgcgcctggccaccgtcaccaaaatcgtgggaaagcgcctcttcctgcgctacttcgattccgacgacggcttttggtgtcacgaggactcgcccatcatccatccagttggctgggcaaccacagtaggccataatctggctgcaccgcaggactatctggagcgcatgttaggtaataatatttactttttctgcatacatgtttttacattaccattttaacattttacataccattcctacttccagctggtcgcgaagccatgattgaggttcatgaggacgatgccacaatcgagttgtttaagatgaacttcaccttcgacgaatactacagtgacggcaaaaccaatagctttgtggagggcatgaagctggaagcggtggatccactcaacctttcatccatatgcccggctacagtaatggcggttcttaagttcggatacatgatgatacgcattgattcctaccaaccggatgcctcagggtcggattggtgagctttaaaagcttcaatttaagtcggcaaatctaaatagcttctgttgtatttttttttaggttctgttaccatgaaaagagtccgtgtatctttccggctggattctgttccgtcaacaacatttcggttaccccaccgaacggctacgactctcgtacattcacctgggagggttacctccgcgacacgggagccgtagccgctggccagcatctatttcatcggattattcccgatcatggatttgaggtgggtatgagtctggagtgtgcagatctcatggatccccgactcgtttgcgtggccacggtggcgcgagtggttggtcgactactcaaggttcactttgacggatggacggatgagtacgaccagtggttggattgcgaatcagccgatatatatccagtcggatggtgtgtactggtcaaccataagctagagggcccaccgagagtagcacatcagcaggccccgaaaccggcaccaaagcccaaaatacagcgaaagcgaaagcccaaaaagggagcagcgggaggcaaaactccaaccgataataatactcagtcgggtaagttttttttttctaatcaaagtcattcgaattcctgtatatcatcatgcatcttcaaatgttattccagtcaaatcgcgtacaattgcgctcaagaccacgccgcacttacccaagctgagcatcaagctggagctaaagccggagcatcacaatgctgccttttacgagaacaatcagcccgaggaggaaggcgacgaggaggatcccgatgcggatggcgatggagacggaagcaccagccacatctccgagcagtcaacgacacagtcgtccagtgatctgatcgctggatcgggcagtggaagtgggtccgcctcgctggtaactctcgccacgggcagtaacaaaacggtaaagaaatctactactaaatctcctgcgccaccaactgtgggtcgcaaagccactagctacattgcggtgagtacttagcggaataatagtgcgtagagtcatccatctagccagccagcctgcttgcccgcctgaagttcagctcacgcatctaaacgggaggtccaaagagcatagtggtttttgttttaaacattaattaaattttatttagaggaattcccctttaatttatttgcctttttttttcgaaatagaagcatcagcttatacaccaaaatactccatattaatccaagtttgccttgtttagcttaagtttttgttatttcatatgaaatagattgtccgacccaacttaaaccactgtgctaaagctccgtaacacaactgcataaatgtatataaccaaaatcaaatcgttcataaaacgccaatttgtatataatttaatttacgcactgttatttttggtacttgcaacagccccaatagccccaacacaccgacatccaatcgttccgtcacacacccaaccagcaatgcaacatcatacgttaactaattaagtccttattttttaccccactatagaactcctctgcgacgaataataagtacattccgcgtctggccgacatcgattcgagtgaacctcacttggagctggtgccggatacatggaacgtgtacgacgtatcccagttcttgcgggtgaacgattgcacagcccactgtgacacgttcagccggaacaagatcgacggaaagcgactcctgcagctgaccaaggacgatatcatgccactgttgggcatgaaggtgggcccagcactgaaaatttccgaccttattgcacagcttaagtgcaaggttaatccgggcagagccagatcccacaagaccaacaaatcaccgtttttatagtgcgcggattttagttttttcaaagcaaaacgaaagttatcaccgatagaacacacacacacacttttatacgtgtacactactgcgtatgcatatataatatatatatatatatatatagatatatagatattgaagtattttgttagccctggaaatcgaaacccaaacgttgcctagaatggatcaaccatccatgatacaattgtataactaactcaagtctcacagcgcgttattttataccgattaaattgtaaaccgtagaccttaggcgtacgctcatgttatatcagtcagagttctatatcaacaattgtataaagatgattgaattgatgacagtgactttttttaaatcacgcatatttttataaaaataagagtaataacaatgcatgcaacacatgtattcacatgaatatatggggagattgcatagcatgggcttgtacagtgtacataaaataagccgtcgccgattatataggacccaagaatatcatattttatatagaagcaagcgcaagcaaataacccaggcagcatgccctcaactttcagtcgtaaacggagcgattggaagtcgctcctagtctgtaagatccacgattaactagccgctctctccttcggttaacttcgttccggtgtcacacatctctgcaaggagggcattattggtgtaaggcaaacttttgaagaaggcaaccttaatgataaaatatgtatttagatatccctaaggtaccagctaatgtcaagatactttaataaaaccgaattcaaaattgcaagtattgaaatatcgccgactaacttttatatgtgttggttttctttgggtttatatgtgctctacagtcaaaactcattttcatttctgttttttttttttttagattggtttatattctggatattaatacacttttaagacatatagactaaattcttactgctatgtttacactgcgtttggtggctatatatttatgctaggtttcgaataaacatttcaaacacgcacaccaaatttccaactcttatgaatattttgaaatccatgcgctgttacattttgatgtgggtgcgagtgtataaatgttaaaaaatagttgccataaccgatagaaatataaaatggtaaggagataacacaaaaaagtagaaaaagaatcatgtacaatacaaattaggggcgagtgcttatatacagagtgtttgtgtctagtttttaactaaaactaacgtatttttccgtttgcatttgcatagttttgaatatgttacgcttagaactagatttaaagttgaggcgctgcttctctttgaata

SEQ ID NO: 38840 - DNA, 3486 bp, DROSOPHILA
cacacaaaaatctgttaaaaactattgttaaacgattgaagatccaataatatgtcataccgcaagtgctagcaactggggaaacccaatccgaacgcgtccaacgtgcaaaagttcaatgcgagttcgaaaaacaaaggaacgcgacacgcagcagtagaaagcaatactttttgaagagaacccagaaagctgtcccataaatgcttttgccatactgaccaatccggaatcgatagcaccattggcttaaaatgaacccatccgagctgcgcatgatgtggatgagtagtcagtacaactcggagcgcattacactggaggatgcggccactctgctgggtcatcccactgttggactctctgtcatggaggacctctccgcccatcagccaactttgctgtctgtaaacgttgtggcgccattggagtgaagcacacattctacacaaaatcgcgacgtttttgcagcatggcctgtgcccgaggcgaactatattcgttggtacttaacactaagatggagggagaccaggcaaccactagttccccggatcctggagcgggttcggagtcagccgatttgcctggcgatcagcaacagtcgcagtcggatattgagctcgatctgcatgcggcgcacattaagaatgcgaattatcgttttcgcattacggatcaatcaaagattacccagttgaatagcttcggcgaacccatgtcaatgggcggcgacgcagctgccaataatgtacaaatggcagcagatgaaacaattgctgcgttaaacggcggagcagtgggcgatgccactgctccgggcagcaccgaggagggtgcatccacacccaattcttatctgagcgcagcacccacgcccaaggccttgcgactttttaaggacatctacccacaggatgacctgccgcaaatacccaaatacgagcgccttcccgtaccgtgtccgcaaatggagaagataatcagcattcggcggcgcatgtatgatcccacacactcctacgactggttgccccgccttagcaaggagaacttcaatgcggcacccgtcacttgttttcctcatgcacccggttgcgaggtatgggacaatttgggcgtgggcatgaaggttgaagtggaaaatacggattgcgatagcatcgaagtgatccaaccgggtcagactcctacctcgttttgggtggccaccatcctggaaatcaaaggctataaggccttaatgagctacgagggtttcgatacggactcgcacgacttctgggtgaacctctgcaatgccgaggtgcattcggtgggttggtgcgccactcggggcaagccattaattccgccccgcaccatcgagcacaagtacaaggactggaaggactttctggtgggacgtttatccggagcccgcacccttccctccaacttttacaacaaaatcaacgacagcctccagtcgcgcttccgccttggcctgaatctcgagtgcgtggacaaggatcgcatttcgcaggtgcgcctggccaccgtcaccaaaatcgtgggaaagcgcctcttcctgcgctacttcgattccgacgacggcttttggtgtcacgaggactcgcccatcatccatccagttggctgggcaaccacagtaggccataatctggctgcaccgcaggactatctggagcgcatgttagctggtcgcgaagccatgattgaggttcatgaggacgatgccacaatcgagttgtttaagatgaacttcaccttcgacgaatactacagtgacggcaaaaccaatagctttgtggagggcatgaagctggaagcggtggatccactcaacctttcatccatatgcccggctacagtaatggcggttcttaagttcggatacatgatgatacgcattgattcctaccaaccggatgcctcagggtcggattggttctgttaccatgaaaagagtccgtgtatctttccggctggattctgttccgtcaacaacatttcggttaccccaccgaacggctacgactctcgtacattcacctgggagggttacctccgcgacacgggagccgtagccgctggccagcatctatttcatcggattattcccgatcatggatttgaggtgggtatgagtctggagtgtgcagatctcatggatccccgactcgtttgcgtggccacggtggcgcgagtggttggtcgactactcaaggttcactttgacggatggacggatgagtacgaccagtggttggattgcgaatcagccgatatatatccagtcggatggtgtgtactggtcaaccataagctagagggcccaccgagagtagcacatcagcaggccccgaaaccggcaccaaagcccaaaatacagcgaaagcgaaagcccaaaaagggagcagcgggaggcaaaactccaaccgataataatactcagtcggtcaaatcgcgtacaattgcgctcaagaccacgccgcacttacccaagctgagcatcaagctggagctaaagccggagcatcacaatgctgccttttacgagaacaatcagcccgaggaggaaggcgacgaggaggatcccgatgcggatggcgatggagacggaagcaccagccacatctccgagcagtcaacgacacagtcgtccagtgatctgatcgctggatcgggcagtggaagtgggtccgcctcgctggtaactctcgccacgggcagtaacaaaacggtaaagaaatctactactaaatctcctgcgccaccaactgtgggtcgcaaagccactagctacattgcgaactcctctgcgacgaataataagtacattccgcgtctggccgacatcgattcgagtgaacctcacttggagctggtgccggatacatggaacgtgtacgacgtatcccagttcttgcgggtgaacgattgcacagcccactgtgacacgttcagccggaacaagatcgacggaaagcgactcctgcagctgaccaaggacgatatcatgccactgttgggcatgaaggtgggcccagcactgaaaatttccgaccttattgcacagcttaagtgcaaggttaatccgggcagagccagatcccacaagaccaacaaatcaccgtttttatagtgcgcggattttagttttttcaaagcaaaacgaaagttatcaccgatagaacacacacacacacttttatacgtgtacactactgcgtatgcatatataatatatatatatatatatatagatatatagatattgaagtattttgttagccctggaaatcgaaacccaaacgttgcctagaatggatcaaccatccatgatacaattgtataactaactcaagtctcacagcgcgttattttataccgattaaattgtaaaccgtagaccttaggcgtacgctcatgttatatcagtcagagttctatatcaacaattgtataaagatgattgaattg

SEQ ID NO: 38841 - protein, 891 aa, DROSOPHILA
MACARGELYSLVLNTKMEGDQATTSSPDPGAGSESADLPGDQQQSQSDIELDLHAAHIKNANYRFRITDQSKITQLNSFGEPMSMGGDAAANNVQMAADETIAALNGGAVGDATAPGSTEEGASTPNSYLSAAPTPKALRLFKDIYPQDDLPQIPKYERLPVPCPQMEKIISIRRRMYDPTHSYDWLPRLSKENFNAAPVTCFPHAPGCEVWDNLGVGMKVEVENTDCDSIEVIQPGQTPTSFWVATILEIKGYKALMSYEGFDTDSHDFWVNLCNAEVHSVGWCATRGKPLIPPRTIEHKYKDWKDFLVGRLSGARTLPSNFYNKINDSLQSRFRLGLNLECVDKDRISQVRLATVTKIVGKRLFLRYFDSDDGFWCHEDSPIIHPVGWATTVGHNLAAPQDYLERMLAGREAMIEVHEDDATIELFKMNFTFDEYYSDGKTNSFVEGMKLEAVDPLNLSSICPATVMAVLKFGYMMIRIDSYQPDASGSDWFCYHEKSPCIFPAGFCSVNNISVTPPNGYDSRTFTWEGYLRDTGAVAAGQHLFHRIIPDHGFEVGMSLECADLMDPRLVCVATVARVVGRLLKVHFDGWTDEYDQWLDCESADIYPVGWCVLVNHKLEGPPRVAHQQAPKPAPKPKIQRKRKPKKGAAGGKTPTDNNTQSVKSRTIALKTTPHLPKLSIKLELKPEHHNAAFYENNQPEEEGDEEDPDADGDGDGSTSHISEQSTTQSSSDLIAGSGSGSGSASLVTLATGSNKTVKKSTTKSPAPPTVGRKATSYIANSSATNNKYIPRLADIDSSEPHLELVPDTWNVYDVSQFLRVNDCTAHCDTFSRNKIDGKRLLQLTKDDIMPLLGMKVGPALKISDLIAQLKCKVNPGRARSHKTNKSPFL

SEQ ID NO: 38842 - DNA, 2291 bp, DROSOPHILA
agtttttatattatataaagaattttctgaaacgttttagaaatgactaaaaacgatccgtgtaacagcttactttgatttcaatggcgcagtcttagactccaatgatggcgatgcaaatgagcgacatatttgcagacaagtccaccagcaattcggtgaatgggcgggcgtctgcttccccggaggataatgagctgcagcccccgtgaatcgagtctggtggcccatctaatggtgttgttcgcatggtggttagatggttgaatgctgcagctacagcagcaacgattcagcaccgttttgctgatgcggcacactccaatgccataaaagggcattagcctcgtgagtagattgcatgtttttaccacaggttttcgtggatgggctcccgtcttttggggtggcaaagtgaggttgtactggcagctgagtgcgcgcgctttggaaaattgaataaagtgccggaggagccaacgaaggattgaggcaacgaagcggagtaaagtgctcgatgctggcagccaagtcatttaagggttgccggcagcactcacatcggcctacaaggaaagatgaaatacagtcgctttgctaagtttataatcccttatttagagtacattttctgactacccagctaactaacacaactctagtaactgacagatgattggcatggccgagaattttctcaacagacatagcaattatttggaattaatcatagacttatttgcatgactgttgatccgcaagtggcaacgtgtcgtatgcgcaatgcttgctcttgctgggtctgcgatgattcagaggggactctagtaccgcccaacgcataaatatgaatgaggaaatcgaagcagcttgccacttgggcttagcccagactggattttccagaattccattgaacttattactgaccgacacgatccatataaaaacgaaagaaattgcatctggctatgcagttgccggcggtgcattgatcagcatgatgagccgcatcatatcattgcttctcctattcggaatcatttgtgctgctctaattgccggccatccgcacgaccttattgaagatccggaaggtaccaatgatgctttggaggaatctggcagtggatacaacagtgccgaagagttcatgaatgcaatggacgagctgatcagacgctggcaggagaacgatgcagctcatgagaactcaactgactatccaagtcttgatgacgatgagacgactttggattttatggatattaccaccgaaccggctacttaatatggaattatttagtagtgctgtaatgctaagtcatgctatcctattgtctgtaaataatctagttcttcaataataattattaagggaaataaaagaaagtttttagaaattttaaaatgaaatcaatcaagagagaatcaagagatcttcattttttgataatgaatgttgcctactccgcaatttcgattttaagtacgcattaaatactagtcatagattgaatttaatagctcgtttagtatatcaattaagcttgtggtaagctgtgttgctgttaagctggaatttcccgcactcacctctgtctaaaagtatacatatcacctttaaaccaaccacttagaactgctgataacccagggcaaggctataaaagcccagctcaagagccgactgacattcagtcaactgtagccagagctaatcgaaagaaaaatgcaatccattctccgactgctggtgctgtttggattaatctataccgcgatcggtgcatcgggtatatttcagaatataaacctcggtggcgaaggaggaagaacacgatcttcaggtggcaacttggactggagcgatagtgttcacagttctgatgacgataggactctgaagctactggaatcgttggataacagtggcaatgatagaaataattggggcaacgatgcggtgaggaattctggattcgataccgatagatccgcaggagactcaaaggaagacgctcgcggattccagtttatacacataggataaatgttacgatgttaaaatactcaatttaaataaaagaatttttaaaagattaagaaataagcattataaaatgctttagattttattacttaacaaacgtatttattattttatgaactgatcttatctaacaaatccaatgggccttgacccatttcgaaatcagttccgcctgtttcatcattgagaatttttcacttttactgtcgatttaaaatagcacccctctctaaatatc

SEQ ID NO: 38843 - DNA, 291 bp, DROSOPHILA
atgatgagccgcatcatatcattgcttctcctattcggaatcatttgtgctgctctaattgccggccatccgcacgaccttattgaagatccggaaggtaccaatgatgctttggaggaatctggcagtggatacaacagtgccgaagagttcatgaatgcaatggacgagctgatcagacgctggcaggagaacgatgcagctcatgagaactcaactgactatccaagtcttgatgacgatgagacgactttggattttatggatattaccaccgaaccggctacttaa

SEQ ID NO: 38844 - protein, 96 aa, DROSOPHILA
MMSRIISLLLLFGIICAALIAGHPHDLIEDPEGTNDALEESGSGYNSAEEFMNAMDELIRRWQENDAAHENSTDYPSLDDDETTLDFMDITTEPAT

SEQ ID NO: 38845 - DNA, 2959 bp, DROSOPHILA
caatgctcatgattgatgggtattcggagagggatgggaggagctcgagccttgcgactgccgccaaactcagccaatcgaaaggcaataatggccattgtgccacttgggcatttggtttcggtcttctggcctggtgatttccaatgacaacaacaatgggacagtggccagtggatcggttttgcaatgtgcagcgtaacaaagtcgtttgttttggccaacggcagcaacagtggcaagaaagagctcccaaaccgcaagaagttggcccgatcgaagggtttttttttgccgggaacaacgttatgcacttaaagacaaaagaaatatggcaaacaaccaaccgaaaacaaaaacaaaaagcaaataatgaagaaaaagagtaggaaagctgtatactaaatatttcaaacatttgacacctcttataatatgcacattattttatgcaaatatcaaattcgttttgtaaattgcaggttacgcaaaatcaattataccatggaatataatcagtatgtgtactgagataatgtagataaaatgtgtgtataataacataaatgaattttgaatttaatttacaacaaatacttggaaatggccaaaatgtttagaaatatttaatatacgaattcattttaacacaatacataccttggcaatacctactagtaaacgcaatacaccgaaacgaaactcaaataaaaaggggtgcaaaaagctggcagcaaagttggcaaatcagccacaaactgtggcagggcgagaagggtttggataaaaagcttcggcggctcgaggcgagtccagtagactgcgataagcgggcgtggcagccacaccagaagcaggggaaaaaccagcgggcaacagcagccagccaggataacacggagcagcagtggcatcagcaatgtggccggcttggcaagtgataacgctgctggggcttttggccagggctttggccctccactcaacgccagatggggcaatggccataagcgcggcgctgcttggccaggactttgaggattttcagccgtacttcgcacataaacaggagcaggtaaggaattctaaatttatatggattttatagggatttagctgtcgttacaaaagaataattgaattttgctataattacttaaaattcactttgaaggttattataatgttgagctctgaaagttatattttgtatattaagtatacgccatgttgcagtcacattttaatttaaacatcatattttaggaagaagatcagctagttgctgccacaaagcacgaggagcattccgagggtggcgaggaggaatctggggaggagcaccacagtgagcacttccacaagaaggggggaaagagcaagaagggtcacaagcacggcgagcactccgagaagggcgagaaaggtcaccacgacaaggagggcaagaagggggaacacggcgaggaggagggtcacgagaagaagcacaagcactcggagtctcatcacaagaagaagaagaaaggctccaagggcgagaagggcagcgagttcgaggatcacggctcctataagaaaggacactccatcaagggcaagcacaacatccacaaactagacgagaacaagaaagagaaaaagttctacgatgaggatcacaatgagggcggcgaggaaaagcacggcggattcgaggagtccaagaagcacaaaaagggcagcagcttcaagaagggtcaccacaaaaagggcggccacgaggagaactacggcaagaagggtcacagcaagaagggtcacaaaaagaagggccacaaggggcacaagaagaagcacgaggagtccaagaagtggggccacaaaaaggagcacggcaaaaagggcggcgaggagcacaagaagaagtggcacaaatcgcacaaacagagcagcgaacacgatcatggacatcattaaatctcaagccgaccaccctgcgatttttctttatttttgttgtattttttaagcattaaaaacaaataactcagacccagttaagaactaattgttttactcagcgaaatagcattgtagttctaggtttttaacgtttcaaacaaacctacaaaaaagtgtagcatagatttactcacctctataagtcatagaatttcttcgactgttcttatgtaggatatttaatttaatgtgccattcgtaatctcctctcaatgcagataaattatttaagcggcacacagcccattcaagtcaccagaaatgacgttcatgttccatacagcctaacatgtataatgaacacaaaatgtcatttgaggatttgccatagttatctttaaattacgacctgcaagcagtcacaactcatgtacgcacctgcttagaaagagattatgcaggacccacccaccacgcccactcacacaagctcatcatgcagattaaagaaaacataattaggaggaaaatcgtagtcatctttggccaagggctcacagttcaattggcgatgccaggtcctttccctgtgccctttacccattgcccttcgcaccaacacacctgcaacgaagctatggccaagcgttaagtgaaatatgaatgtgccaggacgaaagagtgagacggagctgggcggcctaacccgttcgtgtcaaaggttaattacgcatactgcaggtcattcccttactcgccttcctgtcgcagcacacaaacacacacacacatacacacggcatcactcagatatgcacactttagcccacatatacatatgtatgcatgtttgcttagccatttccggttcgattttagcccaaatcttgtccattttctagcctaagcaaacaaacggaaactggcttagttggagcagccgttgtcaggacaagcggctctgtttggtctcatatgctaatccctacgaccagcgtcataaatcattttcaac

SEQ ID NO: 38846 - DNA, 768 bp, DROSOPHILA
atggccataagcgcggcgctgcttggccaggactttgaggattttcagccgtacttcgcacataaacaggagcaggaagaagatcagctagttgctgccacaaagcacgaggagcattccgagggtggcgaggaggaatctggggaggagcaccacagtgagcacttccacaagaaggggggaaagagcaagaagggtcacaagcacggcgagcactccgagaagggcgagaaaggtcaccacgacaaggagggcaagaagggggaacacggcgaggaggagggtcacgagaagaagcacaagcactcggagtctcatcacaagaagaagaagaaaggctccaagggcgagaagggcagcgagttcgaggatcacggctcctataagaaaggacactccatcaagggcaagcacaacatccacaaactagacgagaacaagaaagagaaaaagttctacgatgaggatcacaatgagggcggcgaggaaaagcacggcggattcgaggagtccaagaagcacaaaaagggcagcagcttcaagaagggtcaccacaaaaagggcggccacgaggagaactacggcaagaagggtcacagcaagaagggtcacaaaaagaagggccacaaggggcacaagaagaagcacgaggagtccaagaagtggggccacaaaaaggagcacggcaaaaagggcggcgaggagcacaagaagaagtggcacaaatcgcacaaacagagcagcgaacacgatcatggacatcattaa

SEQ ID NO: 38847 - protein, 255 aa, DROSOPHILA
MAISAALLGQDFEDFQPYFAHKQEQEEDQLVAATKHEEHSEGGEEESGEEHHSEHFHKKGGKSKKGHKHGEHSEKGEKGHHDKEGKKGEHGEEEGHEKKHKHSESHHKKKKKGSKGEKGSEFEDHGSYKKGHSIKGKHNIHKLDENKKEKKFYDEDHNEGGEEKHGGFEESKKHKKGSSFKKGHHKKGGHEENYGKKGHSKKGHKKKGHKGHKKKHEESKKWGHKKEHGKKGGEEHKKKWHKSHKQSSEHDHGHH

SEQ ID NO: 38848 - DNA, 3337 bp, DROSOPHILA
gcaggtctccatttataggctttcgtaacaagaactatagagaatagaggatgttaaatgcattattttcaaatttttacaaattttatacaattacccttcaattgaatatgtttaatttagagatactcaagcagctttctagttgcagtttaggctcttgagtcgatgttattaaaccacagctggtccttaaagcgtgcggattccggccaggtgaccaggatgggtacgcggcacttgggtcatacgcaaagtgctgtgaaccacaaaaatggcgcatgacctcgcagttggcacttacacgagtgcattgtgtctgtgcatgaaccgcaataaacaatatgaatttatatgcgctcggaaacattttaattaatcactggagggcatcaattgcattttgtatgctaataatttgcgctataaatattccatatcccttcggtctcctctccaatcagcctctaaaaatcccgattcgatttctttcaactgccgccgcactcccccatttgatggtgcgcattttaaaacgaattgatattcaattaagctaaaaatttcactggcatataaaacgcacacacacacacacaagcagtagaatgcagcaaataataaatatttatttaggtttgcagttcatattttatactattgatgctgttgcgtttgcagttgattgttgatttttttttgttaactgcacagtagaaaaagttaagcaaacattgacggaagcggaaaaccgatggcgaattttaagtgcccttttaaaaaaaaagcaatgaaagttcgagcttagatatgactttaaatataaaacacacacatataagttactcatagttgcagatttatatgaaacaattaaagtaaagtaaattaaactagcttaagctatacttattacaatttgtatttccctaaatcgtaaacacacacattttactaaacattgaatttgaaatagcacttttttatagcaggattacatctaaataacacaaccattccgagaaccgtacatcatccgcatctccctggagatctttttatcgataagcccattggttcggcgggcttgagggaagatctccttacgattgcctggctgtttgatgccgggcttatggaccaggaaggcgttgtccaggatatggaactcgtagtccagaacgcacatggcatacgcctgggtcatcttgtcccgttgaccctcccacgttaatcgctcatcgtatggaggatcctcgacggtgcccaaaaatattggctcccaattgttgttattttccgagcggtggccaacattgaagacattcagttccttggagacaacgctcgcatttatccactcctccaggttgggtcccctatggcatgcctcacagatgtccatgtgaaatggcacagcttcgcccgacttcaacatctcttgcaactctggcttggtgttcggtacagatacattggccattacctcgaaaatccgcagcacatggaccaacggtgaagtgggctgctgtcctggaattccaatcacctgtgattcagaaatcgttattgccaactgacatcagcaaacggggtaattggtacaagtagaggcatattgccaaacaaatcgtaaccaaaaagtgcaataataaaccttacttggcggccaaggaaatgcatatagtcgggcaccaatccgggcgtgggatagagctcgatgtccgaggccaggacgtagtgcgtcagcgaagcccggcgtgcaacgttgcgtcccatattgacgggataatccagtgtgtttcgagacctgtacatgttccctttaacgacattctcatatggcggtggtccactacagttggctggctcccttagagtcgtttcgggtggcagaaccacctggggcaagtgctccacatcgaagtacaaatgaatgctgcacagctggcgaaccaggtcgtggccaggatggcactgcagcaggtacaaaatgctgtgtatagtgggctcgaagtccgtgccaggagcatatatggccaggctgaggggcgatcgccagcgttccaggagcggcaccacattatccagatacgtatagtccgcatgggtggtgtaggtcacattcgaatagcacggaatatcgccgtgatcagccattacatagttttccagcacccagtaatccttgtagatcgcattgctggacttgtaagccttagactcgcagttcacaaactttttcagcttggccagggtgccattctccaggcaactgatttccagaacaaaagtaaggactacgagtgaactcagaaggccagagattcgaaacatattgttacgattttctttttgggctttccacaaattgtattcgggcttgacctatgtttcctcgataaatagattgaaattcaactggatttcataacaaatatacttttctatcattgcagaaaacccctaaagtgttatttaattgaaaccttaaagaatcacttaaaactcaattaagccaacctttcccaaaaggcttctcgacacccccttccccagccaaatgaaaacgaaacccaccaaacgaaaaataatctgttgcgaatggggtttattattgattagcagacattttaatatgcaggctgcgcaaataaacaattaatacggaaaattaatgtacattgttcattgttaaaggtaaatccccaaactcgcaacgaaatccatccaaaccatacccacgtcccttttcacagcaacagccgtggacaacaaattttaattatgcgcccagttttggcttctattcgcatttgggcgcgcaatgggggtgctgtgtatatagattatgtatttgtatgtatattgaaatattagtaattacgagttgaaaattcatgaaaatacaatttgcgattattgttattagtgtcaggcaacaggcagggcctctccgatgggaatcccctgcaaacttttgcaaatggctggcaaagttcgtcgtgtgcggtggaggagcagccaaaatgggaggggggtggggggaggacgaaggacaaagggcgcaggacggcgacagcagctgaaaaatttataaattcaatagcacctaattaaaattaaatctgaaagctttctgtatcgacgatggagcacggctttggcagccacagttggcaaaggcaacagcaacagcaacaggacacaacgcaacagcaacgagtcgaaggagagttggccaaggatacacggcacaggatatgcacggtaaatgctgtagccggaaatgaacacgttctgatgtgtgctgctagtaaagcacttggagaaaaaa

SEQ ID NO: 38849 - DNA, 1224 bp, DROSOPHILA
atgtttcgaatctctggccttctgagttcactcgtagtccttacttttgttctggaaatcagttgcctggagaatggcaccctggccaagctgaaaaagtttgtgaactgcgagtctaaggcttacaagtccagcaatgcgatctacaaggattactgggtgctggaaaactatgtaatggctgatcacggcgatattccgtgctattcgaatgtgacctacaccacccatgcggactatacgtatctggataatgtggtgccgctcctggaacgctggcgatcgcccctcagcctggccatatatgctcctggcacggacttcgagcccactatacacagcattttgtacctgctgcagtgccatcctggccacgacctggttcgccagctgtgcagcattcatttgtacttcgatgtggagcacttgccccaggtggttctgccacccgaaacgactctaagggagccagccaactgtagtggaccaccgccatatgagaatgtcgttaaagggaacatgtacaggtctcgaaacacactggattatcccgtcaatatgggacgcaacgttgcacgccgggcttcgctgacgcactacgtcctggcctcggacatcgagctctatcccacgcccggattggtgcccgactatatgcatttccttggccgccaagtgattggaattccaggacagcagcccacttcaccgttggtccatgtgctgcggattttcgaggtaatggccaatgtatctgtaccgaacaccaagccagagttgcaagagatgttgaagtcgggcgaagctgtgccatttcacatggacatctgtgaggcatgccataggggacccaacctggaggagtggataaatgcgagcgttgtctccaaggaactgaatgtcttcaatgttggccaccgctcggaaaataacaacaattgggagccaatatttttgggcaccgtcgaggatcctccatacgatgagcgattaacgtgggagggtcaacgggacaagatgacccaggcgtatgccatgtgcgttctggactacgagttccatatcctggacaacgccttcctggtccataagcccggcatcaaacagccaggcaatcgtaaggagatcttccctcaagcccgccgaaccaatgggcttatcgataaaaagatctccagggagatgcggatgatgtacggttctcggaatggttgtgttatttag

SEQ ID NO: 38850 - protein, 407 aa, DROSOPHILA
MFRISGLLSSLVVLTFVLEISCLENGTLAKLKKFVNCESKAYKSSNAIYKDYWVLENYVMADHGDIPCYSNVTYTTHADYTYLDNVVPLLERWRSPLSLAIYAPGTDFEPTIHSILYLLQCHPGHDLVRQLCSIHLYFDVEHLPQVVLPPETTLREPANCSGPPPYENVVKGNMYRSRNTLDYPVNMGRNVARRASLTHYVLASDIELYPTPGLVPDYMHFLGRQVIGIPGQQPTSPLVHVLRIFEVMANVSVPNTKPELQEMLKSGEAVPFHMDICEACHRGPNLEEWINASVVSKELNVFNVGHRSENNNNWEPIFLGTVEDPPYDERLTWEGQRDKMTQAYAMCVLDYEFHILDNAFLVHKPGIKQPGNRKEIFPQARRTNGLIDKKISREMRMMYGSRNGCVI

SEQ ID NO: 38851 - DNA, 2621 bp, DROSOPHILA
ggcatgggcacaccaatgtggtagtttatatcttcttgtgctccggcatcggatctctgactgtgatgtcctgcaaggcattgggcctagccatacggcagacgctgaataacggaggcaacgtcttcctcacatggatgccatggttcctgatcctggtcaccgtcactttcatagccatccagatgaactatctgaacaaggcgctggatatattcaatactagtatagttactccagtgtactatgtaatgttcaccaccctggtgatagctgcgtctgccatcctcttcaaggagttcacccacatgcggttcgatgatattctcggcgatgtgtgcggcttcctgatcgttatcacagctgtgttcctgctcaacgcgttcagagatattgatatatcgctgaacgatgtacgtggactgatgcgaccgaaaatgcagcgggtgtcgcagttcgacgaggaggtgctggtcaccagcaataccaaggaacggcggctgtcctacggatccagcgacatcttccggaaggcctgacacaagcagcgctaccaggtctagttacatcccttgcagcggctgacctgaagacaaggttgctttactccgtaaacgaggcattggtccaaatatctgtgcatatcacctgcaatcactttcatctcatcatttccatttattgttccttcactcttgttattcatacattcgctagcataagcacataggtttaggttacacttacatatattaaacacgacttaatgaaaacgatttgtaattgtagttttattttttgatttttgatatgatattcgtatctatgtattactaaaaaaaaaccattaaaatattctactacattggtaaatgtaggtcgttccaaatcgaacgacaatattcattgcaaataatgtgagtacatgctcaatcggatttagtaaaataaatcttcaagttattttcaaggtttgttagttagtaatttaatgaagtatctatgtattctgaatttcgcccttgctggtcttatctggatattttaatccgttcagccagatgcagttgctcagacttttagcggtgtgaaatgagtcatcggctgagttatccggactgttctccactggcggaagatcctttggtctacgaatctttcgtggcgtgaagaagtcgcgatctgtgattaaaggaaatcgctggctttcatttggagcaaccgcaggtaagctgatctgcggctggagtgtcagtgagtcctgtttcagggtcattcttccgaagttccggatgatggcaatcgcctccacgtccaccattgtggtgtcctcccagtcctccattgtggcgtgctctcccagcggcttggtgccagctactctctgaatcgtctccatcatttgcagactttgacgaatctctcggccctttccaccccgcgtgccatatccaagcagatcctcgcgggctgtcaaaagctcataggtatgaatgggaacggattctgagaattcctctttcttcctcagttcataggcgatctgtccatggaccagattaaagtgcggctccaactgcaccagatcgtgctcgaatcgtgatgtgggaacccaagccatgatgatttcagttgcttatagtattctcacagccttattttcatttcccggaaatgcttttctcaagtagactgcgcaaatattttcgaagattagaaattcaaaatcacacattcctatcgatagcgataaaaacgtttaaacgcttacaggtgaatcgcaacttatcgattgtcagtcggcaaatagaacaataaacagttttttaattaatccaatttggtttacttaagcaataaggatgatttgtatgcggctccgggtgttgcgtaatctcaatcgcagcgctttaaatggatttagaaaagattacatccgatcaaccggtgtgaatgtcaattattcagctgtcaactttccggccgccattagaacgctgaaaacttttagcaattctatcctaaccaaggaaccgaaaccaatctttgcatttatcgcatctcagcggcagtattcttgcgaaaaagtaggcaaaacaatggaggagcactgcgtagttccggatgtgatcgccaaggcaccggcgcagacagctgtggtggaatatcccggcgatattgtcgtgaagccgggtcaggtcctgacccccacccaggtgaaggatgagccgtgcgtgaaatgggaggcggacgccaataagctgtacaccctctgcatgaccgatccggatgcgcccagtcgcaaggatcccaagtttagggagtggcaccattggctggtgggcaacatacccggtggagatgtcgccaagggcgaggttctctccgcctacgtgggatccgggcctccaccagacaccggactccatcgttacgttttcctgatctacgagcagcggtgcaagctcacattcgacgagaagcgactgcccaataacagcggagatggacgcggtggcttcaaaatcgccgagttcgccaagaagtacgccctcggcaatcccattgccggtaacctctaccaggctgagtacgacgactatgtgcccatcctctacaag

SEQ ID NO: 38852 - DNA, 621 bp, DROSOPHILA
atggcttgggttcccacatcacgattcgagcacgatctggtgcagttggagccgcactttaatctggtccatggacagatcgcctatgaactgaggaagaaagaggaattctcagaatccgttcccattcatacctatgagcttttgacagcccgcgaggatctgcttggatatggcacgcggggtggaaagggccgagagattcgtcaaagtctgcaaatgatggagacgattcagagagtagctggcaccaagccgctgggagagcacgccacaatggaggactgggaggacaccacaatggtggacgtggaggcgattgccatcatccggaacttcggaagaatgaccctgaaacaggactcactgacactccagccgcagatcagcttacctgcggttgctccaaatgaaagccagcgatttcctttaatcacagatcgcgacttcttcacgccacgaaagattcgtagaccaaaggatcttccgccagtggagaacagtccggataactcagccgatgactcatttcacaccgctaaaagtctgagcaactgcatctggctgaacggattaaaatatccagataagaccagcaagggcgaaattcagaatacatag

SEQ ID NO: 38853 - protein, 206 aa, DROSOPHILA
MAWVPTSRFEHDLVQLEPHFNLVHGQIAYELRKKEEFSESVPIHTYELLTAREDLLGYGTRGGKGREIRQSLQMMETIQRVAGTKPLGEHATMEDWEDTTMVDVEAIAIIRNFGRMTLKQDSLTLQPQISLPAVAPNESQRFPLITDRDFFTPRKIRRPKDLPPVENSPDNSADDSFHTAKSLSNCIWLNGLKYPDKTSKGEIQNT

SEQ ID NO: 38854 - DNA, 3552 bp, DROSOPHILA
atgagaaaggtgtcatcgctgcaaagtcaaagacaaatattgccaggacccgcccacacttcgagttgccctagccgatgggtggttcctacggcaggttctgcatcaaatcaattagtatttcggctcttttcgattgccatcagctgttccaagtggggggcgttagtttaggccataaaatatcgattttctgcttttttcagcagaggaactgcaaagtcgctgatggctttcaagcggaaaatacttggcctggctaaatgaagacgtcatcggagcagtaaaaacaatatttattcggatttcttattcccagatttttgcaacgaacagaaatccttaaaaatgagggaacagaactttggaaaaatgaaatattatatctaaataaatagatctcttattcaatcttcatgtttacttgatactttttaatactttttctataaagcacttcattactttcggctactcgtgcagtattatttcctgttacaagataatcctaaaaatataaaaatagtgacataatttcttatatctttttatgcatttatctcttgatagcatttcaaatatttcccaatattaaagccaactattataagcaacgccccaaaaatttttcacaaatcgattttatttcaccaaaccacgcacttcttgagcggattcatctcggtgcccagtttacaattaaaagcctcgctgaactcgggcatattgctcagggtgccctgaacccggaactcatcataggcgtggacatcagtcttcagtctccggagcttatcgccattatccttgccgttgcaccaggtttgcgcaaacttaacgaagaacagctgtttgttgttgaaattaacacccctcagtggtttttccaaccaagccttgtcgccagttttcctcttgaatgcgtaatatgccattcgagtgccaacattatcggcgatattatcgccagaggtgagacttccatttgtctggacgcccatcaaaataaatttgttatactgcgattcgaggcagcgatatcgttctttaaagtttctcagtgaagctgaggaccaccagttcgtcttcttgccatcataattgtactgataacaatagctatcgaatccatgggccatttcatggcctataatattgcccactccagcgtatttgaggacatcgggaaagtctatatgatagaagggccactgggccatcccaatggtaataaaggccaagttaagaaaatcagcatagtacgcattcactgttctcgtgggcatgagaaggggaatcagtgccttgtccaccgatcgcagacgtatcctggctctactgccctccaggatgcacaggttctcgaaccaattgccggtcatattgatatcgctgtaaacaccatcgatcacttcgcgatgctgcagatcatccgtatagcccactaaaatatccatggatgccagtttggtcttagcctgcgaacgagtatcttcatccaaccacgtgtgatggtccaggagatcatagaacgtgtccttaatgtccttggcaacactcaggatatctgcgcgcctctccttatcgaacacctttccaataaaccagggcaacaaagcgtaattaaaatacgtctccgacaaagagcgacattcactttgaactccccctgttttagtttgagttttccacaagccataaaacttgaccagctctcgcatttttatataaccttttaacgtttccagattggtttgttccagaaagaaaaccaaatcgttgatattatccaattgattgagcactggccagtgggactcctgactgccattgaaggccagttcaaaaaatcgtgtccaattcaaacgatcgtgtttatgcttcaccagaaattccttgaaattcaactgctctgtttcattgcgacttttggctaaggaaactaaatttctttcaaattgcgttagattgttaaagttctccacaaattgcttgactttctctgcacttgaatccaagccaaactctctggtcatatttttcaactgctcctcactgaaaccagctaaaactttactgggaagcgttaaaagtatatcgaacttcctcgaagaagtactatagtgaactttgagcgctagcaaaggatatatgtcgtatttggacataaagttgatgtacatccaatcgtaggtcgcattgcgctcctttaagcgatccccatcgtgttccataaaatattgataacccaacgacaagttggccttcatttccacacagctggcatagaattgcttggctttaatctccgccgacgtggtgccattaactcccagatcctccaactctcttttggtggcattctgcaggaatccctgaatctgctcgtcgattttgtgctggattgcgtttagaaaactggtattcctggcctgttccggtaccaaatccgccttcttccaaccgccacaactgaattcgtaaaagttctcgcacggatcgatggtcctgttcatggtggacagcaggaaacgtccataatcctcgagcatttcctctctgtgattcgtggcgggtggcagggaaaatagatcgttggctaaaacacggccgattaaagtgagcgatattaacgtggcccacaaagcgttgaccatggtccaaaaaaacactcgagtgagagctataattatattcgagttgcgcgcccggcagcagacagaaaagttctaaacttttttggcaacgagctttggcaatttatacaatcatgatcgggccaaaaccaaaaaacgtgggcattcgggtcaaaggggggcactgagcacacgcttcagtggattaggtaatacaacacactcggattcaccacagaaatcacattagtggaacaatttatggttctaccttcgagctgctgaatcttccgcacaaatcttggcattcttcaattaaccgcaattctccaaaagagttcttatcactctagaaagctccggctgctcccgaaccgctgattttactattttatcgctctttggagatctcatcccgaactgtttctcttcgaatttgtttatttgttttttcagtgttttgttttttttttttttttgtttgtgaatgtcacatgttaatgaccccgttccgaaataatcaccgcaattataatgcaaacatttctaaatggtttttaactctctcatctcgtcaatttattttttatatatttatgtgttgcgtatttgtctgcgaatagactcgttacattagtcagtagacagagagaaatttgtggagatggggccttggaaaaagcgcttggaaattgtaccaattttaatgagaaaaaacggaatcacacaaaattatggtataaaaatagtgctatatttcaatttcagtttgacaaatcaatttgtgactttttatagcattttaattttaaatggtgcactgaaaaataaatgttaaatattagggtttatatatatggggaaaataattgttattcaaagaaaagcaaaaaaatactgcccaaaaatgaaatga

SEQ ID NO: 38855 - DNA, 1494 bp, DROSOPHILA
atgctcgaggattatggacgtttcctgctgtccaccatgaacaggaccatcgatccgtgcgagaacttttacgaattcagttgtggcggttggaagaaggcggatttggtaccggaacaggccaggaataccagttttctaaacgcaatccagcacaaaatcgacgagcagattcagggattcctgcagaatgccaccaaaagagagttggaggatctgggagttaatggcaccacgtcggcggagattaaagccaagcaattctatgccagctgtgtggaaatgaaggccaacttgtcgttgggttatcaatattttatggaacacgatggggatcgcttaaaggagcgcaatgcgacctacgattggatgtacatcaactttatgtccaaatacgacatatatcctttgctagcgctcaaagttcactatagtacttcttcgaggaagttcgatatacttttaacgcttcccagtaaagttttagctggtttcagtgaggagcagttgaaaaatatgaccagagagtttggcttggattcaagtgcagagaaagtcaagcaatttgtggagaactttaacaatctaacgcaatttgaaagaaatttagtttccttagccaaaagtcgcaatgaaacagagcagttgaatttcaaggaatttctggtgaagcataaacacgatcgtttgaattggacacgattttttgaactggccttcaatggcagtcaggagtcccactggccagtgctcaatcaattggataatatcaacgatttggttttctttctggaacaaaccaatctggaaacgttaaaaggttatataaaaatgcgagagctggtcaagttttatggcttgtggaaaactcaaactaaaacagggggagttcaaagtgaatgtcgctctttgtcggagacgtattttaattacgctttgttgccctggtttattggaaaggtgttcgataaggagaggcgcgcagatatcctgagtgttgccaaggacattaaggacacgttctatgatctcctggaccatcacacgtggttggatgaagatactcgttcgcaggctaagaccaaactggcatccatggatattttagtgggctatacggatgatctgcagcatcgcgaagtgatcgatggtgtttacagcgatatcaatatgaccggcaattggttcgagaacctgtgcatcctggagggcagtagagccaggatacgtctgcgatcggtggacaaggcactgattccccttctcatgcccacgagaacagtgaatgcgtactatgctgattttcttaacttggcctttattaccattgggatggcccagtggcccttctatcatatagactttcccgatgtcctcaaatacgctggagtgggcaatattataggccatgaaatggcccatggattcgatagctattgttatcagtacaattatgatggcaagaagacgaactgtataacaaatttattttga

SEQ ID NO: 38856 - protein, 497 aa, DROSOPHILA
MLEDYGRFLLSTMNRTIDPCENFYEFSCGGWKKADLVPEQARNTSFLNAIQHKIDEQIQGFLQNATKRELEDLGVNGTTSAEIKAKQFYASCVEMKANLSLGYQYFMEHDGDRLKERNATYDWMYINFMSKYDIYPLLALKVHYSTSSRKFDILLTLPSKVLAGFSEEQLKNMTREFGLDSSAEKVKQFVENFNNLTQFERNLVSLAKSRNETEQLNFKEFLVKHKHDRLNWTRFFELAFNGSQESHWPVLNQLDNINDLVFFLEQTNLETLKGYIKMRELVKFYGLWKTQTKTGGVQSECRSLSETYFNYALLPWFIGKVFDKERRADILSVAKDIKDTFYDLLDHHTWLDEDTRSQAKTKLASMDILVGYTDDLQHREVIDGVYSDINMTGNWFENLCILEGSRARIRLRSVDKALIPLLMPTRTVNAYYADFLNLAFITIGMAQWPFYHIDFPDVLKYAGVGNIIGHEMAHGFDSYCYQYNYDGKKTNCITNLF

SEQ ID NO: 38857 - DNA, 2903 bp, DROSOPHILA
tcatatgccatacagtagcaattgtcggcgggaaaataaatggggcatcggaaaaatgtaaagagaagttttgttaattacggcgcttatgcttaattatttaatttgagcttatttaagatttagcttacatataacaaatttacattactactaaaactgaaatacaaaataaaagtccttatagaaagtaacaaatgtttaaaatgtacttgtttcccgtctaattcaattttacgccattagtagtcctaaaatcctactaatagagttcagcgtagggcgtgtcactcagaatgatgatgtacaacgcccacacttcgatgaacaaatgttcggatttcactccctttgctgcttatgcgaaaactataaaatcaaaattatgtacagatttcataatcaatcaaagtcataaatgaaaagagcgccgtagaacaaaaaactgattgaaaagtagatatggcgaatatggcgtacaacccccactaaaaagcaaaagcagcagcgtaaccaaatgggctaagggtgctaagggtagagggggttacaaggtggaaaggcgtatcaaagttccataatgatgagtaattgatagtgacataaacggtttccattggcaatatgctttgggtgaaggggttggaggcgccgaaagagagctgtttaccatcggaggggtgaaaagccagcaagtgttgataatgatattgaaacccttttttttaccctttttttagcccattttatcagcacttttttccgccaaattctcacttcatttcgtttagtctataaaaatgcaattgtttaaccctttttttataccgcttttccacttattttctcgtgatttatagcgctggctacaagctgtcgtggcaaaacaatattaaatccttggtatctaaggcccgccgacggcattggatatcataattataatagcaacaacaacaacagcgggagcggggaaatcaacaaggatgttagccagcagatgacttccgcatgtggcggtagcgatggccagacatgtctgccagtctcgtattttggcatggagacgctggcatctgtcaaacagagacagaaatccctgccagactttctaataccactgcacgaaattatgttccagcaacaacatcattaccagcaaaggacaatgggcacattaattaatagtctgccgcccggcttggtcgggtatcccccccaaaaaacagagacgttcaagtcgttaaccccgccgaaagcactgcagcaccaccaaaacaaccaaaatcaccagattccccagaatcacaccggtgaccactccttcgtccggcactttcacgaacgagatcgcctcattcgggagcaccagctcaagcatcagcaattgcgtgacgtggaggaagtccttcaggaacaggagcaggacgaggagcaggagcacgaaacgctgaggaaaccccacgttgtaccatctgagctggagcacaaccatcattggcatggcgtcgtttgcgatgccaacggccatgccacaaggctgctccacattgccccaccaagggctgggccaacaccactgccaacacatcagcaaccgccagtcggagaggtcctgcccccgaactccacgtccttctcgaccattgtggatccgcccaaggagccaagcatttacgagcagccagcaccaaatggtcgacattgtcgtcctgccaacaaaggtaagttttatgctcgaattaattgtttagcagggacgaggaggaggaaaatgggttagttaagtaaatgtggataatatgtgcaatatacatatttgtttagcccaaatatacaacgttcaatcttatactaaaatgtaataactatttaactatgaaattacacagccaaactataattttgaacaattttatagtaaataactttcttagatttctattgtactctcaaagcggcagacatcccaatcatttcacattggaaatctaattcaggtaacccaaaaccacccatccactcaaaaagctcaaaataaaaccgaattcaactcaattacaagctctcaacttaatacaatacctctcgcacccttagccaccccaagcaaaggaaaagaaagtggggaaagtgcccctcggaattgccaacaaacaaactccatttaaaatcactaaaatattaataaattttacaaaagtgcgaacgaaatatgcgtgaaaattctcaagtacaccagcgcaacctttacaactttatttaatggaatttaaaaccactttgtccgcccagtgggtgggtgggtcaggctggggtcatttggtgggtggttgtcgggctgcccgaaaaggttgcttgcggcattctaaaaagaaaaaaaaaacccaaccacaattgcatgaggtaacctttgacagggacacaacaaaaagcgagtaaagaacccaccacccgcaccaacaatgggcgaaaagggaaaatccaaagtgaaaagctctgacgcaaaactggtgtcactaccaactgtgacccggtaccctgagcagcttatggccaattgagccccgcctcgggcaccaaacaccgccgagggtggccgtaaatccaataaaaacgctttacaagctgtaaagcaaagatcataaatccatttttgtttttttgtttttttttttctgacccaccaccgcacctccatttaaatgcgatttacatttttccaccgactctaaaatggttgcgcaacgacataagggttagatttgcatagattgattcatagatggaaatcttctgatggacaaaaaatggagtcggttggtgtagcgatgtctgtcatttagtttttatcaaaaatattcaaataaagtagtaaatagtttaaaatatgtaaagcattc

SEQ ID NO: 38858 - DNA, 735 bp, DROSOPHILA
atgacttccgcatgtggcggtagcgatggccagacatgtctgccagtctcgtattttggcatggagacgctggcatctgtcaaacagagacagaaatccctgccagactttctaataccactgcacgaaattatgttccagcaacaacatcattaccagcaaaggacaatgggcacattaattaatagtctgccgcccggcttggtcgggtatcccccccaaaaaacagagacgttcaagtcgttaaccccgccgaaagcactgcagcaccaccaaaacaaccaaaatcaccagattccccagaatcacaccggtgaccactccttcgtccggcactttcacgaacgagatcgcctcattcgggagcaccagctcaagcatcagcaattgcgtgacgtggaggaagtccttcaggaacaggagcaggacgaggagcaggagcacgaaacgctgaggaaaccccacgttgtaccatctgagctggagcacaaccatcattggcatggcgtcgtttgcgatgccaacggccatgccacaaggctgctccacattgccccaccaagggctgggccaacaccactgccaacacatcagcaaccgccagtcggagaggtcctgcccccgaactccacgtccttctcgaccattgtggatccgcccaaggagccaagcatttacgagcagccagcaccaaatggtcgacattgtcgtcctgccaacaaagccaaactataa

SEQ ID NO: 38859 - protein, 244 aa, DROSOPHILA
MTSACGGSDGQTCLPVSYFGMETLASVKQRQKSLPDFLIPLHEIMFQQQHHYQQRTMGTLINSLPPGLVGYPPQKTETFKSLTPPKALQHHQNNQNHQIPQNHTGDHSFVRHFHERDRLIREHQLKHQQLRDVEEVLQEQEQDEEQEHETLRKPHVVPSELEHNHHWHGVVCDANGHATRLLHIAPPRAGPTPLPTHQQPPVGEVLPPNSTSFSTIVDPPKEPSIYEQPAPNGRHCRPANKAKL

SEQ ID NO: 38860 - DNA, 2785 bp, DROSOPHILA
tttcaatttacaacaatttcgtttcaaaccacatttggtaaatgtgcccattttcattctcccattttttgtttgcataataatacaaagtttaggttttagtgccttttatggtgtctactgctgtaaagttgtatacaaccacttttcacttgtgggagctgattcgacaggccatgggaaaatttagagaaatgtttggactgctcaataaacgaatttaaaagagcaaacatttaaactatataaattgcgatatgtacttttatgacatgtttactttcgagtggtatggaatttctgtaattatttaactgaatgatatagtttctcacatattaacattttcattcaatgctaggtacagtaaaacttctaatcagtaacttactttacatttaccttttagaagagaatattaacttttaaacttttacccttatatatttttttatcaaaatacaaacttgtaatcgcagaatgggctgacaatgcaatatactcatgagccagttaataaactaaactaattaatctcagttataaggtatacaaacatccgttcgatttcaaacaaatccactgtttccacctgtaacgtgaaaagtcacgtgtacaggaatgtggatgggtcagttattttaagggaaaaatcaattacttccgctatcgagtcgtaaagatcacagcgctctatgtatttaataacagctttttaaagtgcagttaacagcaaattaggctttcagccgaagaagacacttttaattatcaacccatttgcaggcagcaaaggaggcagaaggaggaatacatatcgccagcggtccatgggtcaatatcataatctgaggcagcaaccggagcggcaaacaagtcgccacaggcagcaaggagcagttgagttggccataaatcaaagcgacgcaatttgctgctgacgaactgcaacgcaacagcggcaacaagagcagcagcatcagcagcagcagcaacaactatgccattactgctggcaacaacacttgccaacaattcccatcatcaacacttgagcacaacagcaacagagacagcagcagcagcagcaacagcaaaagcagccgcaactgcagcagcagcagcaacagcaaccatgttgctgacttcgccgacagcagcaactcattgccttgctgctgcaacatcggcagcaggtgttaatgttcaaattactggccaaggcgtttcagccactctgaacgacgatcaactgcaactgccggctaattatgccgctaacgttggccatttgaatggctttaaccctaaagacaactgcccaccagttccacccaccagcgagcgggcttttgagggattgctacgcctgccgcagatacaagtcaagcaggaattcatggagtcgccgccagagaggcctagctgccatcccatgaaccaccagcaagcaccagccaattcaggtgagttgacctttttctcatcggaatggccatatattataaggccatattataagcaaatgcataggtattcttaaattatgaaaatgttgtaaatgttttttacgagttgccaaagcctttaggagatggtacacgttattaagagctaaatatcttcatttattctattaattgtagcacttaagaaatctaaaatgtatatattatactccaccgctcattttaacactacctttggaccccttaatcaaaataatgcattttagtgcttaaatatagtatattataatattttctattctcagtctccatttaaacgactgtaagttatccaccttgcaagccccgcctgagtcaataaaaccccataaaggagttaacccttttcagcccaccgcccagcatccacacaaatgcatatgtgtatttaaaaacccattaagtgaaaaatgaggtatttacaacgtgttaacaagagcacggccatttttcatggtcttcggcccgaaaaaaaaacaggcctcaaaaagtgggcgaagcgccgtatgccaaagaaaaactcgtgccaaacgcatgcttatgggattttcaattttttatgcatcgaaacagatttcattttttattggcaaaggggtcgtcgtcatcttgatagagccgagaaaaaggatgcgacacaagggacccagacccgggctaatattgcaacagagtgtggtgccacgagtgcgaacatttatgaagattgaaagggttgtcaaacacttcatccgtcttaagggacaaggacaaggagaaccacaaggggttcaagagggtgccacacatcctgttgctcctgctgctcaatccaaaaggaaaaagggggttgcaacatcttgttttctttcgattattgaaattgccattttgccgtttgatgatctcactcgggggacttgaaaacacttttcgtgacctcaattgttatttaaagccaaccgagcccccagaccccaatttacacaatatccaatttaaataggactcattaccattcatcttcatatgtaaatccatttcctctggtccagctcggaaatgctcacatgacatgcaaaacccacaaaaaatcgaacctccttaagtgcgcaattatcaaaaatttaatgtaaaacaaagggttggagcactaaaacgaataagttcaacacgcgaccggaaattaaggtcgatttaagcaaatgtaactcaccgaagttggtttctttgattagattttctgttagatattcgtgatattcattcagtgccgagatcgttagcatttgatgcta

SEQ ID NO: 38861 - DNA, 477 bp, DROSOPHILA
atgccattactgctggcaacaacacttgccaacaattcccatcatcaacacttgagcacaacagcaacagagacagcagcagcagcagcaacagcaaaagcagccgcaactgcagcagcagcagcaacagcaaccatgttgctgacttcgccgacagcagcaactcattgccttgctgctgcaacatcggcagcaggtgttaatgttcaaattactggccaaggcgtttcagccactctgaacgacgatcaactgcaactgccggctaattatgccgctaacgttggccatttgaatggctttaaccctaaagacaactgcccaccagttccacccaccagcgagcgggcttttgagggattgctacgcctgccgcagatacaagtcaagcaggaattcatggagtcgccgccagagaggcctagctgccatcccatgaaccaccagcaagcaccagccaattcagtctccatttaa

SEQ ID NO: 38862 - protein, 158 aa, DROSOPHILA
MPLLLATTLANNSHHQHLSTTATETAAAAATAKAAATAAAAATATMLLTSPTAATHCLAAATSAAGVNVQITGQGVSATLNDDQLQLPANYAANVGHLNGFNPKDNCPPVPPTSERAFEGLLRLPQIQVKQEFMESPPERPSCHPMNHQQAPANSVSI

SEQ ID NO: 38863 - DNA, 2432 bp, DROSOPHILA
acaagaactttcacacttcaaacccatccatgtgactcattttttagtggcattcctaaacacacaaaaaatagtcggcaacaggaacaggactcaatgaacacatgatggctatgtcctgccgttatttcaagcatcagttacccggagacatttcaacgccttgcgatgaaaatatttttcatatttccccgtacttctccttttttggcccacatgcggagttgagactcttcagccaatgaaatgtgcccggttggttgcttttttaagagtcccccctccggctaccccccacagccccctctccgctccagaagccaggccaatatgacgttatcagcataatttcaggagtgtgcgtattgtggcccatcaaccctcagggggaaatattaaaatgaagtctgcgtgaccgttttttatgtaaatcaaccccttttttttatggcccaccagagagagagaggagcttattcaaatgccactggggttgagtcataaaaaaaagggttgctgtgattccataacgatgggcttatgtaaatgccggaagtcaaccctttcacagacagcgatttgtgattgtgattggttcttgggcagtgatttgaatatataagacaacaaaatggtgtttcttggtagtaggatcaagtatataaaaaaacgttaggctacaaggtgctttaatttaactttttattcatcaactacaaaaatatgaatattgtagcatacctataattctcttgtgcacaaaacgattagtaaacggtgtccaaaatatgtattttttttttataaaaactactgcttaataaaataacatcgtcgcaaaactttttgataccaatttaaacatcctgcaccgtttctctttgcagttggcaactttaaattcgagccaggccaacaacttggcacgccggcgaatgaagctgtcctaacgagttccgaggagaacaaagatggaactttgactgctgttgacacaaatatgcgcgatgtcagcgcaaatcacagcagctcctttctttcgtcctcgcccgcctcctcgactctggtgtcctgtcactccccctcgccgccgctgccgctgcttgcggaccaggacgatggaacgaggaggatgcgggacaagaagctaacgctcgaattgaagttgcaatcgtgtgatgaatatgttgagcagccaaaggataaaggagccgaacggctgcaaccagctcagattgccaacgacaatgctccgtcgcctctgcatttgaaactggaggagcaggatgagcaggagcaggcggacgtaaaggataaggtcctggaactgaccggagcagcagttgctctctatggccacttgaacaatgccagcaaggatgtgcgagatttagagcagtgtctgaaattgcaggacccaaatggtgagtagcaaagaactattgcgatggaaattgaagttaagaaggttttcaagaaatacagcgagtagggggtacatggctgatattacattttagtatcattttagtataaagcaaatcgctttataagttattacaatcatcgaaatgtcgcatagtatctaattacgtataagaaatcctacaaagtcaataattaattttgcatgcaaagacgttaagcccctcatttcaaaaatatctttacctttttgtaaatgtcattactttgaaaaaaatactttattaggcaactgtcctctgcccaaatgagagataaaggcatgcaaaaagatattcattttttaccttaaaactcgtgggaaacttccgcaaagtaggacccaagaaaaaattcacaaacaaagtaccttgaattgtgttttttttttttgagaaaacggcacaaaataaatcaaaaccgttagcaaccacaatcggagatctatgtatactcaaaatagtaaggaaatgaaagaacgcaattaaggaaactcgctataaaactcccgaaaaaacgaagcgcagagaaagtttcctaactacccctaagtaaacagaaggaaacccaaattttcatgctaaaaattgcataaaaaaagcggaaaaaaatacacttttgggggtaggtaaacgcctcgcatatgcatatacatctcaggactctgtactcactacctgagggtcctgccaatgtatgtccttacttctctggggtgtcaaataccagcaaagtaccgtagcatgttccttaccattgccattgtttagctccgctctatcgtgtgttttttaaggaatattttcttatcgaggtaggcagacaacgcaattgatttctgttcttttccaacacaaaaaaaggaaaaacagaccgagattttcggttaggacataaataagaatcaaagaatgtcatccttcgacatcgatgattcggtgcttcatcatgttccccaaaacaatggc

SEQ ID NO: 38864 - DNA, 432 bp, DROSOPHILA
atgcgcgatgtcagcgcaaatcacagcagctcctttctttcgtcctcgcccgcctcctcgactctggtgtcctgtcactccccctcgccgccgctgccgctgcttgcggaccaggacgatggaacgaggaggatgcgggacaagaagctaacgctcgaattgaagttgcaatcgtgtgatgaatatgttgagcagccaaaggataaaggagccgaacggctgcaaccagctcagattgccaacgacaatgctccgtcgcctctgcatttgaaactggaggagcaggatgagcaggagcaggcggacgtaaaggataaggtcctggaactgaccggagcagcagttgctctctatggccacttgaacaatgccagcaaggatgtgcgagatttagagcagtgtctgaaattgcaggacccaaatggtgagtag

SEQ ID NO: 38865 - protein, 143 aa, DROSOPHILA
MRDVSANHSSSFLSSSPASSTLVSCHSPSPPLPLLADQDDGTRRMRDKKLTLELKLQSCDEYVEQPKDKGAERLQPAQIANDNAPSPLHLKLEEQDEQEQADVKDKVLELTGAAVALYGHLNNASKDVRDLEQCLKLQDPNGE

SEQ ID NO: 38866 - DNA, 2903 bp, DROSOPHILA
actaaaagtcatatttgaatattattcgtaatataaaagctttatttttattgctagaaaattttaatgttaaataacttacgctcaattaaccaaattaaaagtttgtcaatgaaaaagtaagaaataatatatggtgatatcagcttaatgccttccttttaaatgtattttgtaaaattttggtagaattttgtgtttcagtgcagtgtatctaaaaaatatttgcggcttgcgatcatgaatattcagttcgattgccgctaccgttgacaggcttagtcaactgtttaggccaccttcatcccctcccgtatgcatttggctgataagctaagcaaaagtaagaatgagttggcgttaacaaattttaattttcggccatgtcacgttgatgccttgtcgccaagtgaaatttcaaggcaatgttccgatttaaccaaagcaacataaaccaaaaaattgaactaattaaaatgacaaaaaaaaagggcgagataccaagaaaagaagaagctcgtgaggggctttcaacctgcagataaacaggttcacatgtccatcatactttgcgtgcggaatgatgagtttgcataaatgagttttcttcgctgctcgtcttctaagctgaaaatgcgatttgagctctttgaatttctaattgttgaggcttttggttcgcctagaatttcctattcctcgaattatatttttgtaaatttatttattaccatgacaattgctttgctataatttatggcactcccatgcccaagcaatgcctgccacccccgccacgccctttatggctaattaatcttctttggctaattacagaccagccttcgtccacttgaccaacttgcggctatcggctctaatcaaggttcctgaggtgtttttcgagaaccgttttcaactgctatctgctccggagagtgattacctatgtgttctttgctgttgctgctgttggcacagttagccgtaaacactgattatgccattgttgctagcaaactactatcagcagcaacttcagcaacggcagcagcgtgttgctagcaacaacggcatgttacttgaatacaaaagccattgcaatacaaatcggggcagcaacaattgcagcagcaacaacagcagcagcaggaggaacagcaacagcaacaacaaccagcgacagctgttcgcagcggaagcactaacaatgtcaacgccgacaacaacatcgaaatacaaaatcaatggcgaggccaccgaaggcgtttcagcatccacactgctgtatcatcatccgcatcacagccatcgtcatcatcaccatcagcagtcgcaacagcagcagctacatcagcagcagcagcagcagcaacatcatcatcagcagcagcaccagttgctgctgcagcaacagctccttcagcaacatgtggccaacagttcaccactgcaacatctgagcaatctgtttggccaacatttgcctacgcacagcctgcagcacttgattgccgccgagtactggcagcagcagcagcaacagccagcagcaacaattaaaagcgagccaacaactcaatcagtggcagcaacatcggtctttagcttcacgccgcagcaacacgtcaattttgccgcctcattagtcgcattacagcaaaatgatgccttgcccgaggaaacaatggcaacggcaacagcaacaccgacaccggcgacaactgcatcaggagcggcaactgcagcagcagtcgcaacaagccctgcagcagcgacaacattgaaggcgccaacagcaacacaggcggcagcaacaatggacgacatcgatgatgatgatgacgacagcaacaacggcggccacatgcaaaatgcaggcggtaagtttgatgttttatgattattttggcagctgcagcagcaggcgagtggaggttgaaaagtttctgcgtagttaaaacatacatgagacatgagaggaaccgtttaaagatgaaaattattaagcttgttgcattgtagcattactataatatttacatttttttccatgacgtattaaggacactagagtaattattaaatgctataaaaatgaagaaattaggcacacataaatcccccactgatcctctattgtttcttgagcatatccttcagtcaaccctcgctgtttccataatgcaagctcatttccatttcctgtcccgatctcgcttcgttttgagtctgcttcgtttcgatccacctctcaactccgttttggcaacgtgtgtgtcttttgatttattatgcggcctttatttcattcataaaaatgaaatgattatgctttatgctatgtgccatggctgctcgctcacactttcgtgtcatcttttggccgaactcattttcatatcattagcctcatcagcagacacgtttgctgcgctgcacttccgcaccttccaccttcgcagttccccagatccctgagacctggccaaaacccaagcccaagcccaaaaacctcttaaacatcatcatcaggcgcaacattaacatcatcgcagcgccctctcatcagccaatcgtcgacttctgtttcccttttttttttgctgtttttttgtgtcttttcagtttgctctgcacaaaatcgtctggtgtctgcacgcaatattcgtagaaataagaatatatttgttagtttaggccaccaccacttgacgtgtttggaagcaaaccggaatgaataatattctgtgatggtcaagttttgaatatctatctgctcgcctgataaatgtctcggtcggcggaaatttacatggccttacagctcaggaaacgcaatcgcatgtcgagcaattaaattatgttttttctttttgctggaattatgtaaaacagcgaaa

SEQ ID NO: 38867 - DNA, 903 bp, DROSOPHILA
atgccattgttgctagcaaactactatcagcagcaacttcagcaacggcagcagcgtgttgctagcaacaacggcatgttacttgaatacaaaagccattgcaatacaaatcggggcagcaacaattgcagcagcaacaacagcagcagcaggaggaacagcaacagcaacaacaaccagcgacagctgttcgcagcggaagcactaacaatgtcaacgccgacaacaacatcgaaatacaaaatcaatggcgaggccaccgaaggcgtttcagcatccacactgctgtatcatcatccgcatcacagccatcgtcatcatcaccatcagcagtcgcaacagcagcagctacatcagcagcagcagcagcagcaacatcatcatcagcagcagcaccagttgctgctgcagcaacagctccttcagcaacatgtggccaacagttcaccactgcaacatctgagcaatctgtttggccaacatttgcctacgcacagcctgcagcacttgattgccgccgagtactggcagcagcagcagcaacagccagcagcaacaattaaaagcgagccaacaactcaatcagtggcagcaacatcggtctttagcttcacgccgcagcaacacgtcaattttgccgcctcattagtcgcattacagcaaaatgatgccttgcccgaggaaacaatggcaacggcaacagcaacaccgacaccggcgacaactgcatcaggagcggcaactgcagcagcagtcgcaacaagccctgcagcagcgacaacattgaaggcgccaacagcaacacaggcggcagcaacaatggacgacatcgatgatgatgatgacgacagcaacaacggcggccacatgcaaaatgcaggcggtaagtttgatgttttatga

SEQ ID NO: 38868 - protein, 300 aa, DROSOPHILA
MPLLLANYYQQQLQQRQQRVASNNGMLLEYKSHCNTNRGSNNCSSNNSSSRRNSNSNNNQRQLFAAEALTMSTPTTTSKYKINGEATEGVSASTLLYHHPHHSHRHHHHQQSQQQQLHQQQQQQQHHHQQQHQLLLQQQLLQQHVANSSPLQHLSNLFGQHLPTHSLQHLIAAEYWQQQQQQPAATIKSEPTTQSVAATSVFSFTPQQHVNFAASLVALQQNDALPEETMATATATPTPATTASGAATAAAVATSPAAATTLKAPTATQAAATMDDIDDDDDDSNNGGHMQNAGGKFDVL

SEQ ID NO: 38869 - DNA, 2180 bp, DROSOPHILA
agagagagatggattgattgcacagagagaaattgtgaaatctaaatgctatttttagaaagtggttaagaaaaactactctgtactatgtagcaacaatatagtttatttttttcattttattttagatgattacgtatagtattagcatttagcccaataggctaatgcgttatgttaatgcgagttttactttagtttgcttgattacaactttttaacattcaactattgtaaacaaaacgagtagaatttattttgaatttatttttaataatcgtacggctaaataagtttcttaatcacgtataagttacatttttaacttttcttaattaagattttaacaatatatttctcgctgtgtacttctctcagtagcactccctgagttttttctcctgtttggttttaggctcaactcgcgttttgtttatgtttcggcaaaatgcaaatgaattggagtgagaaatgaaaaatgaacggagcacctgacttgagttgtgggataagttggcggtgggggtgggtggaaattgggggtgtagaccttgcgggctgacctagcgacccaaaattaattgaattaaatttgattttatatttatttcgttttgttttggttagcggttctctgccggcttccttactgccaacttgtgggcacgtaaaaatgggtttgtcatgcaaatcgtgattttatggcactcttattatggagcccaagaaatggggttgttgaaagattcaatagccaagttatttgtttgtttggttaatgaggctgtattgtgcgccaaatgaggggattgtttatgaatgattatgagaattcacttcaaaagtggtttactttgatcaaagaacttaaattacttaccttctacaagtgttggataaattgtaaataactggtatatcctcaacaaatgtaatccccaaaatttgttctgtaattcggaactaaatcgcatttgttatctgcgctcaagtcattaacatgcccagtctagccatttttccacaggacatccaggccattgaagcctccatgcagccatataactcgaatctgtcacaacccattcttccttcactggctgctccccaacttatcactgcctcatatggagtcgccactcaacgcgactgccaatcaattgtagacagggggaaataaccatgcagataactagaactgcaccgcatcccctaatagacagcgcatccgctacactctgaatcatacactcaaaaaaatagtgcaaaaataaataaatatattaagattcgtttatatagtacctcttaactctttgacacacaaaaacttcttatataaagtgcttatttgtatttcaatgcaattgctcactttcctttttgattagaacttctaatagcgtgatctagataccttaaaaccatcttcgagtgtatctgagacccaaagagtgggcagctgaatggagacaaccgtgaaacgagacccgcgtgtggccccagctgttgttgcaacgcgtcacattaatcaaggcacccagtggctccaagcccgctcactcaaccccttcgatttggtcagcagtgggtgccagggccccactctcaaagctaacgtcatcacacatctcgcacatccaggggatggccgaaaaatcattgttgacatttgtaattagaattgatagcaagcagacagacagccgccccccaaaaaaggggttggcccggtggtaaggggggggggggatttagaacggttagccagggattcagacgttaaactaatttcgatttcgtttttccaaagctccaaccaaagcgatatgcgcactttgagttggggttctgcacgtccatcatttgttaaacttttgcttctttttgccgaacagcactgtgattggaaggagatgatagcatgtgcgtgtgatgtgcactgaacaaaattggagggaagtctacttgccaaaaatattacgattatttaaaccttaaatggaattttctgaaatcatagatgctaagcaaatattccaattctataaatccttatggaattatataagaatttctccatgtgatcgataaatgcgtgctagcaaaatagcagaacacacaatcacgcaggtcaattgaaaggcatttcacttggagaatgacagcaactaagcttc

SEQ ID NO: 38870 - DNA, 180 bp, DROSOPHILA
atgcccagtctagccatttttccacaggacatccaggccattgaagcctccatgcagccatataactcgaatctgtcacaacccattcttccttcactggctgctccccaacttatcactgcctcatatggagtcgccactcaacgcgactgccaatcaattgtagacagggggaaataa

SEQ ID NO: 38871 - protein, 59 aa, DROSOPHILA
MPSLAIFPQDIQAIEASMQPYNSNLSQPILPSLAAPQLITASYGVATQRDCQSIVDRGK
